United States Patent Application Publication US 2024/0131193 A1 - sequence listing, part 11

SEQ ID NO: 19764 - DNA, 1368 bp, synthetic construct
  source 1..1368: mol_type = other DNA; note = Synthetic coding sequence
atgttcacagaaggagaggagatgtacctgcagggcagcacagtgtggcacccagactgcaagcagagcaccaagacagaggagaagctgcggctgcccaacatccgccgcagcagcagtgacttcttctacagcaagagcctcatccggaggacaggccgcagccccagcctgcagcccaccaggaccagcagcgagagcatctacagccggcccggcagcagcatccctggcagccctggccacaccatctatgccaaggtggacaatgagatcctggactacaaggacctggccgccatccccaaggtgaaggccatctatgacatcgagaggccagacctgatcacctatgagcccttctacaccagcggctatgatgacaagcaggagcggcagagcctgggggagagccccaggaccctgagccccaccccatctgctgagggctaccaggatgtgcgggacaggatgatccacaggagcaccagccagggcagcatcaacagccctgtgtacagccgccacagctacacccccaccaccagccgcagcccccagcacttccacaggccagaccagggcatcaacatctacaggaagccacccatctacaagcagcacgccgccctggccgcccagagcaagagcagcgaggacatcatcaagttcagcaagtttcctgctgcccaggccccagaccccagcgagacccccaagattgaaacagaccactggccaggccccccatcctttgctgtggtgggccctgacatgaagagaagaagcagcggccgggaggaggatgatgaggagctgctgcggcggcggcagctgcaggaggagcagctgatgaagctgaacagcggcctgggccagctgatcctgaaggaggagatggagaaggagagccgggagaggagcagcctgctggccagccgctatgacagccccatcaacagcgccagccacatccccagcagcaagacagccagcctgcccggctacggcagaaatggcctgcacaggcctgtgtccacagactttgcccagtacaacagctatggagatgtgtctggaggagtgcgggacttccagaccctgcctgatggccacatgcctgccatgaggatggacagaggagtgtccatgcccaacatgctggagcccaagatcttcccctatgagatgctgatggtgaccaacagaggaagaaacaagatcctgcgggaggtggacaggacccggctggagcggcacctggcccctgaggtgttccgggagatcttcggcatgagcatccaggagtttgaccggctgcccctgtggaggagaaatgacatgaagaagaaggccaagctgttctag

SEQ ID NO: 19765 - DNA, 2241 bp, synthetic construct
  source 1..2241: mol_type = other DNA; note = Synthetic coding sequence
atgctgatgaccctggagatgacagagctgacagacccccaccacaccatgggagactacaaggtggcccacccccaggacccccaccaccccagcgagaagcctgtgatccactgccacaagtgtggggagccctgcaagggggaggtgctgcgggtgcagaccaagcacttccacatcaagtgcttcacctgcaaggtgtgtggctgtgacctggcccagggcggcttcttcatcaagaatggagagtacctgtgcaccctggactaccagaggatgtatggcacccgctgccacggctgtggggagtttgtggagggggaggtggtgacagccctgggcaagacctaccaccccaactgctttgcctgcaccatctgcaagaggcccttccccccaggggacagagtgaccttcaacggccgggactgcctgtgccagctgtgtgcccagcccatgagcagcagccccaaggagaccaccttcagcagcaactgtgccggctgcggccgggacatcaagaatggccaggccctgctggccctggacaagcagtggcacctgggctgcttcaagtgcaagagctgtgggaaggtgctgactggagagtacatcagcaaggatggagccccctactgtgagaaggactaccagggcctgtttggagtgaagtgtgaggcctgccaccagttcatcaccgggaaggtgctggaggccggggacaagcactaccaccccagctgtgcccgctgcagccgctgcaaccagatgttcacagaaggagaggagatgtacctgcagggcagcacagtgtggcacccagactgcaagcagagcaccaagacagaggagaagctgcggctgcccaacatccgccgcagcagcagtgacttcttctacagcaagagcctcatccggaggacaggccgcagccccagcctgcagcccaccaggaccagcagcgagagcatctacagccggcccggcagcagcatccctggcagccctggccacaccatctatgccaaggtggacaatgagatcctggactacaaggacctggccgccatccccaaggtgaaggccatctatgacatcgagaggccagacctgatcacctatgagcccttctacaccagcggctatgatgacaagcaggagcggcagagcctgggggagagccccaggaccctgagccccaccccatctgctgagggctaccaggatgtgcgggacaggatgatccacaggagcaccagccagggcagcatcaacagccctgtgtacagccgccacagctacacccccaccaccagccgcagcccccagcacttccacaggcctggaaatgagcccagcagcggcaggaacagccccctgccctacagaccagacagccggcccctgacccccacctacgcccaggcccccaagcacttccacgtgcctgaccagggcatcaacatctacaggaagccacccatctacaagcagcacgccgccctggccgcccagagcaagagcagcgaggacatcatcaagttcagcaagtttcctgctgcccaggccccagaccccagcgagacccccaagattgaaacagaccactggccaggcccccccagctttgctgtggtgggccctgacatgaagaggaggagcagcggccgggaggaggatgatgaggagctgctgcggcggcggcagctgcaggaggagcagctgatgaagctgaacagcggcctgggccagctgatcctgaaggaggagatggagaaggagagccgggagaggagcagcctgctggccagccgctatgacagccccatcaacagcgccagccacatccccagcagcaagacagccagcctgcccggctatggaagaaatggcctgcacaggcctgtgtccacagactttgcccagtacaacagctatggagatgtgtctgggggcgtgcgggacttccagaccctgcctgatggccacatgcctgccatgaggatggaccggggcgtgtccatgcccaacatgctggagcccaagatcttcccctatgagatgctgatggtgaccaacagaggaagaaacaagatcctgcgggaggtggacaggacccggctggagcggcacctggcccctgaggtgttccgggagatcttcggcatgagcatccaggagtttgaccggctgcccctgtggaggagaaatgacatgaagaagaaggccaagctgttctag

SEQ ID NO: 19766 - DNA, 915 bp, synthetic construct
  source 1..915: mol_type = other DNA; note = Synthetic coding sequence
atggccgaggccagcgctgctggagctgacagcggggctgctgtggccgcccaccgcttcttctgccacttctgcaagggggaggtgagccccaagctgcctgagtacatctgcccccgctgtgagagcggcttcatcgaggaggtgacagatgacagcagcttcctgggcggcggcggcagcagaattgacaacaccaccaccacccactttgctgagctgtggggccacctggaccacaccatgttcttccaggacttccggcccttcctgagcagcagccccctggaccaggacaacagagccaatgaaagaggccaccagacccacacagacttctggggcgcccggcccccccggctgcccctgggccgccgctaccgcagccggggcagcagcaggccagacaggagccctgccatcgagggcatcctgcagcacatctttgctggcttctttgccaacagcgccatccctggcagcccccaccccttctcctggagcggcatgctgcacagcaaccctggggactatgcctggggccagacaggcctggatgccatcgtgacccagctgctgggccagctggagaacacaggccccccacctgctgacaaggagaagatcaccagcctgcccaccgtgacagtgacccaggagcaggtggacatgggcctggagtgccctgtgtgcaaggaggactacacagtggaggaggaggtgcggcagctgccctgcaaccacttcttccacagcagctgcatcgtgccctggctggagctgcatgacacctgccctgtgtgcaggaagagcctgaatggagaggacagcacccggcagagccagagcacagaggccagcgccagcaaccgcttcagcaatgacagccagctgcatgaccgctggaccttctag

SEQ ID NO: 19767 - DNA, 636 bp, synthetic construct
  source 1..636: mol_type = other DNA; note = Synthetic coding sequence
atgagctgcaccatcgagaagatcctgacagatgccaagaccctgctggagcggctgcgggagcatgatgctgctgctgagagcctggtggaccagagcgctgccctgcaccggcgggtggccgccatgagggaggccggcacagccctgcctgaccaggtgcggcagcgctaccaggaggatgccagtgacatgaaggacatgagcaagtacaagccccacatcctgctgagccaggagaacacccagatccgggacctgcagcaggagaaccgggagctgtggatcagcctggaggagcaccaggatgccctggagctgatcatgagcaagtacaggaagcagatgctgcagctgatggtggccaagaaggctgtggatgctgagcctgtgctgaaggcccaccagagccacagcgctgagattgagagccagattgaccgcatctgtgagatgggagaggtgatgaggaaggctgtgcaggtggatgatgaccagttctgcaagatccaggagaagctggcccagctggagctggagaacaaggagctgcgggagctgctgagcatcagcagcgagagcctgcaggccaggaaggagaacagcatggacacagccagccaggccatcaagtag

SEQ ID NO: 19768 - DNA, 2451 bp, synthetic construct
  source 1..2451: mol_type = other DNA; note = Synthetic coding sequence
atggtgctgatgttccagatccgctacatcagccagacccagggcctgcctgctgagtacctgctgtctgctggcaccaagaccacccgcttcttcaacagagaccccaacctgggctaccccctgtggaggctgaagaccccagaggagcacgagctggagaccggcatcaagagcaaggaggccaggaagtacatcttcaactgcctggatgacatggcccaggtgaacatgagcacagacctggagggcacagacatgctggccgagaaggctgaccggcgggagtacatcgacctgctgaagaagatgctgaccattgatgctgacaagaggatcacccccctgaagaccctgaaccaccagtttgtgaccatgacccacctgctggacttcccccacagcaaccacgtgaagagctgcttccagaacatggagatctgcaagagaagagtgcacatgtatgacacagtgtcccagatcaagagccccttcaccacccacgtggcccccaacaccagcaccaacctgaccatgtccttcagcaaccagctgaacacagtgcacaaccaggcctctgtgctggccagcagcagcacagctgctgctgccaccctgagcctggccaacagtgatgtgtccctgctgaactaccagagcgccctgtaccccagcagcgctgcccctgtgcctggggtggcccagcagggcgtgtccctgcagcccggcaccacccagatctgcacccagacagaccccttccagcagaccttcatcgtgtgccccccagccttccagacaggcctgcaggccaccaccaagcacagcggcttccctgtgaggatggacaatgctgtgcccatcgtgccccaggccccagctgcccagcccctgcagatccagagcggcgtgctgacccagggcagctgcacccccctgatggtggccaccctgcacccccaggtggccaccatcaccccccagtatgctgtgcccttcaccctgagctgtgccgccggccggcctgccctggtggagcagacagctgctgtgctgcaggcctggccaggcggcacccagcagatcctgctgcccagcacctggcagcagctgcccggggtggccctgcacaacagcgtgcagcccacagccatgatccctgaggccatgggcagcggccagcagctggccgactggagaaatgcccacagccacggcaaccagtacagcaccatcatgcagcagcccagcctgctgaccaaccacgtgaccctggccacagcccagcccctgaatgtgggcgtggcccacgtggtgcggcagcagcagagcagcagcctgcccagcaagaagaacaagcagagcgcccctgtgagcagcaagagcagcctggatgtgctgcccagccaggtgtacagcctggtgggcagcagccccctgcggaccaccagcagctacaacagcctggtgcctgtgcaggaccagcaccagcccatcatcatcccagacacccccagcccccctgtgtctgtcatcaccatccgcagtgacacagatgaggaggaggacaacaagtacaagcccagcagcagcggcctgaagcccaggagcaatgtcatctcctatgtgacagtgaatgacagcccagacagcgacagcagcctgagcagcccctacagcacagacaccctgagcgccctgcggggcaacagcggctctgtgctggagggccctggccgggtggtggctgatggcaccggcaccaggaccatcatcgtgccccccctgaagacccagctgggggactgcaccgtggccacccaggccagcggcctgctgagcaacaagaccaagcctgtggcctctgtgtctggccagagcagcggctgctgcatcacccccaccggctaccgggcccagaggggcggcaccagcgctgcccagcccctgaacctgagccagaaccagcagagcagcgctgcccccaccagccaggagaggagcagcaacccagccccccggcggcagcaggcctttgtggcccccctgagccaggccccctacaccttccagcacggcagccccctgcacagcacaggccacccccacctggccccagccccagcccacctgcccagccaggcccacctgtacacctatgctgcccccaccagcgctgctgccctgggcagcaccagcagcatcgcccacctgttcagcccccagggcagcagcagacatgctgctgcctacaccacccaccccagcaccctggtgcaccaggtgcctgtgtctgtgggccccagcctgctgaccagcgcctctgtggccccagcccagtaccagcaccagtttgccacccagagctacatcggcagcagccggggcagcaccatctacacaggctaccccctgagccccaccaagatcagccagtacagctacctgtag

SEQ ID NO: 19769 - DNA, 3498 bp, synthetic construct
  source 1..3498: mol_type = other DNA; note = Synthetic coding sequence
atggccagccagctgcaggtgttcagcccccccagcgtgagcagcagcgccttctgcagcgccaagaagctgaagattgagcccagcggctgggatgtgtctggccagagcagcaatgacaagtactacacccacagcaagaccctgcctgccacccagggccaggccaacagcagccaccaggtggccaacttcaacatcccagcctatgaccagggcctgctgctgcctgccccagctgtggagcacatcgtggtgacagctgctgacagcagcggcagcgctgccaccagcaccttccagagcagccagaccctgacccacaggagcaatgtgtccctgctggagccctaccagaagtgtggcctgaagaggaagtctgaggaggtggacagcaatggatctgtgcagatcatcgaggagcacccccccctgatgctgcagaacagaacagtggtgggcgccgccgccaccaccaccaccgtgaccaccaagagcagcagcagcagcggggagggggactaccagctggtgcagcacgagatcctgtgcagcatgaccaacagctatgaggtgctggagttcctgggccggggcaccttcggccaggtggccaagtgctggaagaggagcaccaaggagatcgtggccatcaagatcctgaagaaccaccccagctatgcccggcagggccagatcgaggtgtccatcctgagccggctgagcagtgaaaatgctgatgagtacaactttgtgcgctcctatgagtgcttccagcacaagaaccacacctgcctggtgtttgagatgctggagcagaacctgtatgacttcctgaagcagaacaagttcagccccctgcccctgaagtacatccggcccatcctgcagcaggtggccacagccctgatgaagctgaagagcctgggcctcatccacgccgacctgaagccagagaacatcatgctggtggaccctgtgcggcagccctacagagtgaaggtgattgactttggcagcgccagccacgtgtccaaggctgtgtgcagcacctacctgcagagccgctactaccgggcccctgagatcatcctgggcctgcccttctgtgaggccatcgacatgtggagcctgggctgtgtgattgctgagctgttcctgggctggcccctgtacccaggggcctctgaatatgaccagatccgctacatcagccagacccagggcctgcctgctgagtacctgctgtctgctggcaccaagaccacccgcttcttcaacagagaccccaacctgggctaccccctgtggaggctgaagaccccagaggagcacgagctggagaccggcatcaagagcaaggaggccaggaagtacatcttcaactgcctggatgacatggcccaggtgaacatgagcacagacctggagggcacagacatgctggccgagaaggctgaccggcgggagtacatcgacctgctgaagaagatgctgaccattgatgctgacaagaggatcacccccctgaagaccctgaaccaccagtttgtgaccatgacccacctgctggacttcccccacagcaaccacgtgaagagctgcttccagaacatggagatctgcaagagaagagtgcacatgtatgacacagtgtcccagatcaagagccccttcaccacccacgtggcccccaacaccagcaccaacctgaccatgtccttcagcaaccagctgaacacagtgcacaaccaggcctctgtgctggccagcagcagcacagctgctgctgccaccctgagcctggccaacagtgatgtgtccctgctgaactaccagagcgccctgtaccccagcagcgctgcccctgtgcctggggtggcccagcagggcgtgtccctgcagcccggcaccacccagatctgcacccagacagaccccttccagcagaccttcatcgtgtgccccccagccttccagacaggcctgcaggccaccaccaagcacagcggcttccctgtgaggatggacaatgctgtgcccatcgtgccccaggccccagctgcccagcccctgcagatccagagcggcgtgctgacccagcaggcctggccaggcggcacccagcagatcctgctgcccagcacctggcagcagctgcccggggtggccctgcacaacagcgtgcagcccacagccatgatccctgaggccatgggcagcggccagcagctggccgactggagaaatgcccacagccacggcaaccagtacagcaccatcatgcagcagcccagcctgctgaccaaccacgtgaccctggccacagcccagcccctgaatgtgggcgtggcccacgtggtgcggcagcagcagagcagcagcctgcccagcaagaagaacaagcagagcgcccctgtgagcagcaagagcagcctggatgtgctgcccagccaggtgtacagcctggtgggcagcagccccctgcggaccaccagcagctacaacagcctggtgcctgtgcaggaccagcaccagcccatcatcatcccagacacccccagcccccctgtgtctgtcatcaccatccgcagtgacacagatgaggaggaggacaacaagtacaagcccagcagcagcggcctgaagcccaggagcaatgtcatctcctatgtgacagtgaatgacagcccagacagcgacagcagcctgagcagcccctacagcacagacaccctgagcgccctgcggggcaacagcggctctgtgctggagggccctggccgggtggtggctgatggcaccggcaccaggaccatcatcgtgccccccctgaagacccagctgggggactgcaccgtggccacccaggccagcggcctgctgagcaacaagaccaagcctgtggcctctgtgtctggccagagcagcggctgctgcatcacccccaccggctaccgggcccagagaggaggcaccagcgctgcccagcccctgaacctgagccagaaccagcagagcagcgctgcccccaccagccaggagaggagcagcaacccagccccccggcggcagcaggcctttgtggcccccctgagccaggccccctacaccttccagcacggcagccccctgcacagcacaggccacccccacctggccccagccccagcccacctgcccagccaggcccacctgtacacctacgccgcccccaccagcgctgctgccctgggcagcaccagcagcatcgcccacctgttcagcccccagggcagcagcagacatgctgctgcctacaccacccaccccagcaccctggtgcaccaggtgcctgtgtctgtgggccccagcctgctgaccagcgcctctgtggccccagcccagtaccagcaccagtttgccacccagagctacatcggcagcagccggggcagcaccatctacacaggctaccccctgagccccaccaagatcagccagtacagctacctgtag

SEQ ID NO: 19770 - DNA, 3498 bp, synthetic construct; identical to SEQ ID NO: 19769
  source 1..3498: mol_type = other DNA; note = Synthetic coding sequence

SEQ ID NO: 19771 - DNA, 3633 bp, synthetic construct
  source 1..3633: mol_type = other DNA; note = Synthetic coding sequence
atggccagccagctgcaggtgttcagcccccccagcgtgagcagcagcgccttctgcagcgccaagaagctgaagattgagcccagcggctgggatgtgtctggccagagcagcaatgacaagtactacacccacagcaagaccctgcctgccacccagggccaggccaacagcagccaccaggtggccaacttcaacatcccagcctatgaccagggcctgctgctgcctgccccagctgtggagcacatcgtggtgacagctgctgacagcagcggcagcgctgccaccagcaccttccagagcagccagaccctgacccacaggagcaatgtgtccctgctggagccctaccagaagtgtggcctgaagaggaagtctgaggaggtggacagcaatggatctgtgcagatcatcgaggagcacccccccctgatgctgcagaacagaacagtggtgggcgccgccgccaccaccaccaccgtgaccaccaagagcagcagcagcagcggggagggggactaccagctggtgcagcacgagatcctgtgcagcatgaccaacagctatgaggtgctggagttcctgggccggggcaccttcggccaggtggccaagtgctggaagaggagcaccaaggagatcgtggccatcaagatcctgaagaaccaccccagctatgcccggcagggccagatcgaggtgtccatcctgagccggctgagcagtgaaaatgctgatgagtacaactttgtgcgctcctatgagtgcttccagcacaagaaccacacctgcctggtgtttgagatgctggagcagaacctgtatgacttcctgaagcagaacaagttcagccccctgcccctgaagtacatccggcccatcctgcagcaggtggccacagccctgatgaagctgaagagcctgggcctcatccacgccgacctgaagccagagaacatcatgctggtggaccctgtgcggcagccctacagagtgaaggtgattgactttggcagcgccagccacgtgtccaaggctgtgtgcagcacctacctgcagagccgctactaccgggcccctgagatcatcctgggcctgcccttctgtgaggccatcgacatgtggagcctgggctgtgtgattgctgagctgttcctgggctggcccctgtacccaggggcctctgaatatgaccagatccgctacatcagccagacccagggcctgcctgctgagtacctgctgtctgctggcaccaagaccacccgcttcttcaacagagaccccaacctgggctaccccctgtggaggctgaagaccccagaggagcacgagctggagaccggcatcaagagcaaggaggccaggaagtacatcttcaactgcctggatgacatggcccaggtgaacatgagcacagacctggagggcacagacatgctggccgagaaggctgaccggcgggagtacatcgacctgctgaagaagatgctgaccattgatgctgacaagaggatcacccccctgaagaccctgaaccaccagtttgtgaccatgacccacctgctggacttcccccacagcaaccacgtgaagagctgcttccagaacatggagatctgcaagagaagagtgcacatgtatgacacagtgtcccagatcaagagccccttcaccacccacgtggcccccaacaccagcaccaacctgaccatgtccttcagcaaccagctgaacacagtgcacaaccaggcctctgtgctggccagcagcagcacagctgctgctgccaccctgagcctggccaacagtgatgtgtccctgctgaactaccagagcgccctgtaccccagcagcgctgcccctgtgcctggggtggcccagcagggcgtgtccctgcagcccggcaccacccagatctgcacccagacagaccccttccagcagaccttcatcgtgtgccccccagccttccagacaggcctgcaggccaccaccaagcacagcggcttccctgtgaggatggacaatgctgtgcccatcgtgccccaggccccagctgcccagcccctgcagatccagagcggcgtgctgacccagggcagctgcacccccctgatggtggccaccctgcacccccaggtggccaccatcaccccccagtatgctgtgcccttcaccctgagctgtgccgccggccggcctgccctggtggagcagacagctgctgtgctgcaggcctggccaggcggcacccagcagatcctgctgcccagcacctggcagcagctgcccggggtggccctgcacaacagcgtgcagcccacagccatgatccctgaggccatgggcagcggccagcagctggccgactggagaaatgcccacagccacggcaaccagtacagcaccatcatgcagcagcccagcctgctgaccaaccacgtgaccctggccacagcccagcccctgaatgtgggcgtggcccacgtggtgcggcagcagcagagcagcagcctgcccagcaagaagaacaagcagagcgcccctgtgagcagcaagagcagcctggatgtgctgcccagccaggtgtacagcctggtgggcagcagccccctgcggaccaccagcagctacaacagcctggtgcctgtgcaggaccagcaccagcccatcatcatcccagacacccccagcccccctgtgtctgtcatcaccatccgcagtgacacagatgaggaggaggacaacaagtacaagcccagcagcagcggcctgaagcccaggagcaatgtcatctcctatgtgacagtgaatgacagcccagacagcgacagcagcctgagcagcccctacagcacagacaccctgagcgccctgcggggcaacagcggctctgtgctggagggccctggccgggtggtggctgatggcaccggcaccaggaccatcatcgtgccccccctgaagacccagctgggggactgcaccgtggccacccaggccagcggcctgctgagcaacaagaccaagcctgtggcctctgtgtctggccagagcagcggctgctgcatcacccccaccggctaccgggcccagaggggcggcaccagcgctgcccagcccctgaacctgagccagaaccagcagagcagcgctgcccccaccagccaggagaggagcagcaacccagccccccggcggcagcaggcctttgtggcccccctgagccaggccccctacaccttccagcacggcagccccctgcacagcacaggccacccccacctggccccagccccagcccacctgcccagccaggcccacctgtacacctatgctgcccccaccagcgctgctgccctgggcagcaccagcagcatcgcccacctgttcagcccccagggcagcagcagacatgctgctgcctacaccacccaccccagcaccctggtgcaccaggtgcctgtgtctgtgggccccagcctgctgaccagcgcctctgtggccccagcccagtaccagcaccagtttgccacccagagctacatcggcagcagccggggcagcaccatctacacaggctaccccctgagccccaccaagatcagccagtacagctacctgtag

SEQ ID NO: 19772 - DNA, 3228 bp, synthetic construct
  source 1..3228: mol_type = other DNA; note = Synthetic coding sequence
atggccagccagctgcaggtgttcagcccccccagcgtgagcagcagcgccttctgcagcgccaagaagctgaagattgagcccagcggctgggatgtgtctggccagagcagcaatgacaagtactacacccacagcaagaccctgcctgccacccagggccaggccaacagcagccaccaggtggccaacttcaacatcccagcctatgaccagggcctgctgctgcctgccccagctgtggagcacatcgtggtgacagctgctgacagcagcggcagcgctgccaccagcaccttccagagcagccagaccctgacccacaggagcaatgtgtccctgctggagccctaccagaagtgtggcctgaagaggaagtctgaggaggtggacagcaatggatctgtgcagatcatcgaggagcacccccccctgatgctgcagaacagaacagtggtgggcgccgccgccaccaccaccaccgtgaccaccaagagcagcagcagcagcggggagggggactaccagctggtgcagcacgagatcctgtgcagcatgaccaacagctatgaggtgctggagttcctgggccggggcaccttcggccaggtggccaagtgctggaagaggagcaccaaggagatcgtggccatcaagatcctgaagaaccaccccagctatgcccggcagggccagatcgaggtgtccatcctgagccggctgagcagtgaaaatgctgatgagtacaactttgtgcgctcctatgagtgcttccagcacaagaaccacacctgcctggtgtttgagatgctggagcagaacctgtatgacttcctgaagcagaacaagttcagccccctgcccctgaagtacatccggcccatcctgcagcaggtggccacagccctgatgaagctgaagagcctgggcctcatccacgccgacctgaagccagagaacatcatgctggtggaccctgtgcggcagccctacagagtgaaggtgattgactttggcagcgccagccacgtgtccaaggctgtgtgcagcacctacctgcagagccgctactaccgggcccctgagatcatcctgggcctgcccttctgtgaggccatcgacatgtggagcctgggctgtgtgattgctgagctgttcctgggctggcccctgtacccaggggcctctgaatatgaccagatccgctacatcagccagacccagggcctgcctgctgagtacctgctgtctgctggcaccaagaccacccgcttcttcaacagagaccccaacctgggctaccccctgtggaggctgaagaccccagaggagcacgagctggagaccggcatcaagagcaaggaggccaggaagtacatcttcaactgcctggatgacatggcccaggtgaacatgagcacagacctggagggcacagacatgctggccgagaaggctgaccggcgggagtacatcgacctgctgaagaagatgctgaccattgatgctgacaagaggatcacccccctgaagaccctgaaccaccagtttgtgaccatgacccacctgctggacttcccccacagcaaccacgtgaagagctgcttccagaacatggagatctgcaagagaagagtgcacatgtatgacacagtgtcccagatcaagagccccttcaccacccacgtggcccccaacaccagcaccaacctgaccatgtccttcagcaaccagctgaacacagtgcacaaccaggcctctgtgctggccagcagcagcacagctgctgctgccaccctgagcctggccaacagtgatgtgtccctgctgaactaccagagcgccctgtaccccagcagcgctgcccctgtgcctggggtggcccagcagggcgtgtccctgcagcccggcaccacccagatctgcacccagacagaccccttccagcagaccttcatcgtgtgccccccagccttccagacaggcctgcaggccaccaccaagcacagcggcttccctgtgaggatggacaatgctgtgcccatcgtgccccaggccccagctgcccagcccctgcagatccagagcggcgtgctgacccagggcagctgcacccccctgatggtggccaccctgcacccccaggtggccaccatcaccccccagtatgctgtgcccttcaccctgagctgtgccgccggccggcctgccctggtggagcagacagctgctgtgctgcaggcctggccaggcggcacccagcagatcctgctgcccagcacctggcagcagctgcccggggtggccctgcacaacagcgtgcagcccacagccatgatccctgaggccatgggcagcggccagcagctggccgactggagaaatgcccacagccacggcaaccagtacagcaccatcatgcagcagcccagcctgctgaccaaccacgtgaccctggccacagcccagcccctgaatgtgggcgtggcccacgtggtgcggcagcagcagagcagcagcctgcccagcaagaagaacaagcagagcgcccctgtgagcagcaagagcagcctggatgtgctgcccagccaggtgtacagcctggtgggcagcagccccctgcggaccaccagcagctacaacagcctggtgcctgtgcaggaccagcaccagcccatcatcatcccagacacccccagcccccctgtgtctgtcatcaccatccgcagtgacacagatgaggaggaggacaacaagtacaagcccagcagcagcggcctgaagcccaggagcaatgtcatctcctatgtgacagtgaatgacagcccagacagcgacagcagcctgagcagcccctacagcacagacaccctgagcgccctgcggggcaacagcggctctgtgctggagggccctggccgggtggtggctgatggcaccggcaccaggaccatcatcgtgccccccctgaagacccagctgggggactgcaccgtggccacccaggccagcggcctgctgagcaacaagaccaagcctgtggcctctgtgtctggccagagcagcggctgctgcatcacccccaccggctaccgggcccagaggggcggcaccagcgctgcccagcccctgaacctgagccaggtgtctgccatgggctactgcctgctgtttggcccctgcaccgtggtgaccttctggaggaccctgctgctggccggctgctag

SEQ ID NO: 19773 - DNA, 543 bp, synthetic construct
  source 1..543: mol_type = other DNA; note = Synthetic coding sequence
atgcaggccgagggccagggcaccggcggcagcactggagatgctgatggccctgggggccctggcatcccagatggccctggaggaaatgccggcggccctggagaggccggggccaccggcggccggggccccaggggggccggggccgcccgggccagcggcccccggggcggggccccccggggcccccatggaggagctgccagcgcccaggacggccgctgcccctgtggggcccggcggccagacagccggctgctgcagctgcacatcaccatgcccttcagcagccccatggaggccgagctggtgcggcgcatcctgagcagagatgctgcccccctgcccaggcctggagctgtgctgaaggacttcaccgtgtctggcaacctgctcttcatccggctgacagctgctgaccaccggcagctgcagctgagcatcagcagctgcctgcagcagctgagcctgctgatgtggatcacccagtgcttcctgcccgtcttcctggcccaggcccccagcggccagaggaggtag

SEQ ID NO: 19774 - DNA, 717 bp, synthetic construct
  source 1..717: mol_type = other DNA; note = Synthetic coding sequence
atgtctgaggacctggccaagcagctggccagctacaaggcccagctgcagcaggtggaggccgccctgtctggaaatggagaaaatgaagacctgctgaagctgaagaaggacctgcaggaggtgattgagctgaccaaggacctgctgagcacccagcccagcgagaccctggccagcagtgacagctttgccagcacccagcccacccacagctggaaggtgggggacaagtgcatggctgtgtggagcgaagatggccagtgctatgaggccgagattgaggagattgatgaggagaatggaacagctgccatcacctttgctggctatggaaatgctgaggtgacccccctgctgaacctgaagcctgtggaggagggcaggaaggccaaggaggacagcggcaacaagcccatgagcaagaaggagatgattgcccagcagcgggagtacaagaagaagaaggccctgaagaaggcccagaggatcaaggagctggagcaggagcgggaggaccagaaggtgaagtggcagcagttcaacaacagagcctacagcaagaacaagaagggccaggtgaagaggagcatctttgccagccctgagagcgtgacaggcaaggtgggcgtgggcacctgtggcattgctgacaagcccatgacccagtaccaggacaccagcaagtacaacgtgcgccacctgatgccccagtag

SEQ ID NO: 19775 - DNA, 717 bp, synthetic construct; identical to SEQ ID NO: 19774
  source 1..717: mol_type = other DNA; note = Synthetic coding sequence

SEQ ID NO: 19776 - DNA, 2229 bp, synthetic construct
  source 1..2229: mol_type = other DNA; note = Synthetic coding sequence
gacctgagcagcggcggcggcatcgagccccagtgcagcagcgaggtgtacttccgggcccgggagcggggctgtgaaaatgtggcctggagcctgggcctgcggagccactgcttcctggaggccgagctgcaccccctgccctggttcctgcccaccaacgtgtgcagccccctgcccggggccgcccacaagctggtgtgctacttcaccaactgggcccacagccggcccggccctgccagcatcctgccccatgacctggaccccttcctgtgcacccacctgatctttgcctttgcctccatgaacaacaaccagatcgtggccaaggacctgcaggatgagaagatcctgtacccagagttcaacaagctgaaggagaggatgtggcagcagctgcccaccggggtgaagaacccagcccaccagcccagcctgagccaccacaggaaccgggagctgaagaccctgctgagcattggaggctggaactttggcaccagccgcttcaccaccatgctgagcacctttgccaaccgggagaagttcatcgccagcgtcatcagcctgctgcggacccatgactttgatggcctggacctcttcttcctgtacccaggcctgcggggcagccccatgcatgaccgctggaccttcctgttcctgattgaggagctgctgtttgccttcaggaaggaggccctgctgaccatgaggccccggctgctgctgtctgctgctgtgtctggagtgccccacatcgtgcagaccagctatgatgtgcgcttcctgggccgcctgctggacttcatcaacgtgctgtcctatgacctgcacggctcctgggagcgcttcaccggccacaacagccccctcttcagcctgcctgaggaccccaagagcagcgcctatgccatgaactactggaggaagctgggcgcccccagcgagaagctgatcatgggcatccccacctacggccgcaccttccggctgctgaaggccagcaagaatggcctgcaggcccgggccatcggccctgccagccctgggaagtacaccaagcaggagggcttcctggcctactttgagatctgcagctttgtgtggggcgccaagaagcactggattgactaccagtatgtgccctatgccaacaagggcaaggagtgggtgggctatgacaatgccatctccttctcctacaaggcctggttcatcagaagagagcactttggaggagccatggtgtggaccctggacatggatgatgtgcggggcaccttctgtggcaccggccccttccccctggtgtatgtgctgaatgacatcctggtgcgggcagagttcagcagcaccagcctgccccagttctggctgagcagcgctgtgaacagcagcagcacagatcctgagcggctggccgtgaccacagcctggaccacagacagcaagatcctgcccccaggaggagaggccggcgtgacagagatccacggcaaatgtgagaacatgaccatcaccccccggggcaccaccgtgacccccaccaaggagaccgtgtccctgggcaagcacacagtggccctgggggagaagacagagatcaccggggccatgaccatgacctctgtgggccaccagagcatgaccccaggagagaaggccctgacccctgtgggccaccagagcgtgaccaccggccagaagaccctgacctctgtgggctaccagagcgtgaccccaggagagaagaccctgacccctgtgggccaccagagcgtgacccctgtgagccaccagagcgtgtcccctgggggcaccaccatgacccctgtgcacttccagacagagaccctgcggcagaacacagtggcccccaggaggaaggctgtggcccgggagaaggtgacagtgcccagcaggaacatctctgtgaccccagagggccagaccatgcccctgcggggggagaacctgaccagcgaggtgggcacccaccccaggatgggcaacctgggcctgcagatggaggctgaaaataggatgatgctgagcagcagccctgtgatccagctgcctgagcagacccccctggcctttgacaacagatttgtgcccatctacggcaaccacagctctgtgaacagcgtgaccccccagaccagccccctgagcctgaagaaggagatccctgagaacagcgctgtggatgaggaggcctag

SEQ ID NO: 19777 - DNA, 2037 bp, synthetic construct
  source 1..2037: mol_type = other DNA; note = Synthetic coding sequence
atgtggaagctgctgctgtgggtgggcctggtgctggtgctgaagcaccatgatggagctgcccacaagctggtgtgctacttcaccaactgggcccacagccggcccggccctgccagcatcctgccccatgacctggaccccttcctgtgcacccacctgatctttgcctttgcctccatgaacaacaaccagatcgtggccaaggacctgcaggatgagaagatcctgtacccagagttcaacaagctgaaggagaggaaccgggagctgaagaccctgctgagcattggaggctggaactttggcaccagccgcttcaccaccatgctgagcacctttgccaaccgggagaagttcatcgccagcgtcatcagcctgctgcggacccatgactttgatggcctggacctcttcttcctgtacccaggcctgcggggcagccccatgcatgaccgctggaccttcctgttcctgattgaggagctgctgtttgccttcaggaaggaggccctgctgaccatgaggccccggctgctgctgtctgctgctgtgtctggagtgccccacatcgtgcagaccagctatgatgtgcgcttcctgggccgcctgctggacttcatcaacgtgctgtcctatgacctgcacggctcctgggagcgcttcaccggccacaacagccccctcttcagcctgcctgaggaccccaagagcagcgcctatgccatgaactactggaggaagctgggcgcccccagcgagaagctgatcatgggcatccccacctacggccgcaccttccggctgctgaaggccagcaagaatggcctgcaggcccgggccatcggccctgccagccctgggaagtacaccaagcaggagggcttcctggcctactttgagatctgcagctttgtgtggggcgccaagaagcactggattgactaccagtatgtgccctatgccaacaagggcaaggagtgggtgggctatgacaatgccatctccttctcctacaaggcctggttcatcagaagagagcactttggaggagccatggtgtggaccctggacatggatgatgtgcggggcaccttctgtggcaccggccccttccccctggtgtatgtgctgaatgacatcctggtgcgggcagagttcagcagcaccagcctgccccagttctggctgagcagcgctgtgaacagcagcagcacagatcctgagcggctggccgtgaccacagcctggaccacagacagcaagatcctgcccccaggaggagaggccggcgtgacagagatccacggcaaatgtgagaacatgaccatcaccccccggggcaccaccgtgacccccaccaaggagaccgtgtccctgggcaagcacacagtggccctgggggagaagacagagatcaccggggccatgaccatgacctctgtgggccaccagagcatgaccccaggagagaaggccctgacccctgtgggccaccagagcgtgaccaccggccagaagaccctgacctctgtgggctaccagagcgtgaccccaggagagaagaccctgacccctgtgggccaccagagcgtgacccctgtgagccaccagagcgtgtcccctgggggcaccaccatgacccctgtgcacttccagacagagaccctgcggcagaacacagtggcccccaggaggaaggctgtggcccgggagaaggtgacagtgcccagcaggaacatctctgtgaccccagagggccagaccatgcccctgcggggggagaacctgaccagcgaggtgggcacccaccccaggatgggcaacctgggcctgcagatggaggctgaaaataggatgatgctgagcagcagccctgtgatccagctgcctgagcagacccccctggcctttgacaacagatttgtgcccatctacggcaaccacagctctgtgaacagcgtgaccccccagaccagccccctgagcctgaagaaggagatccctgagaacagcgctgtggatgaggaggcctag

SEQ ID NO: 19778 - DNA, 1005 bp, synthetic construct
  source 1..1005: mol_type = other DNA; note = Synthetic coding sequence
atgggcggcgctgtgtctgctggagaagataatgatgagctgattgacaacctgaaggaggcccagtacatcagaacagagctggtggagcaggccttccgggccatcgacagagctgactactacctggaggagttcaaggaaaatgcctacaaggacctggcctggaagcacggcaacatccacctgagcgccccctgcatctacagcgaggtgatggaggccctggacctgcagcccggcctgtccttcctgaacctgggcagcggcaccggctacctgagctccatggtgggcctcatcctgggcccctttggagtgaaccacggcgtggagctgcacagtgatgtgattgaatatgccaagcagaagctggacttcttcatccgcaccagtgacagctttgacaagtttgacttctgtgagcccagctttgtgactggaaactgcctggagatcagcccagactgcagccagtatgacagagtgtactgtggggccggcgtgcagaaggagcacgaggagtacatgaagaacctgctgaaggtgggcggcatcctggtgatgcccctggaggagaagccctgccacagcgagagcggcaagagccggctggtgcagctgccccctgtggccgtgcgcagcctgcaggacctggcccgcatcgccatccggggcaccatcaagaagatcatccaccaggagaccgtgtccaagaatggaaatggcctgaagaacaccccccgcttcaagagaagaagagtgagaagaagaaggatggagaccatcgtgttcctggacaaggaggtgtttgccagccgcatcagcaaccccagtgatgacaacagctgtgaggacctggaggaggagcggcgggaggaggaggagaagaccccacctgagaccaagccagacccccctgtgaacttcctgcggcagaaggtgctgagcctgcccctgcctgaccccctgaagtactacctgctgtactaccgggagaagtag

SEQ ID NO: 19779 - DNA, 1785 bp, synthetic construct
  source 1..1785: mol_type = other DNA; note = Synthetic coding sequence
atgagccggcccagcagccgggccatctacctgcacaggaaggagtacagccagaacctgaccagcgagcccaccctgctgcagcaccgggtggagcacctgatgacctgcaagcagggcagccagagggtgcagggcccagaagatgccctgcagaagctgtttgagatggatgcccagggccgggtgtggagccaggacctgatcctgcaggtgagagatggctggctgcagctgctggacatcgagaccaaggaggagctggacagctaccgcctggacagcatccaggccatgaatgtggccctgaacacctgcagctacaacagcatcctgagcatcaccgtgcaggagcccggcctgcccggcaccagcaccctgctcttccagtgccaggaggtgggcgctgagcggctgaagaccagcctgcagaaggccctggaggaggagctggagcagagccggccccggctgggcggcctgcagcccggccaggaccgctggaggggccctgccatggagcggcccctgcccatggagcaggcccgctacctggagcccggcatccccccagagcagccccaccagaggaccctggagcacagcctgccccccagcccccggcccctgcccaggcacaccagcgcccgggagcccagcgccttcaccctgcccccaccccggcgcagcagcagccctgaggaccctgagagagatgaggaggtgctgaaccacgtgctgcgggacatcgagctgttcatgggcaagctggagaaggcccaggccaagaccagcaggaagaagaagtttgggaagaagaacaaggaccagggcggcctgacccaggcccagtacatcgactgcttccagaagatcaagcacagcttcaacctgctgggccgcctggccacctggctgaaggagaccagcgcccctgagctggtgcacatcctcttcaagagcctgaacttcatcctggcccgctgcccagaggccggcctggccgcccaggtgatcagccccctgctgacccccaaggccatcaacctgctgcagagctgcctgagccccccagagagcaacctgtggatgggcctgggccctgcctggaccaccagcagagctgactggacaggagatgagcccctgccctaccagcccaccttcagtgatgactggcagctgcctgagcccagcagccaggcccccctgggctaccaggaccctgtgtccctgcggcggggcagccaccggctgggcagcaccagccacttcccccaggagaagacccacaaccacgacccccagcccggggaccccaacagccggcccagcagccccaagccagcccagcctgccctgaagatgcaggtgctgtatgaatttgaggccaggaacccccgggagctgactgtggtgcagggcgagaagctggaggtgctggaccacagcaagcgctggtggctggtgaagaatgaggccggccgcagcggctacatccccagcaacatcctggagcccctgcagcccggcaccccaggcacccagggccagagccccagccgggtgcccatgctgcggctgagcagcaggcctgaggaggtgacagactggctgcaggccgagaacttcagcacagccaccgtgaggaccctgggcagcctgaccggcagccagctgctgcgcatccggcctggagagctgcagatgctgtgcccccaggaggccccccgcatcctgagccggctggaggccgtgcggaggatgctgggcatcagcccctag

SEQ ID NO: 19780 - DNA, 1500 bp, synthetic construct
  source 1..1500: mol_type = other DNA; note = Synthetic coding sequence
atgagctttggaagtgagcactacctgtgcagcagcagcagctacaggaaggtgtttggagatggcagccggctgagcgcccggctgagcggggccggcggggccggcggcttccgcagccagagcctgagccgcagcaatgtggccagcagcgctgcctgcagcagcgccagcagcctgggcctgggcctggcctacagaagacctccagccagtgatggcctggacctgagccaggccgccgcccggaccaatgagtacaagatcatccgcaccaatgagaaggagcagctgcagggcctgaatgacagatttgctgtgttcatcgagaaggtgcaccagctggagacccagaacagagccctggaggccgagctggccgccctgcggcagagacatgctgagcccagccgggtgggggagctgttccagcgggagctgcgggacctgcgggcccagctggaggaggccagcagcgcccggagccaggccctgctggagagagatggcctggccgaggaggtgcagaggctgcgggcccgctgtgaggaggagagccggggccgggagggcgctgagcgggccctgaaggcccagcagagagatgtggatggagccaccctggcccggctggacctggagaagaaggtggagagcctgctggatgagctggcctttgtgcggcaggtgcatgatgaggaggtggccgagctgctggccaccctgcaggccagcagccaggccgctgctgaggtggatgtgacagtggccaagccagacctgaccagcgccctgcgggagatccgggcccagtatgagagcctggccgccaagaacctgcagagcgctgaggagtggtacaagagcaagtttgccaacctgaatgagcaggccgcccggagcacagaggccatccgggccagccgggaggagatccacgagtaccgccggcagctgcaggcccggaccatcgagattgagggcctgcggggggccaatgaaagcctggagcggcagatcctggagctggaggagcggcacagcgctgaggtggccggctaccaggacagcatcggccagctggagaatgacctgaggaacaccaagtctgagatggcccggcacctgcgggagtaccaggacctgctgaatgtgaagatggccctggacattgaaattgctgcctacaggaagctgctggagggggaggagacccgcttcagcaccagcggcctgagcatcagcggcctgaaccccctgcccaaccccagctacctgctgcccccacgcatcctgagcgccaccaccagcaaggtgagcagcacaggcctgagcctgaagaaggaggaggaggaggaggaggccagcaaggtggccagcaagaagaccagccagatcggggagagctttgaggagatcctggaggagaccgtcatcagcaccaagaagacagagaagagcaacatcgaggagaccaccatcagcagccagaagatctag

SEQ ID NO: 19781 - DNA, 1131 bp, synthetic construct
  source 1..1131: mol_type = other DNA; note = Synthetic coding sequence
atggagagctatgatgtgattgccaaccagcctgtggtgattgacaatggcagcggggtcatcaaggccggctttgctggggaccagatccccaagtactgcttccccaactacgtgggccggcccaagcacgtgcgggtgatggccggggccctggagggggacatcttcatcggccccaaggccgaggagcaccggggcctgctgagcatccgctaccccatggagcacggcatcgtgaaggactggaatgacatggagcgcatctggcagtatgtgtacagcaaggaccagctgcagaccttcagcgaggagcaccctgtgctgctgacagaggcccccctgaaccccaggaagaaccgggagagagctgctgaggtgttctttgagaccttcaacgtgcctgccctcttcatctccatgcaggccgtgctgagcctgtatgccaccggccgcaccaccggggtggtgctggacagcggagatggagtgacccatgctgtgcccatctatgagggctttgccatgccccacagcatcatgagaattgatattgctggaagagatgtgagccgcttcctgcggctgtacctgaggaaggagggctatgacttccacagcagcagcgagtttgaaattgtgaaggccatcaaggagcgggcctgctacctgagcatcaacccccagaaggatgagaccctggagacagagaaggcccagtactacctgcctgatggcagcaccattgaaattggccccagccgcttccgggcccctgagctgctcttccggccagacctgattggagaggagagcgagggcatccacgaggtgctggtgtttgccatccagaagagtgacatggacctgcggaggaccctcttcagcaacatcgtgctgagcggcggcagcaccctcttcaagggctttggagaccggctgctgtctgaggtgaagaagctggcccccaaggatgtgaagatccgcatcagcgccccccaggagcggctgtacagcacctggattggaggcagcatcctggccagcctggacaccttcaagaagatgtgggtgtccaagaaggagtatgaagaagatggagcccggagcatccacaggaagaccttctag

SEQ ID NO: 19782 - DNA, 783 bp, synthetic construct
  source 1..783: mol_type = other DNA; note = Synthetic coding sequence
atgagcctgcagaagaccccacccaccagggtgtttgtggagctggtgccctgggccgacaggagccgggagaacaacctggccagcggccgggagaccctgcccggcctgcggcaccccctgagcagcacccaggcccagacagccacccgggaggtgcaggtgtctggcaccagcgaggtgtctgctggccctgaccgggcccaggtggtggtgcgggtgagcagcaccaaggaggccgctgctgaggccaagaagtctgtgtgccggcggctggactacatcacccagagcctgcagcagcagggcgtgcaggccgagaacatcaccgtgaccaaggacttccggcgggtggagaatgcctaccacatggaggccgaggtgtgcatcaccttcacagaatttgggaagatgcagaacatctgcaacttcctggtggagaagctggacagctctgtggtgatcagccccccccagttctaccacaccccaggctctgtggagaacctgcggcggcaggcctgcctggtggccgtggagaatgcctggaggaaggcccaggaggtgtgcaacctggtgggccagaccctgggcaagcccctgctgatcaaggaggaggagaccaaggagtgggagggccagattgatgaccaccagagcagccggctgagcagcagcctgactgtgcagcagaagatcaagagcgccaccatccacgccgccagcaaggtgttcatcacctttgaggtgaagggcaaggagaagaggaagaagcacctgtag

SEQ ID NO: 19783 - DNA, 891 bp, synthetic construct
  source 1..891: mol_type = other DNA; note = Synthetic coding sequence
atggagcccagcggcggggagcaggagcccggggctgtgcgcttcctggacctgccctgggaggatgtgctgctgccccacgtgctgaacagagtgcccctgcggcagctgctgcggctgcagagggtgtcccgggccttccgcagcctggtgcagctgcacctggccggcctgcggagatttgatgctgcccaggtgggcccccagatccccagggctgccctggcccggctgctgagagatgctgagggcctgcaggagctggccctggccccctgccacgagtggctgagtgatgaggacctggtgcctgtgctggccaggaacccccagctgcggtctgtggccctgggcggctgcggccagctgagcagaagagccctgggcgccctggccgagggctgcccccggctgcagaggctgagcctggcccactgtgactgggtggatggcctggccctgcggggcctggccgaccgctgcccagccctggaggagctggacctgacagcctgccggcagctgaaggatgaggccatcgtgtacctggcccagaggagaggagctggcctgcggagcctgagcctggccgtgaatgccaacgtgggagatgctgctgtgcaggagctggccaggaactgcccagagctgcaccacctggacctgaccggctgcctgcgggtgggcagtgatggagtgaggaccctggccgagtactgccctgtgctgcggagcctgcgggtgcgccactgccaccacgtggccgagagcagcctgagccggctgaggaagaggggcgtggacattgatgtggagccccccctgcaccaggccctggtgctgctgcaggacatggccggctttgccccctttgtgaacctgcaggtgtag

SEQ ID NO: 19784 - DNA, 2100 bp, synthetic construct
  source 1..2100: mol_type = other DNA; note = Synthetic coding sequence
atggctgatgctggcatcagaagagtggtgcccagcgacctgtaccccctggtgctgggcttcctgcgggacaaccagctgtctgaggtggccaacaagtttgccaaggccaccggggccacccagcaggatgccaatgccagcagcctgctggacatctacagcttctggctgaagagcgccaaggtgcctgagaggaagctgcaggccaatggacctgtggccaagaaggccaagaagaaggccagcagcagtgacagcgaggacagcagcgaggaggaggaggaggtgcagggccccccagccaagaaggctgctgtgcctgccaagagggtgggcctgcccccaggcaaggccgccgccaaggccagcgagagcagcagcagcgaggagagcagtgatgatgatgatgaggaggaccagaagaagcagcctgtgcagaagggcgtgaagccccaggccaaggccgccaaggccccacccaagaaggccaagagcagtgacagcgacagcgacagcagcagtgaagatgagccccccaagaaccagaagcccaagatcacccctgtgacagtgaaggcccagaccaaggccccacccaagccagcccgggccgcccccaagatcgccaacgggaaggccgccagcagcagcagcagcagcagcagcagcagcagcagtgatgacagcgaggaggagaaggccgccgccacccccaagaagacagtgcccaagaagcaggtggtggccaaggcccctgtgaaggccgccaccacccccaccaggaagagcagcagcagcgaggacagcagcagtgatgaggaggaggagcagaagaagcccatgaagaacaagccaggcccctacagctctgtgcccccacccagcgcccccccacccaagaagagcctgggcacccagccccccaagaaggctgtggagaagcagcagcctgtggagagcagcgaggacagcagtgatgaaagtgacagcagcagcgaggaggagaagaagccacccaccaaggctgtggtgtccaaggccaccaccaagcccccaccagccaagaaggctgctgagagcagcagtgacagcagtgacagcgacagcagtgaagatgatgaggcccccagcaagccagctggcaccaccaagaacagcagcaacaagccagctgtgaccaccaagagccctgctgtgaagccagctgctgcccccaagcagcctgtgggcggcggccagaagctgctgaccaggaaggctgacagcagcagcagcgaggaggagagcagcagcagcgaggaggagaagaccaagaagatggtggccaccaccaagcccaaggccacagccaaggccgccctgagcctgcctgccaagcaggccccccagggcagccgggacagcagcagtgacagcgacagcagcagcagcgaggaggaggaggagaagaccagcaagtctgctgtgaagaagaagccccagaaggtggccggcggggccgcccccagcaagccagccagcgccaagaagggcaaggccgagagcagcaacagcagcagcagtgatgacagcagcgaggaggaggaggagaagctgaagggcaagggcagcccccggccccaggcccccaaggccaacggcaccagcgccctgacagcccagaatggcaaggccgccaagaacagcgaggaggaggaggaggagaagaagaaggctgctgtggtggtgtccaagagcggcagcctgaagaagaggaagcagaatgaagctgccaaggaggccgagaccccccaggccaagaagatcaagctgcagacccccaacaccttccccaagaggaagaagggggagaagagggccagcagccccttccggcgggtgcgggaggaggagattgaggtggacagccgggtggccgacaacagctttgatgccaagagaggagctgctggggactggggcgagcgggccaaccaggtgctgaagttcaccaagggcaagagcttcagacatgagaagaccaagaagaagaggggcagctaccggggcggcagcatctctgtgcaggtgaacagcatcaagtttgacagcgagtag

SEQ ID NO: 19785 - DNA, 1275 bp, synthetic construct
  source 1..1275: mol_type = other DNA; note = Synthetic coding sequence
atggaggagaacaacctgcagtgcagctctgtggtggatggcaactttgaggaggtgccccgggagacagccatccagttcaagccacccctgtaccggcagcgctaccagtttgtgaagaacctggtggaccagcacgagcccaagaaggtggccgacctgggctgtggggacaccagcctgctgcggctgctgaaggtgaacccctgcatcgagctgctggtgggcgtggacatcaatgaagacaagctgcgctggaggggggacagcctggcccccttcctgggggacttcctgaagccccgggacctgaacctgaccatcaccctgtaccacggctctgtggtggagcgggacagccggctgctgggctttgacctgatcacctgcatcgagctgattgagcacctggacagcggggacctggcccgcttccctgaggtggtgtttggctacctgagccccagcatgatcgtcatcagcacccccaacagcgagttcaaccccctcttccccagcgtgaccctgcgggacagcgaccacaagtttgagtggaccaggatggagttccagacctgggccctgtatgtggccaacagatatgactacagcgtggagttcaccggggtgggggagcccccagctggagcagaaaatgtgggctactgcacccagatcggcatcttcaggaagaatggaggcaaggccacagagagctgcctgtctgagcagcacgaccagcacgtgtacaaggcccggcagggcctgaccatgctgccccggctggtgctgaacttccacccccaggccatcctgctgccccacctgcccaagatgctgcggctgcaggtgttcaccaccagctaccccagcctgcagcaggagcgcttcttcaagctggtgctggtgaatgaggtgtcccagcaggtggagagcctgcgggtgagccacctgcccaggaggaaggagcaggccggggagcggggggacaagcccaaggacattggaggcagcaaggcccctgtgccctgctttggacctgtgttcacagaggtggagaaggccaagattgagaacagccccacccccttctgtgtgggggacaagttctttgtgcccctgcagaggctgctggcctaccccaagctgaaccggctgtgtgccaatgaggagatgatgaggtctgtgattgctgacagcatccccctgagcagtgatggcagcgctgtggtggccgacctgaggaactactttgatgagcagtttgagttctag

SEQ ID NO: 19786 - DNA, 1182 bp, synthetic construct
  source 1..1182: mol_type = other DNA; note = Synthetic coding sequence
atggaggagaacaacctgcagtgcagctctgtggtggatggcaactttgaggaggtgccccgggagacagccatccagttcaagccacccctgtaccggcagcgctaccagtttgtgaagaacctggtggaccagcacgagcccaagaaggtggccgacctgggctgtggggacaccagcctgctgcggctgctgaaggtgaacccctgcatcgagctgctggtgggcgtggacatcaatgaagacaagctgcgctggaggggggacagcctggcccccttcctgggggacttcctgaagccccgggacctgaacctgaccatcaccctgtaccacggctctgtggtggagcgggacagccggctgctgggctttgacctgatcacctgcatcgagctgattgagcacctggacagcggggacctggcccgcttccctgaggtggtgtttggctacctgagccccagcatgatcgtcatcagcacccccaacagcgagttcaaccccctcttccccagcgtgaccctgcgggacagcgaccacaagtttgagtggaccaggatggagttccagacctgggccctgtatgtggccaacagatatgactacagcgtggagttcaccggggtgggggagcccccagctggagcagaaaatgtgggctactgcacccagatcggcatcttcaggaagaatggaggcaaggccacagagagctgcctgtctgagcagcacgaccagcacgtgtacaaggctgtgttcaccaccagctaccccagcctgcagcaggagcgcttcttcaagctggtgctggtgaatgaggtgtcccagcaggtggagagcctgcgggtgagccacctgcccaggaggaaggagcaggccggggagcggggggacaagcccaaggacatcggcggcagcaaggcccctgtgccctgcttcggccctgtgttcacagaggtggagaaggccaagattgagaacagccccacccccttctgtgtgggggacaagttctttgtgcccctgcagaggctgctggcctaccccaagctgaaccggctgtgtgccaatgaggagatgatgaggtctgtgattgctgacagcatccccctgagcagtgatggcagcgctgtggtggccgacctgaggaactactttgatgagcagtttgagttctag

SEQ ID NO: 19787 - DNA, 1701 bp, synthetic construct
  source 1..1701: mol_type = other DNA; note = Synthetic coding sequence
atgtctgccagcactggaggcggcggggacagcggcggcagcggcggcagcagcagcagcagccaggccagctgtggccctgagagcagcggcagcgagctggccctggccacccctgtgccccagatgctgcagggcctgctgggcagtgatgatgaggagcaggaggaccccaaggactactgcaagggcggctaccaccctgtgaagattggagatgtgttcaacggccgctaccacgtggtgaggaagctgggctggggccacttcagcacagtgtggctgtgctgggacatccagaggaagagatttgtggccctgaaggtggtgaagtctgctggccactacacagaaacagctgtggatgagatcaagctgctgaagtgtgtgcgggacagcgaccccagcgaccccaagcgggagaccatcgtgcagctgattgatgacttccgcatctctggagtgaatggagtgcacgtgtgcatggtgctggaggtgctgggccaccagctgctgaagtggatcatcaagagcaactaccagggcctgcctgtgccctgtgtgaagagcatcgtgcggcaggtgctgcacggcctggactacctgcacaccaagtgcaagatcatccacacagacatcaagccagagaacatcctgctgtgtgtgggagatgcctacatccggcggctggccgctgaggccacagagtggcagcaggccggggcccccccacccagccgcagcatcgtgtccacagccccccaggaggtgctgaccgggaagctgagcaagaacaagaggaagaagatgaggaggaagaggaagcagcagaagaggctgctggaggagcggctgcgggacctgcagaggctggaggccatggaggccgccacccaggctgaagattctggcctgcggctggatggcggcagcggcagcaccagcagcagcggctgccaccctggaggagcccgggccggccccagccctgccagcagcagccctgcccctgggggcggccgcagcctgtctgctggcagccagaccagcggcttcagcggcagcctcttctccccagccagctgcagcatcctgagcggcagcagcaaccagcgggagaccggcggcctgctgagccccagcaccccatttggagccagcaacctgctggtgaaccccctggagccccagaatgctgacaagatcaagatcaagattgctgacctgggcaatgcctgctgggtgcacaagcacttcacagaggacatccagacccggcagtacagagctgtggaggtgctgattggagcagaatatggccccccagctgacatctggagcacagcctgcatggcctttgagctggccactggagactacctgtttgagccccacagcggggaggactacagcagagatgaggaccacatcgcccacatcgtggagctgctgggggacatccccccagcctttgccctgagcggccgctacagccgggagttcttcaacagaagaggagagctgcggcacatccacaacctgaagcactggggcctgtatgaggtgctgatggagaagtatgagtggcccctggagcaggccacccagttcagcgccttcctgctgcccatgatggagtacatccctgagaagagggccagcgctgctgactgcctgcagcacccctggctgaacccctag

SEQ ID NO: 19788 - DNA, 150 bp, synthetic construct
  source 1..150: mol_type = other DNA; note = Synthetic coding sequence
atggccggcccccgggtggaggtggatggcagcatcatggagggcggcggccagatcctgcgggtgtccacagccctgagctgcctgctgggcctgcccctgcgggtgcagaagatccgggccggccgcagcaccccaggcctgaggtag

SEQ ID NO: 19789 - DNA, 1101 bp, synthetic construct
  source 1..1101: mol_type = other DNA; note = Synthetic coding sequence
atggccggcccccgggtggaggtggatggcagcatcatggagggcggcggccagatcctgcgggtgtccacagccctgagctgcctgctgggcctgcccctgcgggtgcagaagatccgggccggccgcagcaccccaggcctgcggccccagcacctgagcggcctggagatgatccgggacctgtgtgatggccagctggagggcgctgagatcggcagcacagagatcaccttcaccccagagaagatcaagggcggcatccacacagctgacaccaagacagctggctctgtgtgcctgctgatgcaggtgtccatgccctgtgtgctgtttgctgccagccccagcgagctgcacctgaagggcggcaccaatgctgagatggccccccagattgactacacagtgatggtgttcaagcccatcgtggagaagtttggcttcatcttcaactgtgacatcaagacccggggctactaccccaagggcggcggggaggtgattgtgaggatgagccctgtgaagcagctgaaccccatcaacctgacagagcggggctgtgtgaccaagatctacggccgggcctttgtggccggcgtgctgcccttcaaggtggccaaggacatggctgctgctgctgtgcgctgcatcaggaaggagatccgggacctgtatgtgaacatccagcctgtgcaggagcccaaggaccaggcctttggaaatggaaatggcatcatcatcatcgccgagaccagcacaggctgcctgtttgctggcagcagcctgggcaagaggggcgtgaatgctgacaaggtgggcattgaagctgctgagatgctgctggccaacctgcggcatggaggcaccgtggatgagtacctgcaggaccagctgattgtgttcatggccctggccaatggagtgagccgcatcaagacaggccctgtgaccctgcacacccagacagccatccactttgctgagcagatcgccaaggccaagttcatcgtgaagaagtcagaagatgaagaagatgctgccaaggacacctacatcatcgagtgccagggcatcggcatgaccaaccccaacctgtag

SEQ ID NO: 19790 - DNA, 1155 bp, synthetic construct; identical to SEQ ID NO: 19296
  source 1..1155: mol_type = other DNA; note = Synthetic coding sequence

SEQ ID NO: 19791 - DNA, 804 bp, synthetic construct
  source 1..804: mol_type = other DNA; note = Synthetic coding sequence
atggccgagcctgtgcaggaggagctgtctgtgctggccgccatcttctgccggccccatgagtgggaggtgctgagccgctcagaaacagatggcaccgtcttccgcatccacaccaaggccgagggcttcatggatgtggacatccccctggagctggtgttccacctgcctgtgaactaccccagctgcctgcccggcatcagcatcaacagcgagcagctgacccgggcccagtgtgtgacagtgaaggagaacctgctggagcaggccgagagcctgctgtctgagcccatggtgcatgagctggtgctgtggatccagcagaacctgcggcacatcctgagccagcctgagaccggcagcggcagcgagaagtgcaccttcagcaccagcaccaccatggatgatggcctgtggatcaccctgctgcacctggaccacatgagggccaagaccaagtatgtgaagatcgtggagaagtgggccagtgacctgcggctgaccggccgcctgatgttcatgggcaagatcatcctgatcctgctgcagggcgacaggaacaacctgaaggagtacctgatcctgcagaagaccagcaaggtggatgtggacagcagcggcaagaagtgcaaggagaagatgatctctgtgctgtttgagaccaaggtgcagacagagcacaagcgcttcctggcctttgaggtgaaggagtacagcgccctggatgagctgcagaaggagtttgaaacagctggcctgaagaagctgttcagcgagtttgtgctggccctggtgaagtag

SEQ ID NO: 19792 - DNA, 2010 bp, synthetic construct
  source 1..2010: mol_type = other DNA; note = Synthetic coding sequence
atggccatcgtgcagaccctgcctgtgcccctggagcccgcccctgaggccgccacagccccccaggcccctgtgatgggctctgtgagcagcctcatcagcggccggccctgccctgggggccctgccccacccaggcaccacggccccccaggccccaccttcttccggcagcaggacggcctgctgcggggcggctatgaggcccaggagcccctgtgcccagctgtgccccccaggaaggctgtgcctgtgaccagcttcacctacatcaatgaagacttcagaacagagagcccccccagccccagcagtgatgtggaggatgcccgggagcagagggcccacaatgcccacctgcggggccccccacccaagctgatccctgtgtctgggaagctggagaagaacatggagaagatcctgatccggcccacagccttcaagcctgtgctgcccaagcccaggggggcccccagcctgcccagcttcatgggcccccgggccaccggcctgagcggcagccagggcagcctgacccagctgtttggaggccctgccagcagcagcagcagcagcagcagcagcagcgctgctgacaagcccctggccttcagcggctgggccagcggctgccccagcggcaccctgagtgacagcggcaggaacagcctgagcagcctgcccacctacagcactggaggagctgagcccaccaccagcagccctgggggccacctgcccagccacggcagcggccgcggggccctgcccggccctgcccggggcgtgcccaccggccccagccacagcgacagcggccgcagcagcagcagcaagagcacaggcagcctgggcggccgggtggccggcggcctgctgggcagcggcacccgggccagcccagacagcagcagctgtggggagaggagccccccacctcctcctcctccacccagtgatgaggccctgctgcactgtgtgctggagggcaagctgcgggaccgggaggccgagctgcagcagctgcgggacagcctggatgaaaatgaggccaccatgtgccaggcctatgaggagcggcagaggcactggcagcgggagcgggaggccctgcgggaggactgtgccgcccaggcccagagggcccagagggcccagcagctgctgcagctgcaggtgttccagctgcagcaggagaagaggcagctgcaggatgactttgcccagctgctgcaggagcgggagcagctggagcggcgctgtgccaccctggagcgggagcagcgggagctgggcccccggctggaggagaccaagtgggaggtgtgccagaagtctggagagatcagcctgctgaagcagcagctgaaggagagccaggccgagctggtgcagaagggcagcgagctggtggccctgcgggtggccctgcgggaggcccgggccaccctgcgggtgtctgagggccgggcccggggcctgcaggaggccgcccgggcccgggagctggagctggaggcctgcagccaggagctgcagaggcaccggcaggaggccgagcagctgcgggagaaggccggccagctggatgctgaggccgccggcctgcgggagccccctgtgcccccagccacagctgaccccttcctgctggccgagagtgatgaggccaaggtgcagagagctgctgctggggtgggcggcagcctgcgggcccaggtggagcggctgcgggtggagctgcagcgggagaggagaagaggagaggagcagagggacagctttgaaggagagcggctggcctggcaggccgagaaggagcaggtgatccgctaccagaagcagctgcagcacaactacatccagatgtacagaagaaaccggcagctggagcaggagctgcagcagctgagcctggagctggaggcccgggagctggccgacctgggcctggccgagcaggccccctgcatctgcctggaggagatcacagccacagagatctag

SEQ ID NO: 19793 - DNA, 2010 bp, synthetic construct; identical to SEQ ID NO: 19792
  source 1..2010: mol_type = other DNA; note = Synthetic coding sequence

SEQ ID NO: 19794 - DNA, 1059 bp, synthetic construct
  source 1..1059: mol_type = other DNA; note = Synthetic coding sequence
atgaagctgaaggagctggagaggcctgctgtgcaggcctggagccctgccagccagtaccccctgtacctggccaccggcaccagcgcccagcagctggacagcagcttcagcaccaacggcaccctggagatctttgaggtggacttccgggaccccagcctggacctgaagcacagaggagtgctgagcgccctgagccgcttccacaagctggtgtggggcagctttggaagtggcctgctggagagcagtggagtcatcgtgggcggcggggacaatggcatgctgatcctgtacaacgtgacccacatcctgagcagcggcaaggagcccgtcatcgcccagaagcagaagcacactggagctgtgcgggccctggacctgaaccccttccagggcaacctgctggccagcggggccagtgacagcgagatcttcatctgggacctgaacaacctgaatgtgcccatgaccctgggcagcaagagccagtaccacgagcagcccccagaggacatcaaggccctgtcctggaaccggcaggcccagcacatcctgagcagcgcccaccccagcggcaaggctgtggtgtgggacctgaggaagaatgagcccatcatcaaggtgtctgaccacagcaacaggatgcactgcagcggcctggcctggcacccagacatcgccacccagctggtgctgtgcagtgaagatgaccggctgcccgtcatccagctgtgggacctgcgctttgccagcagccccctgaaggtgctggagagccacagccggggcatcctgtctgtgtcctggagccaggctgatgctgagctgctgctgaccagcgccaaggacagccagatcctgtgcaggaacctgggcagcagcgaggtggtgtacaagctgcccacccagagctcctggtgctttgatgtgcagtggtgcccccgggaccccagcgtcttctctgctgccagcttcaacggctggatcagcctgtacagcgtgatgggccgctcctgggaggtgcagcacatgaggcaggccgacaaggtgtag

SEQ ID NO: 19795 - DNA, 3540 bp, synthetic construct
  source 1..3540: mol_type = other DNA; note = Synthetic coding sequence
atgaagctgaaggagctggagaggcctgctgtgcaggcctggagccctgccagccagtaccccctgtacctggccaccggcaccagcgcccagcagctggacagcagcttcagcaccaacggcaccctggagatctttgaggtggacttccgggaccccagcctggacctgaagcacagaggagtgctgagcgccctgagccgcttccacaagctggtgtggggcagctttggaagtggcctgctggagagcagtggagtcatcgtgggcggcggggacaatggcatgctgatcctgtacaacgtgacccacatcctgagcagcggcaaggagcccgtcatcgcccagaagcagaagcacactggagctgtgcgggccctggacctgaaccccttccagggcaacctgctggccagcggggccagtgacagcgagatcttcatctgggacctgaacaacctgaatgtgcccatgaccctgggcagcaagagccagcagcccccagaggacatcaaggccctgtcctggaaccggcaggcccagcacatcctgagcagcgcccaccccagcggcaaggctgtggtgtgggacctgaggaagaatgagcccatcatcaaggtgtctgaccacagcaacaggatgcactgcagcggcctggcctggcacccagacatcgccacccagctggtgctgtgcagtgaagatgaccggctgcctgtgatccagctgtgggacctgcgctttgccagcagccccctgaaggtgctggagagccacagccggggcatcctgtctgtgtcctggagccaggctgatgctgagctgctgctgaccagcgccaaggacagccagatcctgtgcaggaacctgggcagcagcgaggtggtgtacaagctgcccacccagagctcctggtgctttgatgtgcagtggtgcccccgggaccccagcgtcttctctgctgccagcttcaacggctggatcagcctgtacagcgtgatgggccgctcctgggaggtgcagcacatgaggcaggccgacaagatcagcagcagcttcagcaagggccagcccctgccccccctgcaggtgcctgagcaggtggcccaggcccccctcatcccccccctgaagaagccacccaagtggatcagaagacccaccggggtgtcctttgccttcggcggcaagctggtgaccttcggcctgcccagcaccccagcccacctggtgccccagccctgcccccggctggtgttcatcagccaggtgaccacagagagcgagttcctgatgaggtctgctgagctgcaggaggccctgggcagcggcaacctgctgaactactgccagaacaagagccagcaggccctgctgcagagcgagaagatgctgtggcagttcctgaaggtgaccctggagcaggacagcaggatgaagttcctgaagctgctgggctacagcaaggatgagctgcagaagaaggtggccacctggctgaagagtgatgtgggcctgggggagagcccccagcccaagggaaatgacctgaacagcgaccggcagcaggccttctgcagccaggccagcaagcacaccaccaaggaggccagcgccagcagcgccttctttgatgagctggtgccccagaacatgaccccctgggagatccccatcaccaaggacattgatggcctgctgagccaggccctgctgctgggggagctgggccctgctgtggagctgtgcctgaaggaggagagatttgctgatgccatcatcctggcccaggccggcggcacagacctgctgaagcagacccaggagcgctacctggccaagaagaagaccaagatcagcagcctgctggcctgtgtggtgcagaagaactggaaggatgtggtgtgcacctgcagcctgaagaactggagggaggccctggccctgctgctgacctacagcggcacagagaagtttcctgagctgtgtgacatgctgggcaccaggatggagcaggagggcagccgggccctgaccagcgaggcccggctgtgctacgtgtgcagcggctctgtggagcggctggtggagtgctgggccaagtgccaccaggccctgagccccatggccctgcaggacctgatggagaaggtgatggtgctgaacagaagcctggagcagctgcggggcccccacggcgtgtccccaggccctgccaccacctacagagtgacccagtatgccaacctgctggccgcccagggcagcctggccacagccatgtccttcctgccccgggactgtgcccagccccctgtgcagcagctgcgggacaggctcttccacgcccagggcagcgctgtgctgggccagcagagcccccccttccccttccccagaattgtggtgggcgccaccctgcacagcaaggagaccagcagctaccgcctgggcagccagcccagccaccaggtgcccacccccagcccccggcccagggtcttcaccccccagagcagccctgccatgcccctggcccccagccaccccagcccctaccagggccccaggacccagaacatcagtgactaccgggcccctggcccccaggccatccagcccctgcccctgagccctggggtgcggcctgccagcagccagccccagctgctgggcggccagagggtgcaggtgcccaaccctgtgggcttccctggcacctggcccctgcccggcagccccctgcccatggcctgccccggcatcatgaggcctggcagcaccagcctgcctgagacccccaggctcttccccctgctgcccctgcggcccctgggccctggccgcatggtgagccacaccccagcccccccagccagcttccctgtgccctacctgcccggggaccccggggccccctgcagctctgtgctgcccaccaccggcatcctgaccccccaccctggcccccaggacagctggaaggaggccccagccccccggggcaacctgcagaggaacaagctgcctgagaccttcatgcccccagcccccatcacagcccctgtgatgagcctgaccccagagctgcagggcatcctgcccagccagccccctgtgtcctctgtgtcccatgcccctcctggggtgcctggagagctgagcctgcagctgcagcacctgcccccagagaagatggagaggaaggagctgcccccagagcaccagagcctgaagagcagctttgaggccctgctgcagcgctgcagcctgagcgccacagacctgaagaccaagaggaagctggaggaggccgcccagaggctggagtacctgtatgagaagctgtgtgagggcaccctgagcccccacgtggtggccggcctgcacgaggtggcccgctgtgtggatgctggcagctttgagcagggcctggccgtgcacgcccaggtggccggctgcagcagcttcagcgaggtgagcagcttcatgcccatcctgaaggctgtgctgatcatcgcccacaagctgctggtgtag

SEQ ID NO: 19796 - DNA, 1635 bp, synthetic construct; identical to SEQ ID NO: 18531
  source 1..1635: mol_type = other DNA; note = Synthetic coding sequence

SEQ ID NO: 19797 - DNA, 1689 bp, synthetic construct; identical to SEQ ID NO: 19406
  source 1..1689: mol_type = other DNA; note = Synthetic coding sequence

SEQ ID NO: 19798 - DNA, 1689 bp, synthetic construct; identical to SEQ ID NO: 19406
  source 1..1689: mol_type = other DNA; note = Synthetic coding sequence

SEQ ID NO: 19799 - DNA, 1272 bp, synthetic construct
  source 1..1272: mol_type = other DNA; note = Synthetic coding sequence
atggaggacaagaggagcctgtccatggcccgctgtgaggagaggaacagccggggccaggaccacggcctggagcgggtgcccttccccccccagctgcagagcgagacctacctgcaccctgctgaccccagccctgcctgggatgatcctggcagcacaggcagccccaacctgcggctgctgacagaggagatcgccttccagcccctggccgaggaggccagcttccggcggccccacccagatggagatgtgcccccccagggcgaggacaacctgctgagcctgcccttcccccagaagctgtggaggctggtgagcagcaaccagttcagcagcatctggtgggatgacagcggggcctgcagggtcatcaaccagaagctgtttgagaaggagatcctgaagagagatgtggcccacaaggtgtttgccaccaccagcatcaagagcttcttccggcagctgaacctgtatggcttcaggaagaggcggcagtgcaccttccgcaccttcacccgcatcttcagcgccaagaggctggtgtccatcctgaacaagctggagttctactgccacccctacttccagagggacagcccccacctgctggtgaggatgaagagaagagtgggcgtgaagagcgcccccaggcaccaggaggaggacaagccagaggccgccggcagctgcctggccccagctgacacagagcagcaggaccacaccagccccaatgaaaatgaccaggtgaccccccagcaccgggagcccgccggccccaacacccagatccgcagcggcagcgcccccccagccacccctgtgatggtgcctgacagcgctgtggccagtgacaacagccctgtgacccagcctgctggggagtggagcgagggcagccaggcccacgtgacccctgtggccgctgtgcccggccctgctgccctgcccttcctgtatgtgcccggcagccccacccagatgaacagctatggccctgtggtggccctgcccacagccagccgcagcaccctggccatggacaccaccggcctgcctgcccctggcatgctgcccttctgccacctgtgggtgcctgtgaccctggtggccgccggggccgcccagcctgctgcctccatggtgatgttcccccacctgcctgccctgcaccaccactgcccccacagccacaggaccagccagtacatgcctgccagtgatggcccccaggcctacccagactatgctgaccagagcacctag

SEQ ID NO: 19800 - DNA, 675 bp, synthetic construct
  source 1..675: mol_type = other DNA; note = Synthetic coding sequence
atgcccaccctcttcaagggcgtgtggggcgtggtggagcacagccgggccctgggccgcttctgcccagcctgcctgcccagcggcccccacctgcacacccagcctgccctgggcacagctgagatgaccctgctgagcagccagagcagcagcctggtggcccccagcggctctgtgtctgcagaaaatcctgagcagaggatgctggagaagagggccaaggtgattgaggagctgctgcagacagagcgggactacatccgggacctggagatgtgcatcgagcgcatcatggtgcccatgcagcaggcccaggtgcccaacatcgactttgagggcctgtttggaaacatgcagatggtgatcaaggtgtccaagcagctgctggccgccctggagatcagtgatgctgtgggccctgtgttcctgggccacagagatgagctggagggcacctacaagatctactgccagaaccatgatgaggccatcgccctgctggagatctatgagaaggatgagaagatccagaagcacctgcaggacagcctggccgacctgaacagcctggtgctgaagaagggctgcaccaactacatcaacctgggcagcttcctgatcaagcctgtgcagagggtgatgagataccccctgctgctgatggagctgtag

SEQ ID NO: 19801 - DNA, 1878 bp, synthetic construct
  source 1..1878: mol_type = other DNA; note = Synthetic coding sequence
atgaggctgcctgagagacatggaggcccccagggcagcctgtgcctgatggacccctgctgccccctgagcctggccctgcaggacctggtggagcgggactgcaatggagacacccccaacctgtccttctacagaaatgagatccgcttcctgcccaacggctgcttcatcgaggacatcctgcagaactggacagacaactatgacctgctggaggacaaccacagctacatccagtggctgttccccctgcgggagcccggggtgaactggcacgccaagcccctgaccctgcgggaggtggaggtgttcaagagcagccaggagatccaggagcggctggtgcgggcctatgagctgatgctgggcttctacggcatccggctggaggaccggggcactggaacagtgggccgggcccagaactaccagaagcgcttccagaacctgaactggaggagccacaacaacctgcgcatcacccgcatcctgaagagcctgggggagctgggcctggagcacttccaggcccccctggtgcgcttcttcctggaggagaccctggtgagaagagagctgcccggggtgcggcagagcgccctggactacttcatgtttgctgtgcgctgccgccaccagaggcggcagctggtgcactttgcctgggagcacttccggccccgctgcaagtttgtgtggggcccccaggacaagctgcggcgcttcaagcccagcagcctgccccaccccctggagggcagcaggaaggtggaggaggagggcagccctggggaccctgaccacgaggccagcacccagggccgcacctgtggccctgagcacagcaagggcggcggccgggtggatgagggcccccagcccaggtctgtggagccccaggatgctggccccctggagaggagccagggagatgaggccggcggccatggagaagatagacctgagcccctgagccccaaggagagcaagaagaggaagctggagctgagcagaagagagcagcccccaacagagcccggcccccagagcgccagcgaggtggagaagatcgccctgaacctggagggctgtgccctgagccagggcagcctgaggacaggcacccaggaggtgggcggccaggaccccggggaggccgtgcagccctgccggcagcccctgggcgcccgggtggccgacaaggtgaggaagaggaggaaggtggatgagggcgctggggacagcgctgctgtggccagcggcggggcccagaccctggccctggccggcagccctgcccccagcggccaccccaaggccggccacagtgaaaatggagtggaggaggacacagagggccgcacaggccccaaggagggcaccccaggcagccccagcgagaccccaggccccagccctgctggccctgctggagatgagcctgctgagagccccagcgagaccccaggccccaggcctgctggccctgctggagatgagcctgctgagagccccagcgagaccccaggccccaggcctgctggccctgctggagatgagcctgctgagagccccagcgagaccccaggccccagccctgctggccccaccagagatgagcctgctgagagccccagcgagaccccaggccccaggcctgctggccctgctggagatgagcctgctgagagccccagcgagaccccaggccccaggcctgctggccctgctggagatgagcctgctgagagccccagcgagaccccaggccccagccctgctggccccaccagagatgagcccgccaaggccggggaggccgctgagctgcaggatgctgaggtggagagcagcgccaagagcggcaagccctag

SEQ ID NO: 19802 - DNA, 1386 bp, synthetic construct
  source 1..1386: mol_type = other DNA; note = Synthetic coding sequence
atggatgatcctgactgtgacagcacctgggaggaggatgaagaagatgctgaagatgctgaagatgaggactgtgaagatggagaggccgccggggccagagatgctgatgctggagatgaagatgaggagagcgaggagccccgggccgcccggcccagcagcttccagagcaggatgacaggcagcaggaactggagggccacccgggacatgtgccgctaccgccacaactacccagacctggtggagcgggactgcaatggagacacccccaacctgtccttctacagaaatgagatccgcttcctgcccaacggctgcttcatcgaggacatcctgcagaactggacagacaactatgacctgctggaggacaaccacagctacatccagtggctgttccccctgcgggagcccggggtgaactggcacgccaagcccctgaccctgcgggaggtggaggtgttcaagagcagccaggagatccaggagcggctggtgcgggcctatgagctgatgctgggcttctacggcatccggctggaggaccggggcactggaacagtgggccgggcccagaactaccagaagcgcttccagaacctgaactggaggagccacaacaacctgcgcatcacccgcatcctgaagagcctgggggagctgggcctggagcacttccaggcccccctggtgcgcttcttcctggaggagaccctggtgagaagagagctgcccggggtgcggcagagcgccctggactacttcatgtttgctgtgcgctgccgccaccagaggcggcagctggtgcactttgcctgggagcacttccggccccgctgcaagtttgtgtggggcccccaggacaagctgcggcgcttcaagcccagcagcctgccccaccccctggagggcagcaggaaggtggaggaggagggcagccctggggaccctgaccacgaggccagcacccagggccgcacctgtggccctgagcacagcaagggcggcggccgggtggatgagggcccccagcccaggtctgtggagccccaggatgctggccccctggagaggagccagggagatgaggccggcggccatggagaagatagacctgagcccctgagccccaaggagagcaagaagaggaagctggagctgagcagaagagagcagcccccaacagagcccggcccccagagcgccagcgaggtggagaagatcgccctgaacctggagggctgtgccctgagccagggcagcctgaggacaggcacccaggaggtgggcggccaggaccccggggagagcagctgcccctgctgccggggctggggcctgcggagctgctgcggcctgcccagcggcagcgccagctag

SEQ ID NO: 19803 - DNA, 1539 bp, synthetic construct
  source 1..1539: mol_type = other DNA; note = Synthetic coding sequence
atgcccagccccagccgcagcggccgcagccgctgcctgaaggcccccaggaggagccgcagcggcctgagcggccccaccagcagctgctgggccagcaccatccggctggaggaccggggcaccggcaccgtgggccgggcccagaactaccagaagcgcttccagaacctgaactggaggagccacaacaacctgcgcatcacccgcatcctgaagagcctgggggagctgggcctggagcacttccaggcccccctggtgcgcttcttcctggaggagaccctggtgcggcgggagctgcccggggtgcggcagagcgccctggactacttcatgtttgctgtgcgctgccgccaccagaggcggcagctggtgcactttgcctgggagcacttccggccccgctgcaagtttgtgtggggcccccaggacaagctgcggcgcttcaagcccagcagcctgccccaccccctggagggcagcaggaaggtggaggaggagggcagccctggggaccctgaccacgaggccagcacccagggccgcacctgtggccctgagcacagcaaaggaggcggccgggtggatgagggcccccagcccaggtctgtggagccccaggatgctggccccctggagaggagccagggagatgaagctgggggccacggggaggacaggcctgagcccctgagccccaaggagagcaagaagaggaagctggagctgagccggcgggagcagcccccaacagagcccggcccccagagcgccagcgaggtggagaagatcgccctgaacctggagggctgtgccctgagccagggcagcctgaggacaggcacccaggaggtgggcggccaggaccctggagaggccgtgcagccctgccggcagcccctgggcgcccgggtggccgacaaggtgaggaagaggaggaaggtggatgaaggagctggggacagcgctgctgtggccagcggcggggcccagaccctggccctggccggcagccctgcccccagcggccaccccaaggccggccacagtgaaaatggagtggaggaggacacagagggccgcacaggccccaaggagggcaccccaggcagccccagcgagaccccaggccccagccctgctggccctgctggagatgagcctgctgagagccccagcgagaccccaggccccaggcctgctggccctgctggagatgagcctgctgagagccccagcgagaccccaggccccagccctgctggccccaccagagatgagcctgctgagagccccagcgagaccccaggccccaggcctgctggccctgctggagatgagcctgctgagagccccagcgagaccccaggccccaggcctgctggccctgctggagatgagcctgctgagagccccagcgagaccccaggccccagccctgctggccccaccagagatgagcccgccaaggccggggaggccgctgagctgcaggatgctgaggtggagagcagcgccaagagcggcaagccctag

SEQ ID NO: 19804 - DNA, 312 bp, synthetic construct
  source 1..312: mol_type = other DNA; note = Synthetic coding sequence
atgggccagcagagctctgtgcggcggctgaagaggtctgtgccctgtgagagcaatgaggccaatgaggccaatgaggccaacaagaccatgcctgagacccccaccggggacagcgacccccagcctgcccccaagaagatgaagaccagcgagagcagcaccatcctggtggtgcgctacagaagaaatgtgaagaggaccagccctgaggagctggtgaatgaccacgcccgggagaaccgcatcaacccagaccagatggaggaggaggagttcatcgagatcaccacagagcggcccaagaagtag

SEQ ID NO: 19805 - DNA, 1776 bp, synthetic construct
  source 1..1776: mol_type = other DNA; note = Synthetic coding sequence
atggagaaggctgtgaatgatggcagccacagcgaggagctgttctgccacctgaagaccatcagcgagaaggaggacctgccccgctgcaccagcgagagccacctgagctgcctgaagcaggacatcctgaatgagaagacagagctggaggccaccctgaaggaggccgagctggtgacccacagcgtggagctgctgctgcccctcttcaaggacaccatcgagaagatcaactttgaaaatgccaacctgagcgccctgaacctgaagatcagcgagcagaaggagatcctgatcaaggagctggacaccttcaagtctgtgaagctggccctggagcacctgctgaggaagagggactacaagcagacaggagacaacctgagctccatgctgctggagaacctgacagacaatgaaagtgagaacaccaacctgaagaagaaggtgtttgagaaggaggcccacatccaggagctgagctgcctcttccagagcgagaaggccaacaccctgaaggccaaccgcttcagccagagcgtgaaggtggtgcatgagcggctgcagatccagatccacaagcgggaggctgaaaatgacaagctgaaggagtatgtgaagagcctggagaccaagatcgccaagtggaacctgcagagcaggatgaacaagaatgaggccatcgtgatgaaggaggccagccggcagaagacagtggccctgaagaaggccagcaaggtgtacaagcagaggctggaccacttcaccggggccatcgagaagctgaccagccagatccgggaccaggaggccaagctgtctgagaccatcagcgccagcaatgcctggaagagccactatgagaagatcgtgattgagaagacagagctggaggtgcagatcgagaccatgaagaagcagatcatcaacctgctggaggacctgaagaagatggaggaccacggcaagaacagctgtgaggagatcctgaggaaggtgcacagcattgaatatgaaaatgagaccctgaacctggagaacaccaagctgaagaccaccctggccgccctgaaggatgaggtggtgtctgtggagaatgagctgtctgagctgcaggaggtggagaagaagcagaagaccctgattgagatgtacaagacccaggtgcagaagctgcaggaggccgctgagatcgtgaagagccgctgtgagaacctgctgcacaagaacaaccagatcaccaagaccaagaacaagaatgtggagaaggtggatggcaaccacaacctgctgaccaagctgagcctggaggaggagaactgcctgatccagctgaagtgtgagaacctgcagcagaagctggagcagatggatgctgagaacaaggagctggagaagaagctggccaaccaggaggagtgcctgaagcacagcaacctgaagttcaaggagaagtctgctgagtacacagccctggcccggcagctggaggccgccctggaggagggccggcagaaggtggccgaggagattgagaagatgagcagccgggagagcgccctgcagatcaagatcctggacctggagacagagctgaggaagaagaatgaggagcagaaccagctggtgtgcaagatgaacagcaaggcccagcaccaggaggtgtgcctgaaggaggtgcagaacagcctggagaagtctgagaaccagaatgaaagcatcaagaactacctgcagttcctgaagaccagctatgtgaccatgtttgaatag

SEQ ID NO: 19806 - DNA, 1935 bp, synthetic construct
  source 1..1935: mol_type = other DNA; note = Synthetic coding sequence
atggagaaggctgtgaatgatggcagccacagcgaggagctgttctgccacctgaagaccatcagcgagaaggaggacctgccccgctgcaccagcgagagccacctgagctgcctgaagcaggacatcctgaatgagaagacagagctggaggccaccctgaaggaggccgagctggtgacccacagcgtggagctgctgctgcccctcttcaaggacaccatcgagaagatcaactttgaaaatgccaacctgagcgccctgaacctgaagatcagcgagcagaaggagatcctgatcaaggagctggacaccttcaagtctgtgaagctggccctggagcacctgctgaggaagagggactacaagcagacaggagacaacctgagctccatgctgctggagaacctgacagacaatgaaagtgagaacaccaacctgaagaagaaggtgtttgagaaggaggcccacatccaggagctgagctgcctcttccagagcgagaaggccaacaccctgaaggccaaccgcttcagccagagcgtgaaggtggtgcatgagcggctgcagatccagatccacaagcgggaggctgaaaatgacaagctgaaggagtatgtgaagagcctggagaccaagatcgccaagtggaacctgcagagcaggatgaacaagaatgaggccatcgtgatgaaggaggccagccggcagaagacagtggccctgaagaaggccagcaaggtgtacaagcagaggctggaccacttcaccggggccatcgagaagctgaccagccagatccgggaccaggaggccaagctgtctgagaccatcagcgccagcaatgcctggaagagccactatgagaagatcgtgattgagaagacagagctggaggtgcagatcgagaccatgaagaagcagatcatcaacctgctggaggacctgaagaagatggaggaccacggcaagaacagctgtgaggagatcctgaggaaggtgcacagcattgaatatgaaaatgagaccctgaacctggagaacaccaagctgaagaccaccctggccgccctgaaggatgaggtggtgtctgtggagaatgagctgtctgagctgcaggaggtggagaagaagcagaagaccctgattgagatgtacaagacccaggtgcagaagctgcaggaggccgctgagatcgtgaagagccgctgtgagaacctgctgcacaagaacaaccagatcaccaagaccaagaacaagaatgtggagaagatgaggggccagatggagagccacctgaaggagctggagcgggtgtgtgacagcctgacagctgctgagcggcggctgcacgagtgccaggagagcctgcagtgctgcaagggcaaatgtgccgaccaggagcacaccatccgggagctgcagggccaggtggatggcaaccacaacctgctgaccaagctgagcctggaggaggagaactgcctgatccagctgaagtgtgagaacctgcagcagaagctggagcagatggatgctgagaacaaggagctggagaagaagctggccaaccaggaggagtgcctgaagcacagcaacctgaagttcaaggagaagtctgctgagtacacagccctggcccggcagctggaggccgccctggaggagggccggcagaaggtggccgaggagattgagaagatgagcagccgggagagcgccctgcagatcaagatcctggacctggagacagagctgaggaagaagaatgaggagcagaaccagctggtgtgcaagatgaacagcaaggcccagcaccaggaggtgtgcctgaaggaggtgcagaacagcctggagaagtctgagaaccagaatgaaagcatcaagaactacctgcagttcctgaagaccagctatgtgaccatgtttgaatag

SEQ ID NO: 19807 - DNA, 2526 bp, synthetic construct
  source 1..2526: mol_type = other DNA; note = Synthetic coding sequence
atgatggctgatggagctgctgctggggccggcggcagccccagcctgcgggagctgcgggccaggatggtggccgccgccaatgagatcgccaaggagaggaggaagcaggatgtggtgaacagagtggccacccacagcagcaacatccgcagcaccttcaagcctgtgattgatggctccatgctgaagaatgacatcaagcagaggctggcccgggagcggcgggaggagaagaggcggcagcaggatgccaacaaggagacccagctgctggagaaggagaggaagaccaagctgcagtatgagaagcagatggaggagcggcagaggaagctgaaggagaggaaggagaaggaggagcagaggagaattgctgctgaggagaagaggcaccagaaggatgaggcccagaaggagaagttcaccgccatcctgtaccgcaccctggagcggcggcggctggctgatgactaccagcagaagcgctggagctggggcggcagcgccatggccaacagcgagagcaagacaggcaagacagacaaggagaggagcagcagcctgaacagaagagacagcaacctgcacagcagcacagacaaggagcaggccgagaggaagccccgggtgactggagtgaccaactacgtgatgcagtatgtgacagtgcccctgaggaagtgcaccagtgatgagctgcgggctgtgatgttccccatgagcaccatgaagatccccccccagaccaaggtggaggagagccccctggagaaggtggagaccccacccaaggcctctgtggatgccccaccccaggtgaatgtggaggtgttctgcaacacctccatggaggccagccccaaggccggcgtgggcatggcccctgaggtgtccacagacagcttccctgtggtgtctgtggatgtgtcccctgtggtgtccacctatgattctgagatgtccatggatgccagccctgagctgagcattgaggccctgcccaaggtggacctggagaccgtgcccaaggtgtccatcgtggccagccctgaggccagcctggaggcccctcctgaggtgtccctggaggccctgcctgaggtgtctgtggaggccgcccctgagggcagcctggaggccccacccaagggcagcgctgaggtggcccccaaggagagcgtgaagggcagccccaaggagagcatggaggccagccctgaggccatggtgaaggccagccccaagaccagcctggaggcctccatggaggccagccccaaggccaaggccagagatgcccccaagaagtctgagatggacaagcaggccctgatccccatcgccaagaagaggctgagcagctacacagagtgctacaagtggagcagcagcccagaaaatgcctgtggcctgcccagccccatcagcaccaaccggcagatccagaagaactgcccccccagccccctgcccctcatcagcaagcagagcccccagaccagcttcccctacaagatcatgcccatccagcacaccctgtctgtgcagagcgccagcagcacagtgaagaagaagaaggagaccgtgtccaagaccaccaacagatgtgaggccctgagccagaggcacatgatctatgaggagagcggcaacaagagcacagctggcatcatgaatgctgaggccgccaccaagatcctgacagagctgcggcggctggcccgggagcagcgggagaaggaggaggaggagcggcagcgggaggagatgcagcagagggtcatcaagaagagcaaggacatggccaaggaggccgtgggcggccaggccgaggaccacctgaagctgaaggatggccagcagcagaatgagaccaagaagaagaagggctggctggaccaggaggaccaggaggcccccctgcagaagggagatgccaagatcaaggcccaggaggaggccgacaagaggaagaaggagcacgagcgcatcatgctgcagaacctgcaggagcggctggagaggaagaagagaattgaggagatcatgaagaggaccaggaagacagatgtgaatgccagcaaggtgacagagaccagcagccatgacatctatgaggaggccgaggccgacaatgaggagagtgacaaggacagcctgaatgagatgttccccagcgccatcctgaatggaacaggcagccccaccaagttcaagatgcccttcaacaatgccaagaagatgacccacaagctggtgttcctggaggatggcaccagccaggtgaggaaggagcccaagacctacttcaacggggacctgaagaacttccggcagaagtccatgaaggacaccagcatccaggaggtggtgtcccggcccagcagcaagaggatgaccagccacaccaccaagaccaggaaggcagatgagaccaacaccaccagccgcagcagcgcccagaccaagtctgagggcttccatgacatcctgcccaagagcagtgacaccttccggcagtag

SEQ ID NO: 19808 - DNA, 2577 bp, synthetic construct
  source 1..2577: mol_type = other DNA; note = Synthetic coding sequence
atgaccagcccccgggtggccgccgccaatgagatcgccaaggagaggaggaagcaggatgtggtgaacagagtggccacccacagcagcaacatccgcagcaccttcaagcctgtgattgatggctccatgctgaagaatgacatcaagcagaggctggcccgggagcggcgggaggagaagaggcggcagcaggatgccaacaaggagacccagctgctggagaaggagaggaagaccaagctgcagtatgagaagcagatggaggagcggcagaggaagctgaaggagaggaaggagaaggaggagcagaggagaattgctgctgaggagaagaggcaccagaaggatgaggcccagaaggagaagttcaccgccatcctgtaccgcaccctggagcggcggcggctggctgatgactaccagcagaagcgctggagctggggcggcagcgccatggccaacagcgagagcaagacagccaacaagaggtctgccagcacagagaagctggagcagggcaccagcgccctgatccggcagatgcccctgagcagcgctggcctgcagaacagcgtggccaagaggaagacagacaaggagaggagcagcagcctgaacagaagagacagcaacctgcacagcagcacagacaaggagcaggccgagaggaagccccgggtgactggagtgaccaactacgtgatgcagtatgtgacagtgcccctgaggaagtgcaccagtgatgagctgcgggctgtgatgttccccatgagcaccatgaagatccccccccagaccaaggtggaggagagccccctggagaaggtggagaccccacccaaggcctctgtggatgccccaccccaggtgaatgtggaggtgttctgcaacacctccatggaggccagccccaaggccggcgtgggcatggcccctgaggtgtccacagacagcttccctgtggtgtctgtggatgtgtcccctgtggtgtccacctatgacagcgagatgtccatggatgccagccctgagctgagcattgaggccctgcccaaggtggacctggagaccgtgcccaaggtgtccatcgtggccagccctgaggccagcctggaggcccctcctgaggtgtccctggaggccctgcctgaggtgtctgtggaggccgcccctgagggcagcctggaggccccacccaagggcagcgctgaggtggcccccaaggagagcgtgaagggcagccccaaggagagcatggaggccagccctgaggccatggtgaaggccagccccaagaccagcctggaggcctccatggaggccagccccaaggccaaggccagagatgcccccaagaagtctgagatggacaagcaggccctgatccccatcgccaagaagaggctgagcagctacacagagtgctacaagtggagcagcagcccagaaaatgcctgtggcctgcccagccccatcagcaccaaccggcagatccagaagaactgcccccccagccccctgcccctcatcagcaagcagagcccccagaccagcttcccctacaagatcatgcccatccagcacaccctgtctgtgcagagcgccagcagcacagtgaagaagaagaaggagaccgtgtccaagaccaccaacagatgtgaggccctgagccagaggcacatgatctatgaggagagcggcaacaagagcacagctggcatcatgaatgctgaggccgccaccaagatcctgacagagctgcggcggctggcccgggagcagcgggagaaggaggaggaggagcggcagcgggaggagatgcagcagagggtcatcaagaagagcaaggacatggccaaggaggccgtgggcggccaggccgaggaccacctgaagctgaaggatggccagcagcagaatgagaccaagaagaagaagggctggctggaccaggaggaccaggaggcccccctgcagaagggagatgccaagatcaaggcccaggaggaggccgacaagaggaagaaggagcacgagcgcatcatgctgcagaacctgcaggagcggctggagaggaagaagagaattgaggagatcatgaagaggaccaggaagacagatgtgaatgccagcaaggtgacagagaccagcagccatgacatctatgaggaggccgaggccgacaatgaggagagtgacaaggacagcctgaatgagatgttccccagcgccatcctgaatggcaccggcagccccaccaagttcaagatgcccttcaacaatgccaagaagatgacccacaagctggtgttcctggaggatggcaccagccaggtgaggaaggagcccaagacctacttcaatggagacctgaagaacttccggcagaagtccatgaaggacaccagcatccaggaggtggtgtcccggcccagcagcaagaggatgaccagccacaccaccaagaccaggaaggcagatgagaccaacaccaccagccgcagcagcgcccagaccaagtctgagggcttccatgacatcctgcccaagagcagtgacaccttccggcagtag

SEQ ID NO: 19809 - DNA, 948 bp, synthetic construct
  source 1..948: mol_type = other DNA; note = Synthetic coding sequence
atgcccctgaagctgcggggcaagaagaaggccaagagcaaggagacagctggcctggtggagggggagcccactggagctgggggcggcagcctgagcgccagccgggccccagcccggcggctggtgttccacgcccagctggcccacggcagcgccaccggccgggtggagggcttcagcagcatccaggagctgtatgcccagattgctggggcctttgagatcagccccagcgagatcctgtactgcaccctgaacacccccaagattgacatggagcggctgctgggcggccagctgggcctggaggacttcatctttgcccacgtgaagggcatcgagaaggaggtgaatgtgtacaagtctgaggacagcctgggcctgaccatcacagacaacggggtgggctacgccttcatcaagaggatcaaggatggcggcgtcatcgacagcgtgaagaccatctgtgtgggggaccacatcgagagcatcaacggggagaacatcgtgggctggaggcactatgatgtggccaagaagctgaaggagctgaagaaggaggagctgttcaccatgaagctgattgagcccaagaaggcctttgaaattgagctgcggagcaaggccggcaagagcagcggggagaagattggctgcggccgggccaccctgcggctgcggagcaagggccctgccaccgtggaggagatgcccagcgagaccaaggccaaggccatcgagaagattgatgatgtgctggagctgtacatgggcatccgggacatcgacctggccaccaccatgtttgaggccggcaaggacaaggtgaacccagatgaatttgctgtggccctggatgagaccctgggggactttgccttcccagatgaatttgtgtttgatgtgtggggcgtgattggagatgccaagaggcggggcctgtag

SEQ ID NO: 19810 - DNA, 2487 bp, synthetic construct
  source 1..2487: mol_type = other DNA; note = Synthetic coding sequence
atgacaggcagcaacagccacatcaccatcctgaccctgaaggtgctgccccactttgagagcctgggcaagcaggagaagatccccaacaagatgtctgccttcaggaaccactgcccccacctggacagcgtgggggagatcaccaaggaggacctgatccagaagagcctgggcacctgccaggactgcaaggtgcagggccccaacctgtgggcctgcctggagaaccgctgcagctatgtgggctgtggggagagccaggtggaccacagcaccatccacagccaggagaccaagcactacctgactgtgaacctgaccaccctgcgggtgtggtgctacgcctgcagcaaggaggtgttcctggacaggaagctgggcacccagcccagcctgccccacgtgcggcagccccaccagatccaggagaacagcgtgcaggacttcaagatccccagcaacaccaccctgaagacccccctggtggccgtgtttgatgacctggacattgaagcagatgaggaggatgagctgcgggcccggggcctgaccggcctgaagaacatcggcaacacctgctacatgaatgctgccctgcaggccctgagcaactgcccccccctgacccagttcttcctggactgtggcggcctggccaggacagacaagaagccagccatctgcaagagctacctgaagctgatgacagagctgtggcacaagagcaggcctggctctgtggtgcccaccaccctcttccagggcatcaagacagtgaaccccaccttccggggctacagccagcaggatgcccaggagttcctgcgctgcctgatggacctgctgcacgaggagctgaaggagcaggtgatggaggtggaggaggacccccagaccatcaccacagaggagaccatggaggaggacaagagccagagtgatgtggacttccagagctgtgagagctgcagcaacagcgacagagcagaaaatgaaaatggcagccgctgcttcagcgaggacaacaatgagaccaccatgctgatccaggatgatgagaacaacagcgagatgagcaaggactggcagaaggagaagatgtgcaacaagatcaacaaggtgaacagcgagggggagtttgacaaggaccgggacagcatcagcgagaccgtggacctgaacaaccaggagaccgtgaaggtgcagatccacagccgggccagcgagtacatcacagatgtgcacagcaatgacctgagcaccccccagatcctgcccagcaatgaaggagtgaacccccggctgagcgccagcccccccaagagcggcaacctgtggccaggcctggccccaccccacaagaaggcccagagcgccagccccaagaggaagaagcagcacaagaagtacagaagtgtcatcagtgacatctttgatggcaccatcatcagctctgtgcagtgcctgacctgtgacagagtgtctgtgaccctggagaccttccaggacctgagcctgcccatccctgggaaggaggacctggccaagctgcacagcagcagccaccccaccagcatcgtgaaggccggcagctgtggggaggcctatgccccccagggctggatcgccttcttcatggagtatgtgaagtcctggttctggggccctgtggtgaccctgcaggactgcctggccgccttctttgccagagatgagctgaagggggacaacatgtacagctgtgagaagtgcaagaagctgagaaatggagtgaagttctgcaaggtgcagaacttccctgagatcctgtgcatccacctgaagcgcttcagacatgagctgatgttcagcaccaagatcagcacccacgtgtccttccccctggagggcctggacctgcagcccttcctggccaaggacagccctgcccagatcgtgacctatgacctgctgagcgtcatctgccaccacggcacagccagcagcggccactacatcgcctactgcaggaacaacctgaacaacctgtggtatgaatttgatgaccagagcgtgacagaggtgtctgagagcacagtgcagaatgctgaggcctacgtgctcttctacaggaagagcagcgaggaggcccagaaggagcggcggcgcatcagcaacctgctgaacatcatggagcccagcctgctgcagttctacatcagccggcagtggctgaacaagttcaagacctttgctgagcccggccccatcagcaacaatgacttcctgtgcatccacggcggcgtgccccccaggaaggccggctacatcgaggacctggtgctgatgctgccccagaacatctgggacaacctgtacagccgctatggaggcggccctgctgtgaaccacctgtacatctgccacacctgccagattgaagctgagaagattgagaagaggaggaagacagagctggagatcttcatccgggtgaagaagtag

SEQ ID NO: 19811 - DNA, 2829 bp, synthetic construct; identical to SEQ ID NO: 19479
  source 1..2829: mol_type = other DNA; note = Synthetic coding sequence

SEQ ID NO: 19812 - DNA, 2736 bp, synthetic construct
  source 1..2736: mol_type = other DNA; note = Synthetic coding sequence
atgtctgccttcaggaaccactgcccccacctggacagcgtgggggagatcaccaaggaggacctgatccagaagagcctgggcacctgccaggactgcaaggtgcagggccccaacctgtgggcctgcctggagaaccgctgcagctatgtgggctgtggggagagccaggtggaccacagcaccatccacagccaggagaccaagcactacctgactgtgaacctgaccaccctgcgggtgtggtgctacgcctgcagcaaggaggtgttcctggacaggaagctgggcacccagcccagcctgccccacgtgcggcagccccaccagatccaggagaacagcgtgcaggacttcaagatccccagcaacaccaccctgaagacccccctggtggccgtgtttgatgacctggacatcgaggctgatgaagaagatgagctgcgggcccggggcctgaccggcctgaagaacatcggcaacacctgctacatgaatgctgccctgcaggccctgagcaactgcccccccctgacccagttcttcctggactgtggcggcctggccaggacagacaagaagccagccatctgcaagagctacctgaagctgatgacagagctgtggcacaagagccggcccggctctgtggtgcccaccaccctcttccagggcatcaagacagtgaaccccaccttccggggctacagccagcaggatgcccaggagttcctgcgctgcctgatggacctgctgcacgaggagctgaaggagcaggtgatggaggtggaggaggacccccagaccatcaccacagaggagaccatggaggaggacaagagccagagtgatgtggacttccagagctgtgagagctgcagcaacagcgacagagcagaaaatgaaaatggcagccgctgcttcagcgaggacaacaatgagaccaccatgctgatccaggatgatgagaacaacagcgagatgagcaaggactggcagaaggagaagatgtgcaacaagatcaacaaggtgaacagcgagggggagtttgacaaggaccgggacagcatcagcgagaccgtggacctgaacaaccaggagaccgtgaaggtgcagatccacagccgggccagcgagtacatcacagatgtgcacagcaatgacctgagcaccccccagatcctgcccagcaatgaaggagtgaacccccggctgagcgccagcccccccaagagcggcaacctgtggccaggcctggccccaccccacaagaaggcccagagcgccagccccaagaggaagaagcagcacaagaagtaccgcagcgtcatcagtgacatctttgatggcaccatcatcagctctgtgcagtgcctgacctgtgacagagtgtctgtgaccctggagaccttccaggacctgagcctgcccatccctgggaaggaggacctggccaagctgcacagcagcagccaccccaccagcatcgtgaaggccggcagctgtggggaggcctatgccccccagggctggatcgccttcttcatggagtatgtgaagagatttgtggtgtcctgtgtgcccagctggttctggggccctgtggtgaccctgcaggactgcctggccgccttctttgccagagatgagctgaagggggacaacatgtacagctgtgagaagtgcaagaagctgagaaatggagtgaagttctgcaaggtgcagaacttccctgagatcctgtgcatccacctgaagcgcttcagacatgagctgatgttcagcaccaagatcagcacccacgtgtccttccccctggagggcctggacctgcagcccttcctggccaaggacagccctgcccagatcgtgacctatgacctgctgagcgtcatctgccaccacggcacagccagcagcggccactacatcgcctactgcaggaacaacctgaacaacctgtggtatgaatttgatgaccagagcgtgacagaggtgtctgagagcacagtgcagaatgctgaggcctacgtgctcttctacaggaagagcagcgaggaggcccagaaggagcggcggcgcatcagcaacctgctgaacatcatggagcccagcctgctgcagttctacatcagccggcagtggctgaacaagttcaagacctttgctgagcccggccccatcagcaacaatgacttcctgtgcatccatggaggagtgccccccaggaaggccggctacatcgaggacctggtgctgatgctgccccagaacatctgggacaacctgtacagccgctatggaggcggccctgctgtgaaccacctgtacatctgccacacctgccagatcgaggccgagaagattgagaagaggaggaagacagagctggagatcttcatccggctgaacagagccttccagaaggaggacagccctgccaccttctactgcatctccatgcagtggttccgggagtgggagagctttgtgaagggcaaggatggagaccccccaggccccatcgacaacaccaagattgctgtgaccaagtgtggaaatgtgatgctgcggcagggcgctgacagcggccagatcagcgaggagacctggaacttcctgcagagcatctacggcggcggccctgaggtgatcctgcggccccctgtggtgcacgtggaccctgacatcctgcaggccgaggagaagattgaggtggagaccaggagcctgtag

SEQ ID NO: 19813 - DNA, 465 bp, synthetic construct
  source 1..465: mol_type = other DNA; note = Synthetic coding sequence
atggcccctcctgtgcgctactgcatccctggagagcggctgtgcaacctggaggagggcagccctggcagcggcacctacaccaggcatggctacatcttcagcagcctggccggctgcctgatgaagagcagtgaaaatggagccctgcctgtggtgtctgtggtgcgggagacagagagccagctgctgcctgatgtgggcgccatcgtgacctgcaaggtggagatctacaagagcttccggcctggggacatcgtgctggccaaggtgatcagcctgggagatgcccagagcaactacctgctgaccacagcagaaaatgagctgggcgtggtggtggcccacagcgagagcggcatccagatggtgcccatctcctggtgtgagatgcagtgccccaagacccacaccaaggagttcaggaaggtggcccgggtgcagcctgagttcctgcagacctag

SEQ ID NO: 19814 - DNA, 513 bp, synthetic construct
  source 1..513: mol_type = other DNA; note = Synthetic coding sequence
atggcccctcctgtgcgctactgcatccctggagagcggctgtgcaacctggaggagggcagccctggcagcggcacctacaccaggcatggctacatcttcagcagcctggccggctgcctgatgaagagcagtgaaaatggagctgtgagcagcatcaacagcagatttgccaaggtgcacatcctgtatgtgggctccatgcccctgaagaacagcttccggggcaccatcagaaaagaagatgtgcgggccacagagaaggacaaggtggagatctacaagagcttccggcctggggacatcgtgctggccaaggtgatcagcctgggagatgcccagagcaactacctgctgaccacagcagaaaatgagctgggcgtggtggtggcccacagcgagagcggcatccagatggtgcccatctcctggtgtgagatgcagtgccccaagacccacaccaaggagttcaggaaggtggcccgggtgcagcctgagttcctgcagacctag

SEQ ID NO: 19815 - DNA, 537 bp, synthetic construct
  source 1..537: mol_type = other DNA; note = Synthetic coding sequence
atggcccctcctgtgcgctactgcatccctggagagcggctgtgcaacctggaggagggcagccctggcagcggcacctacaccaggcatggctacatcttcagcagcctggccggctgcctgatgaagagcagtgaaaatggagccctgcctgtggtgtctgtggtgcgggagacagagagccagctgctgcctgatgtgggcgccatcgtgacctgcaaggtgagcagcatcaacagcagatttgccaaggtgcacatcctgtatgtgggctccatgcccctgaagaacagcttccggggcaccatcaggaaggaggatgtgcgggccacagagaaggacaagatcagcctgggagatgcccagagcaactacctgctgaccacagcagaaaatgagctgggcgtggtggtggcccacagcgagagcggcatccagatggtgcccatctcctggtgtgagatgcagtgccccaagacccacaccaaggagttcaggaaggtggcccgggtgcagcctgagttcctgcagacctag

SEQ ID NO: 19816 - DNA, 2811 bp, synthetic construct
  source 1..2811: mol_type = other DNA; note = Synthetic coding sequence
atggctgctgcccgggaccccccagaggtgtccctgcgggaggccacccagaggaagctgcggcgcttcagcgagctgcggggcaagctggtggcccggggggagttctgggacatcgtggccatcacagctgctgatgagaagcaggagctggcctacaaccagcagctgtctgagaagctgaagaggaaggagctgcccctgggcgtgcagtaccacgtgtttgtggaccctgctggggccaagattggaaatggaggcagcaccctgtgtgccctgcagtgcctggagaagctgtatggagacaagtggaacagcttcaccatcctgctgatccacagtgatgagtggaagaagaaggtgtctgagagctatgtgatcaccatcgagcggctggaggatgacctgcagatcaaggagaaggagctgacagagctgaggaacatcttcggcagtgatgaggccttcagcaaggtgaacctgaactacagaacagaaaatggcctgagcctgctgcacctgtgctgcatctgtggcggcaagaagagccacatccgcaccctgatgctgaagggcctgcggcccagccggctgaccagaaatggcttcaccgccctgcacctggccgtgtacaaggacaatgctgagctgatcaccagcctgctgcacagcggggctgacatccagcaggtgggctatggaggcctgacagccctgcacatcgccaccatcgccggccacctggaggccgcagatgtgctgctgcagcacggggccaacgtgaacatccaggatgctgtgttcttcacccccctgcacatcgccgcctactacggccacgagcaggtgacccggctgctgctgaagtttggagcagatgtgaatgtgtctggagaggtgggggaccggcccctgcacctggccagcgccaagggcttcctgaacatcgccaagctgctgatggaggagggcagcaaggcagatgtgaatgcccaggacaatgaagatcatgtgcccctgcacttctgcagccgcttcggccaccacgacatcgtgaagtacctgctgcagagcgacctggaggtgcagccccacgtggtgaacatctacggggacacccccctgcacctggcctgctacaacgggaagtttgaggtggccaaggagatcatccagatcagcggcacagagagcctgaccaaggagaacatcttcagcgagacagccttccacagcgcctgcacctacggcaagagcattgacctggtgaagttcctgctggaccagaatgtcatcaacatcaaccaccagggcagagatggccacacaggcctgcacagcgcctgctaccacggccacatccggctggtgcagttcctgctggacaatggagctgacatgaacctggtggcctgtgaccccagccgcagcagcggggagaaggatgagcagacctgcctgatgtgggcctatgaaaaaggacatgatgccatcgtgaccctgctgaagcactacaagaggccccaggatgagctgccctgcaatgagtacagccagcctggaggagatggcagctatgtgtctgtgcccagccccctgggcaagatcaagtccatgaccaaggagaaggctgacatcctgctgctgcgggccggcctgcccagccacttccacctgcagctgtctgaaattgagttccacgagatcatcggcagcggcagctttgggaaggtgtacaagggccgctgcaggaacaagatcgtggccatcaagcgctaccgggccaacacctactgcagcaagagtgatgtggacatgttctgccgggaggtgtccatcctgtgccagctgaaccacccctgtgtgatccagtttgtgggcgcctgcctgaatgaccccagccagtttgccatcgtgacccagtacatcagcggcggcagcctcttcagcctgctgcacgagcagaagaggatcctggacctgcagagcaagctgatcatcgctgtggatgtggccaagggcatggagtacctgcacaacctgacccagcccatcatccaccgggacctgaacagccacaacatcctgctgtatgaagatggccatgctgtggtggccgactttggagagagccgcttcctgcagagcctggatgaggacaacatgaccaagcagcccggcaacctgcgctggatggcccctgaggtgttcacccagtgcacccgctacaccatcaaggcagatgtgttctcctatgccctgtgcctgtgggagatcctgactggagagatcccctttgcccacctgaagccagctgctgctgctgctgacatggcctaccaccacatccggccccccatcggctacagcatccccaagcccatcagcagcctgctgatccggggctggaatgcctgcccagagggccggcctgagttcagcgaggtggtgatgaagctggaggagtgcctgtgcaacatcgagctgatgagccctgccagcagcaacagcagcggcagcctgagccccagcagcagcagtgactgcctggtgaacagaggaggccctggccgcagccacgtggccgccctgcggagcagatttgagctggagtatgccctgaatgcccggagctatgctgccctgagccagagcgctggccagtacagcagccagggcctgagcctggaggagatgaagaggagcctgcagtacacccccatcgacaagtatggctacgtgtctgaccccatgagctccatgcacttccacagctgcaggaacagcagcagctttgaggacagcagctag

SEQ ID NO: 19817 - DNA, 510 bp, synthetic construct
  source 1..510: mol_type = other DNA; note = Synthetic coding sequence
atggctgctgcccgggaccccccagaggtgtccctgcgggaggccacccagaggaagctgcggcgcttcagcgagctgcggggcaagctggtggcccggggggagttctgggacatcgtggccatcacagctgctgatgagaagcaggagctggcctacaaccagcagctgtctgagaagctgaagaggaaggagctgcccctgggcgtgcagtaccacgtgtttgtggaccctgctggggccaagattggaaatggaggcagcaccctgtgtgccctgcagtgcctggagaagctgtatggagacaagtggaacagcttcaccatcctgctgatccacagcgtgtccttccagatctaccagaatgccctggccaagcaccctgtgtccttcaaggcctactggatccaggatgtgctgtggcacctggcccagctgtggagcatcccagactggggcctgatgttccagctgggcaagacagccctgctggtggtgctgaccagctag

SEQ ID NO: 19818 - DNA, 1785 bp, synthetic construct
  source 1..1785: mol_type = other DNA; note = Synthetic coding sequence
atggctgctgcccgggaccccccagaggtgtccctgcgggaggccacccagaggaagctgcggcgcttcagcgagctgcggggcaagctggtggcccggggggagttctgggacatcgtggccatcacagctgctgatgagaagcaggagctggcctacaaccagcagctgtctgagaagctgaagaggaaggagctgcccctgggcgtgcagtaccacgtgtttgtggaccctgctggggccaagattggaaatggaggcagcaccctgtgtgccctgcagtgcctggagaagctgtatggagacaagtggaacagcttcaccatcctgctgatccacagcggcggctacagccagaggctgcccaatgccagcgccctgggcaagatcttcaccgccctgcccctgggcaaccccatctaccagatgctggagctgaagctggccatgtacatcgacttccccctgaacatgaaccctggcatcctggtgacctgtgctgatgacatcgagctgtacagcattggagaatttgagttcatccgctttgacaagccaggcttcaccgccctggcccaccccagcagcctgaccatcggcaccacccatggagtgtttgtgctggacccctttgatgacctgaagcaccgggacctggagtaccgcagctgccaccgcttcctgcacaagcccagcattgagaagatgtaccagttcaatgctgtgtgcaggcctggcaacttctgccagcaggactttgctggaggagacattgctgacctgaagctggacagcgactatgtgtacacagacagcctcttctacatggaccacaagagcgccaagatgctgctggccttctatgagaagattggcaccctgagctgtgaaattgatgcctatggagacttcctgcaggccctgggccctggggccaccgtggagtacaccaggaacaccagcaatgtcatcaaggaggagagcgagctggtggagatgaggcagaggatcttccacctgctgaagggcaccagcctgaatgtggtggtgctgaacaacagcaagttctaccacatcggcaccacagaggagtacctgttctacttcaccagtgacaacagcctgaagtctgagctgggcctgcagagcatcaccttcagcatcttcccagacatccctgagtgcagcggcaagaccagctgcatcatccagagcatcctggacagccgctgcagcgtggcccctggctctgtggtggagtacagccggctgggcccagatgtgtctgtgggggagaactgcatcatcagcggcagctacatcctgaccaaggccgccctgcctgcccacagctttgtgtgcagcctgagcctgaagatgaaccgctgcctgaagtatgccaccatggcctttggagtgcaggacaacctgaagaagtctgtgaagaccctgagtgacatcaagctgctgcagttctttggagtgtgcttcctgagctgcctggatgtgtggaacctgaaggtgacagaggagctgttcagcggcaacaagacctgcctgagcctgtggacagcccgcatcttccctgtgtgcagcagcctgagtgacagcgtcatcaccagcctgaagatgctgaatgctgtgaagaacaagagcgccttcagcctgaacagctacaagctgctgagcattgaggagatgctgatctacaaggatgtggaggacatgatcacctaccgggagcagatcttcctggagatcagcctgaagagcagcctgatgtag

SEQ ID NO: 19819 - DNA, 588 bp, synthetic construct
  source 1..588: mol_type = other DNA; note = Synthetic coding sequence
atggcccctcctgtgcgctactgcatccctggagagcggctgtgcaacctggaggagggcagccctggcagcggcacctacaccaggcatggctacatcttcagcagcctggccggctgcctgatgaagagcagtgaaaatggagccctgcctgtggtgtctgtggtgcgggagacagagagccagctgctgcctgatgtgggcgccatcgtgacctgcaaggtgagcagcatcaacagcagatttgccaaggtgcacatcctgtatgtgggctccatgcccctgaagaacagcttccggggcaccatcaggaaggaggatgtgcgggccacagagaaggacaaggtggagatctacaagagcttccggcctggggacatcgtgctggccaaggtgatcagcctgggagatgcccagagcaactacctgctgaccacagcagaaaatgagctgggcgtggtggtggcccacagcgagagcggcatccagatggtgcccatctcctggtgtgagatgcagtgccccaagacccacaccaaggagttcaggaaggtggcccgggtgcagcctgagttcctgcagacctag

SEQ ID NO: 19820 - DNA, 1626 bp, synthetic construct
  source 1..1626: mol_type = other DNA; note = Synthetic coding sequence
atgaccggggagaagatccgcagcctgcggcgggaccacaagcccagcaaggaggagggggacctgctggagcctggagatgaggaggccgccgccgccctgggcggcaccttcaccaggagcagaattggaaaaggaggcaaggcctgccacaagatcttcagcaaccaccaccaccggctgcagctgaaggccgccccagccagcagcaaccccccaggggccccagccctgcccctgcacaacagctctgtgacagccaacagccagagccctgccctgctggccggcaccaaccctgtggccgtggtggctgatggcggcagctgcccagcccactaccctgtgcatgaatgtgtgttcaagggagatgtgcggcggctgagcagcctcatccgcacccacaacatcggccagaaggacaaccacggcaacacccccctgcacctggccgtgatgctgggcaacaaggaatgtgcccacctgctgctggcccacaatgcccctgtgaaggtgaagaatgcccagggctggagccccctggccgaggccatctcctatggagaccggcagatgatcacagccctgctgaggaagctgaagcagcagagccgggagagcgtggaggagaagaggccccggctgctgaaggccctgaaggagctgggggacttctacctggagctgcactgggacttccagagctgggtgcccctgctgagccgcatcctgcccagtgatgcctgcaagatctacaagcagggcatcaacatccggctggacaccaccctgattgacttcacagacatgaagtgccagagaggagacctgtccttcatcttcaatggagatgctgcccccagcgagagctttgtggtgctggacaatgagcagaaggtgtaccagaggatccaccacgaggagagcgagatggagacagaggaggaggtggacatcctgatgagcagtgacatctacagcgccaccctgagcaccaagagcatctccttcacccgggcccagacaggctggctgttccgggaggacaagacagagcgggtgggcaacttcctggccgacttctacctggtgaatggcctggtgctggagagcaggaagaggcgggagcacctgtctgaggaggacatcctgaggaacaaggccatcatggagagcctgagcaaaggaggcaacatcatggagcagaactttgagcccatccggcggcagagcctgaccccaccaccccagaacaccatcacctgggaggagtacatctctgcagaaaatggcaaggccccccacctgggccgggagctggtgtgcaaggagagcaagaagaccttcaaggccaccatcgccatgagccaggagttccccctgggcatcgagctgctgctgaatgtgctggaggtggtggcccccttcaagcacttcaacaagctgcgggagtttgtgcagatgaagctgcccccaggcttccctgtgaagctggacatccctgtgttccccaccatcacagccaccgtgaccttccaggagttccgctatgatgaatttgatggcagcatcttcaccatcccagatgactacaaggaggaccccagccgcttcccagacctgtag

SEQ ID NO: 19821 - DNA, 840 bp, synthetic construct
  source 1..840: mol_type = other DNA; note = Synthetic coding sequence
atgccctgccggcgggaggaggaggaggaggccggggaggaggccgagggggaggaggaggaggaggacagcttcctgctgctgcagcagagcgtggccctgggcagcagtggagaggtggaccggctggtggcccagattggagagaccctgcagctggatgctgcccagcacagccctgccagcccctgtggccccccaggggcccccctgcgggcccctggccccctggccgctgctgtgcctgctgacaaggcccggagccctgctgtgcccctgctgctgcccccagccctggccgagaccgtgggccctgcccctcctggggtgctgcgctgtgccctgggggaccggggccgggtgcggggccgggccgccccctactgtgtggccgagctggccaccggccccagcgccctgagccccctgcccccccaggccgacctggatggccccccaggagctgggaagcagggcatcccccagcccctgagcggcccctgcagaagaggctggctgcggggagctgctgccagccggcggctgcagcagaggcggggcagccagcctgagaccaggactggagatgatgacccccaccggctgctgcagcagctggtgctgagcggcaacctgatcaaggaggccgtgcggcggctgcacagccggcggctgcagctgcgggccaagctgccccagaggcccctgctgggccccctgagcgcccctgtgcatgagccccccagccccaggagccccagggctgcctgcagcgaccccggggccagcggccgggcccagctgaggactggagatggagtgctggtgcccggcagctag

SEQ ID NO: 19822 - DNA, 1209 bp, synthetic construct
  source 1..1209: mol_type = other DNA; note = Synthetic coding sequence
atgcccctgcacagcagcctgggcaacaagtctgagaccctgagccagaagaagaacaacaacaacaaggagaagaccaagaggaacagcagaaatccacccaggacagccctgaaggagggcaagatggaggagctgagccaggccctggccagcagcttctctgtgtcccaggacctgaacagcacagctgccccccacccccggctgagccagtacaagagcaagtacagcagcctggagcagagcgagaggagaagaaggctgctggagctgcagaagagcaagaggctggactatgtgaaccacgcccggcggctggctgaagatgactggacaggcatggagagcgaggaggagaacaagaaggatgatgaggagatggacatcgacacagtgaagaagctgcccaagcactacgccaaccagctgatgctgtctgagtggctgattgatgtgcccagcgacctgggccaggagtggatcgtggtggtgtgccctgtgggcaagagggccctgattgtggccagccggggcagcaccagcgcctacaccaagagcggctactgtgtgaaccgcttcagcagcctgctgcccggcggcaacagaagaaacagcacagccaaggactacaccatcctggactgcatctacaatgaggtgaaccagacctactacgtgctggatgtgatgtgctggaggggccaccccttctatgactgccagacagacttccgcttctactggatgcacagcaagctgcctgaggaggagggcctgggggagaagaccaagctgaaccccttcaagtttgtgggcctgaagaacttcccctgcaccccagagagcctgtgtgatgtgctgtccatggacttcccctttgaggtggatggcctgctcttctaccacaagcagacccactacagccctggcagcacccccctggtgggctggctgcggccctacatggtgtctgatgtgctgggcgtggccgtgcctgctggccccctgaccaccaagccagactatgccggccaccagctgcagcagatcatggagcacaagaagagccagaaggagggcatgaaggagaagctgacccacaaggcctctgaaaatggccactatgagctggagcacctgagcacccccaagctgaagggcagcagccacagcccagaccaccctggctgcctgatggagaactag

SEQ ID NO: 19823 - DNA, 1107 bp, synthetic construct
  source 1..1107: mol_type = other DNA; note = Synthetic coding sequence
atgagcctgtttggcaccaccagcggcttcggcaccagcggcacctccatgtttggcagcgccaccacagacaaccacaaccccatgaaggacatcgaggtgaccagcagcccagatgacagcatcggctgcctgtccttcagcccccccaccctgcccggcaacttcctgattgctggctcctgggccaatgatgtgcgctgctgggaggtgcaggacagcggccagaccatccccaaggcccagcagatgcacacaggccctgtgctggatgtgtgctggagcgatgatggcagcaaggtgttcaccgccagctgtgacaagacagccaagatgtgggacctgagcagcaaccaggccatccagatcgcccagcatgatgcccctgtgaagaccatccactggatcaaggcccccaactacagctgtgtgatgacaggctcctgggacaagaccctgaagttctgggacaccaggagcagcaaccccatgatggtgctgcagctgcctgagcgctgctactgtgctgatgtgatctaccccatggctgtggtggccacagctgagcggggcctgattgtgtaccagctggagaaccagcccagcgagttcagaagaattgagagccccctgaagcaccagcaccgctgtgtggccatcttcaaggacaagcagaacaagcccactggatttgccctgggcagcattgagggccgggtggccatccactacatcaacccccccaacccagccaaggacaacttcaccttcaagtgccacaggagcaatggcaccaacaccagcgccccccaggacatctatgctgtgaatggaattgccttccaccctgtgcacggcaccctggccaccgtgggcagtgatggccgcttctccttctgggacaaggatgcccggaccaagctgaagaccagcgagcagctggaccagcccatcagcgcctgctgcttcaaccacaacggcaacatctttgcctatgccagcagctatgactggagcaagggccacgagttctacaacccccagaagaagaactacatcttcctgagaaatgctgctgaggagctgaagcccaggaacaagaagtag

SEQ ID NO: 19824 - DNA, 552 bp, synthetic construct
  source 1..552: mol_type = other DNA; note = Synthetic coding sequence
atgaggaagagcagctgtgtggagagctttgatgaccagaggaggatgagcctgcacctgcatggagctgactgtgaccccaagacccagaatgagatgaacatctgtgaggaggagtttgtggagtacaagaacagagatgccatcagcgccctgatgcccctcttcagcgaggaggagagcagtgatggcagcaagcacaacaacggcctgcctgaccacatcagcgcccagctgcagaacacctacaccctgaaggccttcaccgtgggcagcaaatgtgtggtgtggagcagcctgaggaacacctggagcaaatgtgagatcctggagacagctgaggagggcaccagggtgctgaacctgagcaatggcatggaggagatcgtgaacccagaaaatgtgtggaatggcatccccaagctggacaagagccccccagaggccgtgtcccagagggtgggcaaggacctgtacttcatgtctgtgggggacaccaccatcaaggagaagggctttggaggagatggagacctgactgtggacctgtag

SEQ ID NO: 19825 - DNA, 1821 bp, synthetic construct
  source 1..1821: mol_type = other DNA; note = Synthetic coding sequence
atgcccagcccccagctgctggtgctgtttggcagccagacaggaacagcccaggatgtgtctgagcggctgggccgggaggccaggagaagaaggctgggctgccgggtgcaggccctggacagctaccctgtggtgaacctgatcaatgagcccctggtgatctttgtgtgtgccaccaccggccagggcgaccccccagacaacatgaagaacttctggaggttcatcttcaggaagaacctgcccagcacagccctgtgccagatggactttgctgtgctgggcctgggggacagcagctatgccaagttcaactttgtggccaagaagctgcaccggcggctgctgcagctgggcggcagcgccctgctgcctgtgtgcctgggagatgaccagcacgagctgggcccagatgctgctgtggacccctggctgcgggacctgtgggacagagtgctgggcctgtacccacctcctcctggcctgacagagatccccccaggagtgcccctgcccagcaagttcaccctgctcttcctgcaggaggcccccagcactggaagtgagggccagagggtggcccaccctggcagccaggagccccccagcgagagcaagcccttcctggcccccatgatcagcaaccagagggtgacaggccccagccacttccaggatgtgcggctgattgaatttgacatcctgggcagcggcatcagctttgctgctggagatgtggtgctgatccagcccagcaacagcgctgcccacgtgcagcgcttctgccaggtgctgggcctggaccctgaccagctgttcatgctgcagccccgggagccagatgtgagcagccccacccggctgccccagccctgcagcatgaggcacctggtgagccactacctggacatcgcctctgtgccccggcgctccttctttgagctgctggcctgcctgagcctgcacgagctggagcgggagaagctgctggagttcagcagcgcccagggccaggaggagctgtttgagtactgcaaccggcccaggaggaccatcctggaggtgctgtgtgacttcccccacacagctgctgccatccccccagactacctgctggacctgatccctgtgatccggccccgggccttcagcatcgccagcagcctgctgacccaccccagccggctgcagatcctggtggccgtggtgcagttccagacccggctgaaggagccccggcggggcctgtgcagctcctggctggccagcctggaccccggccagggccctgtgcgggtgcccctgtgggtgcggcccggcagcctggccttccctgagaccccagacacccctgtgatcatggtgggccctggcaccggggtggcccccttccgggccgccatccaggagcgggtggcccagggccagacaggcaacttcctgttcttcggctgccgctggagggaccaggacttctactgggaggccgagtggcaggagctggagaagagggactgcctgaccctcatcccagccttcagccgggagcagcccccagccctcttcagcgccctgcaggagcagaaggtgtatgtgcagcaccggctgcgggagctgggcagcctggtgtgggagctgctggaccggcagggcgcctacttctacctggccggaaatgccaagtccatgccagcagatgtgtctgaggccctgatgagcatcttccaggaggagggcggcctgtgcagcccagatgctgctgcctacctggcccggctgcagcagacccggcgcttccagacagagacctgggcctag

SEQ ID NO: 19826 - DNA, 420 bp, synthetic construct
  source 1..420: mol_type = other DNA; note = Synthetic coding sequence
atggccgagagtgactgggacacagtgacagtgctgaggaagaagggccccacagctgcccaggccaagagcaagcaggccatcctggccgcccagaggagaggagaagatgtggagaccagcaagaagtgggccgccggccagaacaagcagcacagcatcaccaagaacacagccaagctggaccgggagacagaggagctgcaccacgacagagtgaccctggaggtgggcaaggtgatccagcagggccggcagagcaagggcctgacccagaaggacctggccaccaagatcaatgagaagccccaggtgattgctgactatgaaagtggccgggccatccccaacaaccaggtgctgggcaagattgaaagagccatcggggagtgccccagcaccctgcggcgggtgaggtag

SEQ ID NO: 19827 - DNA, 426 bp, synthetic construct
  source 1..426: mol_type = other DNA; note = Synthetic coding sequence
atggccgagagtgactgggacacagtgacagtgctgaggaagaagggccccacagctgcccaggccaagagcaagcaggccatcctggccgcccagaggagaggagaagatgtggagaccagcaagaagtgggccgccggccagaacaagcagcacagcatcaccaagaacacagccaagctggaccgggagacagaggagctgcaccacgacagagtgaccctggaggtgggcaaggtgatccagcagggccggcagagcaagggcctgacccagaaggacctggccaccaagatcaatgagaagccccaggtgattgctgactatgaaagtggccgggccatccccaacaaccaggtgctgggcaagattgaaagagccattgatgtgggcaccaggtctgcccgggtgctgcgggcccagtag

SEQ ID NO: 19828 - DNA, 150 bp, synthetic construct
  source 1..150: mol_type = other DNA; note = Synthetic coding sequence
atggccacccagaggaagcacctggtgaaggacttcaacccctacatcacctgctacatctgcaagggctacctgatcaagcccaccaccgtgacagaatgtctgcacaccagcgctgagagctactggatgagcacctggatgtcctag

SEQ ID NO: 19829 - DNA, 960 bp, synthetic construct
  source 1..960: mol_type = other DNA; note = Synthetic coding sequence
atgatggtgctgaaggtggaggagctggtgacaggcaagaagaatggaaatggagaggccggggagttcctgcctgaggacttcagagatggagaatatgaagctgctgtgaccctggagaagcaggaggacctgaagaccctgctggcccaccctgtgaccctgggggagcagcagtggaagtctgagaagcagcgggaggccgagctgaagaagaagaagctggagcagaggagcaagctggagaacctggaggacctggagatcatcatccagctgaagaagaggaagaagtacaggaagaccaaggtgcctgtggtgaaggagcctgagcctgagatcatcacagagcctgtggatgtgcccaccttcctgaaggccgccctggagaacaagctgcctgtggtggagaagttcctgagtgacaagaacaacccagatgtgtgtgatgagtacaagaggacagccctgcaccgggcctgcctggagggccacctggccatcgtggagaagctgatggaggccggggcccagatcgagttccgggacatgctggagagcacagccatccactgggccagccggggcggcaacctggatgtgctgaagctgctgctgaacaagggggccaagatcagcgcccgggacaagctgctgagcacagccctgcacgtggccgtgaggacaggccactatgaatgtgccgagcacctgattgcctgtgaggccgacctgaatgccaaggaccgggagggggacacccccctgcatgatgctgtgcggctgaaccgctacaagatgatccggctgctgatcatgtacggggctgacctgaacatcaagaactgtgccggcaagacccccatggacctggtgctgcactggcagaatggcaccaaggccatctttgacagcctgcgggagaacagctacaagaccagccgcatcgccaccttctag

SEQ ID NO: 19830 - DNA, 1089 bp, synthetic construct
  source 1..1089: mol_type = other DNA; note = Synthetic coding sequence
atgagcggctaccagaggaggcctggggccacccccctgagccgggcccggagcctggccatcccagatgatgacagatttgaggacctggaggaggccaaccccttctccttccgggagttcctgaagaccaagaacctgggcctgagcaaggaggaccctgccagccgcatctatgccaaggaggccagccgccacagcctgggcctggaccacaacagcccccccagccagacaggaggctacggcctggagtaccagcagcccttctttgaggaccccactggagctggggacctgctggatgaggaggaggatgaggacaccggctggagcggggcctacctgcccagcgccatcgagcagacccaccctgagcgggtgcctgctggcaccagcccctgcagcacctacctgtccttcttcagcacccccagcgagctggccggccctgagagcctgcccagctgggccctgagtgacacagacagccgggtgtccccagccagccctgctggcagccccagcgctgactttgctgtgcacggggagagcctgggggacagacacctgcggaccctgcagatctcctatgatgccctgaaggatgagaacagcaagctgcggaggaagctgaatgaggtgcagagcttcagcgaggcccagacagagatggtgaggaccctggagaggaagctggaggccaagatgatcaaggaggagagtgactaccatgacctggagagcgtggtgcagcaggtggagcagaacctggagctgatgaccaagagagctgtgaaggcagaaaatcatgtggtgaagctgaagcaggagatcagcctgctgcaggcccaggtgagcaacttccagcgggagaatgaggccctgcgctgtggccagggcgccagcctgactgtggtgaagcagaatgctgatgtggccctgcagaacctgcgggtggtgatgaacagcgcccaggccagcatcaagcagctggtgtctggagctgagaccctgaacctggtggccgagatcctgaagagcattgaccgcatcagcgaggtgaaggatgaggaggaggacagctag

SEQ ID NO: 19831 - DNA, 5463 bp, synthetic construct
  source 1..5463: mol_type = other DNA; note = Synthetic coding sequence
atggagagcaacttcaaccaggagggcgtgccccggcccagctatgtgttttctgctgaccccatcgcccggcccagcgagatcaactttgatggcatcaagctggacctgagccatgagttcagcctggtggcccccaacacagaggccaacagctttgagagcaaggactacctgcaggtgtgcctgcgcatccggcccttcacccagagcgagaaggagctggagagcgagggctgtgtgcacatcctggacagccagacagtggtgctgaaggagccccagtgcatcctgggccgcctgtctgagaagagcagcggccagatggcccagaagttctccttcagcaaggtgtttggacctgccaccacccagaaggagttcttccagggctgcatcatgcagcctgtgaaggacctgctgaagggccagagccgcctcatcttcacctacggcctgaccaacagcggcaagacctacaccttccagggcacagaagaaaatattggcatcctgcccaggaccctgaatgtgctgtttgacagcctgcaggagcggctgtacaccaagatgaacctgaagccccacaggagccgggagtacctgcggctgagcagcgagcaggagaaggaggagatcgccagcaagagcgccctgctgcggcagatcaaggaggtgacagtgcacaatgacagtgatgacaccctgtatggcagcctgaccaacagcctgaacatcagcgagtttgaggagagcatcaaggactatgagcaggccaacctgaacatggccaacagcatcaagttctctgtgtgggtgtccttctttgagatctacaatgagtacatctatgacctgtttgtgcctgtgagcagcaagttccagaagaggaagatgctgcggctgagccaggatgtgaagggctacagcttcatcaaggacctgcagtggatccaggtgtctgacagcaaggaggcctaccgcctgctgaagctgggcatcaagcaccagagcgtggccttcaccaagctgaacaatgccagcagccgcagccacagcatcttcaccgtgaagatcctgcagattgaagattctgagatgagcagggtcatccgggtgtctgagctgagcctgtgtgacctggccggcagcgagaggaccatgaagacccagaatgaaggagagcggctgcgggagaccggcaacatcaacaccagcctgctgaccctgggcaagtgcatcaacgtgctgaagaacagcgagaagagcaagttccagcagcacgtgcccttccgggagagcaagctgacccactacttccagagcttcttcaacgggaagggcaagatctgcatgattgtgaacatcagccagtgctacctggcctatgatgagaccctgaatgtgctgaagttcagcgccatcgcccagaaggtgtgtgtgcctgacaccctgaacagcagccaggagaagctgtttggacctgtgaagagcagccaggatgtgtccctggacagcaacagcaacagcaagatcctgaatgtgaagagggccaccatctcctgggagaacagcctggaggacctgatggaggatgaggacctggtggaggagctggagaatgctgaggagacccagaatgtggagaccaagctgctggatgaggacctggacaagaccctggaggagaacaaggccttcatcagccatgaggagaagaggaagctgctggacctgattgaggacctgaagaagaagctgatcaatgagaagaaggagaagctgaccctggagttcaagatccgggaggaggtgacccaggagttcacccagtactgggcccagcgggaggccgacttcaaggagaccctgctgcaggagcgggagatcctggaggagaatgctgagcggcggctggccatcttcaaggacctggtgggcaaatgtgacacccgggaggaggccgccaaggacatctgtgccaccaaggtggagacagaggagacccacaactacgtgggctttgaggacatcatcgacagcctgcaggacaacgtggccgacatcaagaagcaggccgagatcgcccacctgtacatcgccagcctgcctgacccccaggaggccacagcctgcctggagctgaagttcaaccagatcaaggccgagctggccaagaccaagggggagctgatcaagaccaaggaggagctgaagaagcgggagaatgaaagtgacagcctcatccaggagctggagaccagcaacaagaagatcatcacccagaaccagaggatcaaggagctgatcaacatcatcgaccagaaggaggacaccatcaatgagttccagaacctgaagagccacatggagaacaccttcaagtgcaatgacaaggctgacaccagcagcctcatcatcaacaacaagctgatctgcaatgagaccgtggaggtgcccaaggacagcaagagcaagatctgcagcgagaggaagagggtgaatgaaaatgagctgcagcaggatgagcccccagccaagaagggcagcatccacgtgtcctctgccatcacagaggaccagaagaagtctgaggaggtgcggcccaacattgctgagattgaggacatccgggtgctgcaggagaacaatgaaggcctgcgggccttcctgctgaccattgaaaatgagctgaagaatgagaaggaggagaaggccgagctgaacaagcagatcgtgcacttccagcaggagctgagcctgtctgagaagaagaacctgaccctgagcaaggaggtgcagcagatccagagcaactatgacatcgccatcgccgagctgcacgtgcagaagagcaagaaccaggagcaggaggagaagatcatgaagctgagcaatgaaattgaaacagccaccaggagcatcaccaacaacgtgtcccagatcaagctgatgcacaccaagattgatgagctgcggaccctggacagcgtgtcccagatcagcaacatcgacctgctgaacctgcgggacctgagcaatggcagcgaggaggacaacctgcccaacacccagctggacctgctgggcaatgactacctggtgtccaagcaggtgaaggagtaccgcatccaggagcccaaccgggagaacagcttccacagcagcattgaggccatctgggaggagtgcaaggagatcgtgaaggccagcagcaagaagagccaccagatcgaggagctggagcagcagatcgagaagctgcaggccgaggtgaagggctacaaggatgagaacaaccggctgaaggagaaggagcacaagaaccaggatgacctgctgaaggagaaggagaccctcatccagcagctgaaggaggagctgcaggagaagaatgtgaccctggatgtgcagatccagcacgtggtggagggcaagagggccctgtctgagctgacccagggcgtgacctgctacaaggccaagatcaaggagctggagaccatcctggagacccagaaggtggagtgcagccacagcgccaagctggagcaggacatcctggagaaggagagcatcatcctgaagctggagaggaacctgaaggagttccaggagcacctgcaggacagcgtgaagaacaccaaggacctgaatgtgaaggagctgaagctgaaggaggagatcacccagctgaccaacaacctgcaggacatgaagcacctgctgcagctgaaggaggaggaggaggagaccaaccggcaggagacagagaagctgaaggaggagctgagcgccagcagcgcccggacccagaacctgaaggctgacctgcagaggaaggaggaggactatgctgacctgaaggagaagctgacagatgccaagaagcagatcaagcaggtgcagaaggaggtgtctgtgatgagagatgaggacaagctgctgcgcatcaagatcaatgagctggagaagaagaagaaccagtgcagccaggagctggacatgaagcagaggaccatccagcagctgaaggagcagctgaacaaccagaaggtggaggaggccatccagcagtatgaaagagcctgcaaggacctgaatgtgaaggagaagatcatcgaggacatgaggatgaccctggaggagcaggagcagacccaggtggagcaggaccaggtgctggaggccaagctggaggaggtggagcggctggccacagagctggagaagtggaaggagaagtgcaatgacctggagaccaagaacaaccagaggagcaacaaggagcacgagaacaacacagatgtgctgggcaagctgaccaacctgcaggatgagctgcaggagagcgagcagaagtacaatgctgacaggaagaagtggctggaggagaagatgatgctgatcacccaggccaaggaggccgagaacatccggaacaaggagatgaagaagtatgcagaagatcgggagcgcttcttcaagcagcagaatgagatggagatcctgacagcccagctgacagagaaggacagcgacctgcagaagtggagggaggagcgggaccagctggtggccgccctggagatccagctgaaggccctgatcagcagcaatgtgcagaaggacaatgaaattgagcagctgaagaggatcatcagcgagaccagcaagattgagacccagatcatggacatcaagcccaagaggatcagcagcgctgaccctgacaagctgcagacagagcccctgagcaccagctttgagatcagcaggaacaagattgaagatggctctgtggtgctggacagctgtgaggtgtccacagaaaatgaccagagcacccgcttccccaagccagagctggagatccagttcacccccctgcagcccaacaagatggctgtgaagcaccctggctgcaccacccctgtgacagtgaagatccccaaggccaggaagaggaagagcaatgagatggaggaggacctggtgaagtgtgagaacaagaagaatgccacccccaggaccaacctgaagttccccatcagtgatgacaggaacagctctgtgaagaaggagcagaaggtggccatccggcccagcagcaagaagacctacagcctgcggagccaggccagcatcattggagtgaacctggccaccaagaagaaggagggcaccctgcagaagtttggagacttcctgcagcacagccccagcatcctgcagagcaaggccaagaagatcatcgagaccatgagcagcagcaagctgagcaatgtggaggccagcaaagaaaatgtgtcccagcccaagagggccaagaggaagctgtacaccagcgagatcagcagccccatcgacatcagcggccaggtgatcctgatggaccagaagatgaaggagagtgaccaccagatcatcaagaggcggctgcggaccaagacagccaagtag

SEQ ID NO: 19832 - DNA, 1485 bp, synthetic construct
  source 1..1485: mol_type = other DNA; note = Synthetic coding sequence
atgaagctgggcaagaagcccatgtacaagcctgtggacccctacagcaggatgcagagcacctacaactacaacatgaggggcggggcctacccaccccgctacttctaccccttccctgtgccccccctgctgtaccaggtggagctgtctgtgggcggccagcagttcaacgggaagggcaagacccggcaggccgccaagcatgatgctgctgccaaggccctgcgcatcctgcagaatgagcccctgcctgagcggctggaggtgaatggccgggagagcgaggaggagaacctgaacaagtctgagatcagccaggtgtttgaaattgccctgaagaggaacctgcctgtgaactttgaggtggcccgggagagcggccccccccacatgaagaactttgtgaccaaggtgtctgtgggggagtttgtgggggagggggagggcaagagcaagaagatcagcaagaagaatgctgccatcgctgtgctggaggagctgaagaagctgccccccctgcctgctgtggagcgggtgaagccccgcatcaagaagaagaccaagcccatcgtgaagaccagcccagaatatggccagggcatcaaccccatcagccggctggcccagatccagcaggccaagaaggagaaggagcctgagtacaccctgctgacagagcggggcctgcccaggagaagagaatttgtgatgcaggtgaaggtgggcaaccacacagctgagggcaccggcaccaacaagaaggtggccaagagaaatgctgctgagaacatgctggagatcctgggcttcaaggtgccccaggcccagcccaccaagccagccctgaagtctgaggagaagacccccatcaagaagccaggagatggcaggaaggtgaccttctttgagcccggcagcggagatgaaaatggcaccagcaacaaggaggatgagttcaggatgccctacctgagccaccagcagctgcctgctggcatcctgcccatggtgcctgaggtggcccaggccgtgggcgtgtcccagggccaccacaccaaggacttcaccagggctgcccccaacccagccaaggccaccgtgacagccatgattgcccgggagctgctgtatggaggcaccagccccacagctgagaccatcctgaagaacaacatcagcagcggccacgtgccccacggccccctgacccggcccagcgagcagctggactacctgagccgggtgcagggcttccaggtggagtacaaggacttccccaagaacaacaagaatgaatttgtgtccctcatcaactgcagcagccagcccccactcatcagccatggaattggcaaggatgtggagagctgccacgacatggccgccctgaacatcctgaagctgctgtctgagctggaccagcagagcacagagatgcccaggactggaaatggccccatgtctgtgtgtggccgctgctag

SEQ ID NO: 19833 - DNA, 1509 bp, synthetic construct
  source 1..1509: mol_type = other DNA; note = Synthetic coding sequence
atgaagctgggcaagaagcccatgtacaagcctgtggacccctacagcaggatgcagagcacctacaactacaacatgaggggcggggcctacccaccccgctacttctaccccttccctgtgccccccctgctgtaccaggtggagctgtctgtgggcggccagcagttcaacgggaagggcaagacccggcaggccgccaagcatgatgctgctgccaaggccctgcgcatcctgcagaatgagcccctgcctgagcggctggaggtgaatggccgggagagcgaggaggagaacctgaacaagtctgagatcagccaggtgtttgaaattgccctgaagaggaacctgcctgtgaactttgagagcttccccctgaagcaggtggcccgggagagcggccccccccacatgaagaactttgtgaccaaggtgtctgtgggggagtttgtgggggagggggagggcaagagcaagaagatcagcaagaagaatgctgccatcgctgtgctggaggagctgaagaagctgccccccctgcctgctgtggagcgggtgaagccccgcatcaagaagaagaccaagcccatcgtgaagccccagaccagcccagaatatggccagggcatcaaccccatcagccggctggcccagatccagcaggccaagaaggagaaggagcctgagtacaccctgctgacagagcggggcctgcccaggagaagagaatttgtgatgcaggtgaaggtgggcaaccacacagctgagggcaccggcaccaacaagaaggtggccaagagaaatgctgctgagaacatgctggagatcctgggcttcaaggtgccccaggcccagcccaccaagccagccctgaagtctgaggagaagacccccatcaagaagccaggagatggcaggaaggtgaccttctttgagcccggcagcggagatgaaaatggcaccagcaacaaggaggatgagttcaggatgccctacctgagccaccagcagctgcctgctggcatcctgcccatggtgcctgaggtggcccaggccgtgggcgtgtcccagggccaccacaccaaggacttcaccagggctgcccccaacccagccaaggccaccgtgacagccatgattgcccgggagctgctgtatggaggcaccagccccacagctgagaccatcctgaagaacaacatcagcagcggccacgtgccccacggccccctgacccggcccagcgagcagctggactacctgagccgggtgcagggcttccaggtggagtacaaggacttccccaagaacaacaagaatgaatttgtgtccctcatcaactgcagcagccagcccccactcatcagccatggaattggcaaggatgtggagagctgccacgacatggccgccctgaacatcctgaagctgctgtctgagctggaccagcagagcacagagatgcccaggactggaaatggccccatgtctgtgtgtggccgctgctag

SEQ ID NO: 19834 - DNA, 1491 bp, synthetic construct; identical to SEQ ID NO: 19263
  source 1..1491: mol_type = other DNA; note = Synthetic coding sequence

SEQ ID NO: 19835 - DNA, 1473 bp, synthetic construct
  source 1..1473: mol_type = other DNA; note = Synthetic coding sequence
atgtctgaggtgaccaagaacagcctggagaagatcctgccccagctgaagtgccacttcacctggaacctcttcaaggaggacagcgtgtcccgggacctggaggacagagtgtgcaaccagatcgagttcctgaacacagagttcaaggccaccatgtacaacctgctggcctacatcaagcacctggatggcaacaatgaagctgccctggagtgcctgcggcaggccgaggagctgatccagcaggagcacgccgaccaggccgagatccgcagcctggtgacctggggcaactatgcctgggtgtactaccacctgggccgcctgagtgatgcccagatctacgtggacaaggtgaagcagacctgcaagaagttcagcaacccctacagcattgagtacagcgagctggactgtgaggagggctggacccagctgaagtgtggcagaaatgaaagagccaaggtgtgctttgagaaggccctggaggagaagcccaacaaccctgagttcagcagcggcctggccatcgccatgtaccacctggacaaccaccctgagaagcagttcagcacagatgtgctgaagcaggccatcgagctgagcccagacaaccagtatgtgaaggtgctgctgggcctgaagctgcagaagatgaacaaggaggccgagggggagcagtttgtggaggaggccctggagaagagcccctgccagacagatgtgctgcggtctgctgccaagttctacagaaggaagggggacctggacaaggccatcgagctgttccagagggtgctggagagcacccccaacaacggctacctgtaccaccagatcggctgctgctacaaggccaaggtgcggcagatgcagaacacaggagagagcgaggccagcggcaacaaggagatgattgaggccctgaagcagtatgccatggactacagcaacaaggccctggagaagggcctgaaccccctgaatgcctacagcgacctggccgagttcctggagacagagtgctaccagacccccttcaacaaggaggtgcctgatgctgagaagcagcagagccaccagcgctactgcaacctgcagaagtacaacgggaagtctgaggacacagctgtgcagcacggcctggagggcctgagcatcagcaagaagagcacagacaaggaggagatcaaggaccagccccagaatgtgtctgagaacctgctgccccagaatgcccccaactactggtacctgcagggcctcatccacaagcagaatggagacctgctgcaggccgccaagtgctatgagaaggagctgggccgcctgctgagagatgcccccagcggcatcggcagcatcttcctgagcgccagcgagctggaggatggcagcgaggagatgggccagggcgctgtgagcagcagcccccgggagctgctgagcaacagcgagcagctgaactag

SEQ ID NO: 19836 - DNA, 1473 bp, synthetic construct; identical to SEQ ID NO: 19835
  source 1..1473: mol_type = other DNA; note = Synthetic coding sequence

SEQ ID NO: 19837 - DNA, 1509 bp, synthetic construct; identical to SEQ ID NO: 19833
  source 1..1509: mol_type = other DNA; note = Synthetic coding sequence

SEQ ID NO: 19838 - DNA, 654 bp, synthetic construct
  source 1..654: mol_type = other DNA; note = Synthetic coding sequence
atggccgagggcagccagagcgcccctgaggccggaaatgacatgggaaatgatgatgccatcggcggcaatgtgtccaagtacatcgtgctgcccaccggctactgcggccagcccaagaagggccacctgatctttgatgcctgctttgagagcggcaacctgggccgggtggaccaggtgtctgaatttgaatatgacctcttcatccggccagacacctgcaacccccgcttccgggtgtggttcaacttcaccgtggagaatgtgaaggagagccagagggtcatcttcaacatcgtgaacttcagcaagaccaagagcctgtacagagatggcatggcccccatggtgaagagcaccagccggcccaagtggcagaggctgccccccaagaatgtgtactactaccgctgcccagaccacaggaagaactacgtgatgagctttgccttctgctttgaccgggaggaggacatctaccagtttgcctactgctacccctacacctacacccgcttccagcactacctggacagcctgcagaagaggaacatggactacttcttccgggagcagctgggccagagcgtgcagcagaggaagctggacctgctgaccatcaccagccctgctggccgctggagctggtag

SEQ ID NO: 19839 - DNA, 963 bp, synthetic construct
  source 1..963: mol_type = other DNA; note = Synthetic coding sequence
atggccgagggcagccagagcgcccctgaggccggaaatgacatgggaaatgatgatgccatcggcggcaatgtgtccaagtacatcgtgctgcccaccggctactgcggccagcccaagaagggccacctgatctttgatgcctgctttgagagcggcaacctgggccgggtggaccaggtgtctgaatttgaatatgacctcttcatccggccagacacctgcaacccccgcttccgggtgtggttcaacttcaccgtggagaatgtgaaggagagccagagggtcatcttcaacatcgtgaacttcagcaagaccaagagcctgtacagagatggcatggcccccatggtgaagagcaccagccggcccaagtggcagaggctgccccccaagaatgtgtactactaccgctgcccagaccacaggaagaactacgtgatgagctttgccttctgctttgaccgggaggaggacatctaccagtttgcctactgctacccctacacctacacccgcttccagcactacctggacagcctgcagaagaggaacatggactacttcttccgggagcagctgggccagagcgtgcagcagaggaagctggacctgctgaccatcaccagcccagacaacctgcgggagggcgctgagcagaaggtggtgttcatcaccggccgggtgcaccctggagagacccccagcagctttgtgtgccagggcatcatcgacttcctggtgtcccagcaccccatcgcctgtgtgctgcgggagtacctggtgttcaagatcgcccccatgctgaacccagatggagtgtacctgggcaactaccgctgcagcctgatgggctttgacctgaacagacactggctggaccccagcccctgggtgcaccccaccctgcacggcgtgaagcagctgattgtgcagatgtacaatgaccctgtgagcaactag

SEQ ID NO: 19840 - DNA, 1512 bp, synthetic construct
  source 1..1512: mol_type = other DNA; note = Synthetic coding sequence
atggccgagggcagccagagcgcccctgaggccggaaatgacatgggaaatgatgatgccatcggcggcaatgtgtccaagtacatcgtgctgcccaccggctactgcggccagcccaagaagggccacctgatctttgatgcctgctttgagagcggcaacctgggccgggtggaccaggtgtctgaatttgaatatgacctcttcatccggccagacacctgcaacccccgcttccgggtgtggttcaacttcaccgtggagaatgtgaaggagagccagagggtcatcttcaacatcgtgaacttcagcaagaccaagagcctgtacagagatggcatggcccccatggtgaagagcaccagccggcccaagtggcagaggctgccccccaagaatgtgtactactaccgctgcccagaccacaggaagaactacgtgatgagctttgccttctgctttgaccgggaggaggacatctaccagtttgcctactgctacccctacacctacacccgcttccagcactacctggacagcctgcagaagaggaacatggactacttcttccgggagcagctgggccagagcgtgcagcagaggaagctggacctgctgaccatcaccagcccagacaacctgcgggagggcgctgagcagaaggtggtgttcatcaccggccgggtgcaccctggagagacccccagcagctttgtgtgccagggcatcatcgacttcctggtgtcccagcaccccatcgcctgtgtgctgcgggagtacctggtgttcaagatcgcccccatgctgaacccagatggagtgtacctgggcaactaccgctgcagcctgatgggctttgacctgaacagacactggctggaccccagcccctgggtgcaccccaccctgcacggcgtgaagcagctgattgtgcagatgtacaatgaccccaagaccagcctggagttctacatcgacatccacgcccacagcaccatgatgaatggcttcatgtatggcaacatctttgaagatgaggagcgcttccagaggcaggccatcttccccaagctgctgtgccagaatgctgaggacttctcctacagcagcaccagcttcaacagagatgctgtgaaggccggcaccggccgccgcttcctgggcggcctgctggaccacaccagctactgctacaccctggaggtgtccttctacagctacatcatcagcggcaccacagctgctgtgccctacacagaggaggcctacatgaagctgggcagaaatgtggcccggaccttcctggactactaccgcctgaaccctgtggtggagaaggtggccatccccatgccccggctgaggaacaaggagattgaggtgcagaggaggaaggagaagagccccccctacaagcaccccctgctgcggggccctgccagcaactaccccaacagcaaaggagacaagaagagctctgtgaaccacaaggaccccagcacccccttctag

SEQ ID NO: 19841 - DNA, 1734 bp, synthetic construct
  source 1..1734: mol_type = other DNA; note = Synthetic coding sequence
atgagccaggtgcaggtgcaggtgcagaaccccagcgctgccctgagcggcagccagatcctgaacaagaaccagagcctgctgagccagcccctgatgagcatccccagcaccaccagcagcctgcccagtgaaaatgccggccggcccatccagaacagcgccctgcccagcgccagcatcaccagcaccagcgctgctgctgagagcatcacccccaccgtggagctgaatgccctgtgcatgaagctgggcaagaagcccatgtacaagcctgtggacccctacagcaggatgcagagcacctacaactacaacatgagaggaggagcctacccaccccgctacttctaccccttccctgtgccccccctgctgtaccaggtggagctgtctgtgggcggccagcagttcaacgggaagggcaagacccggcaggccgccaagcatgatgctgctgccaaggccctgcgcatcctgcagaatgagcccctgcctgagcggctggaggtgaatggccgggagagcgaggaggagaacctgaacaagtctgagatcagccaggtgtttgagatcgccctgaagaggaacctgcctgtgaactttgaggtggcccgggagagcggccccccccacatgaagaactttgtgaccaaggtgtctgtgggggagtttgtgggggagggggagggcaagagcaagaagatcagcaagaagaatgctgccatcgctgtgctggaggagctgaagaagctgccccccctgcctgctgtggagcgggtgaagccccgcatcaagaagaagaccaagcccatcgtgaagccccagaccagcccagaatatggccagggcatcaaccccatcagccggctggcccagatccagcaggccaagaaggagaaggagcctgagtacaccctgctgacagagcggggcctgccccggcggcgggagtttgtgatgcaggtgaaggtgggcaaccacacagctgagggcaccggcaccaacaagaaggtggccaagagaaatgctgctgagaacatgctggagatcctgggcttcaaggtgccccaggcccagcccaccaagccagccctgaagtctgaggagaagacccccatcaagaagccaggagatggcaggaaggtgaccttctttgagcccggcagcggagatgaaaatggcaccagcaacaaggaggatgagttcaggatgccctacctgagccaccagcagctgcctgctggcatcctgcccatggtgcctgaggtggcccaggccgtgggcgtgtcccagggccaccacaccaaggacttcacccgggccgcccccaacccagccaaggccaccgtgacagccatgattgcccgggagctgctgtatggaggcaccagccccacagctgagaccatcctgaagaacaacatcagcagcggccacgtgccccacggccccctgacccggcccagcgagcagctggactacctgagccgggtgcagggcttccaggtggagtacaaggacttccccaagaacaacaagaatgaatttgtgtccctcatcaactgcagcagccagcccccactcatcagccacggcatcggcaaggatgtggagagctgccacgacatggccgccctgaacatcctgaagctgctgtctgagctggaccagcagagcacagagatgcccaggactggaaatggccccatgtctgtgtgtggccgctgctag

SEQ ID NO: 19842 - DNA, 852 bp, synthetic construct
  source 1..852: mol_type = other DNA; note = Synthetic coding sequence
atgtctggagctgtgctgctggagcgggagcggctgaccagcggcaccacctggcacacagctggcctgctgtggcagctgcggcccagtgatgtggaggtggagctgctggcccacaccaggagagtggtgtcccgggagctggaggaggagaccggcctgcacacaggctggatccagaatggaggcctcttcatcgccagcaaccggcagaggctggatgagtacaagaggctgatgagcctgggcaaggcctacggcgtggagagccacgtgctgagccctgctgagaccaagaccctgtaccccctgatgaatgtggatgacctgtatggcaccctgtatgtgccccatgatggcaccatggaccctgctggcacctgcaccaccctggcccgggccgccagcgcccggggggcccaggtgattgagaactgccctgtgacaggcatccgggtgtggacagatgactttggagtgagaagagtggccggcgtggagacccagcacggcagcatccagaccccctgtgtggtgaactgtgccggcgtgtgggccagcgctgtgggccgcatggccggcgtgaaggtgcccctggtggccatgcaccacgcctacgtggtgacagagcgcatcgagggcatccagaacatgcccaacgtgcgggaccatgatgcctctgtgtacctgcggctgcagggagatgccctgtctgtgggcggctatgaggccaaccccatcttctgggaggaggccgtgaagtaccggcccagggctgctgggggcctgtgcctgaagaccagcacagagaaggtgtgtgctgtgtggagcgatgacctgcggcgggcctag

SEQ ID NO: 19843 - DNA, 1107 bp, synthetic construct
  source 1..1107: mol_type = other DNA; note = Synthetic coding sequence
atgagctactttgggaagttctacctggtgggcctggatgccaggaaggctgctgactggctgttcagcgcagatgtgtccaggcctcctggcagcacagtgtacacctgcatgctgaaccacagaggaggaacagaaagtgacctgactgtgtcccggctggcccccagccaccaggccagccccctggccccagcctttgaaggagatggctactacctggccatgggcggcgctgtggcccagcacaactggagccacatcaccaccgtgctgcaggaccagaagagccagtgccagctgattgacagcagcgaggacctgggcatgatcagcatccagggccctgccagccgggccatcctgcaggaggtgctggatgctgacctgagcaatgaggccttccccttcagcacccacaagctgctgcgggccgccggccacctggtgcgggccatgaggctgagctttgtgggggagctgggctgggagctgcacatccccaaggccagctgtgtgcctgtgtacagagctgtgatggccgccggggccaagcacggcctcatcaatgccggctaccgggccatcgacagcctgagcattgagaagggctaccgccactggcacgccgacctgcggccagatgacagccccctggaggccggcctggccttcacctgcaagctgaagagccctgtgcccttcctgggccgggaggccctggagcagcagagagctgctggcctgcggcggcggctggtgtgcttcaccatggaggagcccctgtggacccggccccaccctgctgtgtctggggccccagccttcagcacagccagcagcagcaaggtgcccatgtttggcctggaggccatctggagaaatggccaggtggtgggccacgtgagaagagctgactttggatttgccatcgacaagaccatcgcctacggctacatccatgaccccagcggcggccctgtgtccctggactttgtgaagagcggggactatgccctggagaggatgggcgtgacctatggagcccaggcccacctgaagagcccctttgaccccaacaacaagagggtgaagggcatctactag

SEQ ID NO: 19844 - DNA, 2757 bp, synthetic construct
  source 1..2757: mol_type = other DNA; note = Synthetic coding sequence
atggccagcctgagccgggccctgcgggtggccgccgcccacccccggcagagccccacccggggcatgggcccctgcaacctgagcagcgctgctggccccacagctgagaagtctgtgccctaccagaggaccctgaaggagggccagggcacctctgtggtggcccagggccccagccggcccctgcccagcacagccaacgtggtggtgattggaggcggcagcctgggctgccagaccctgtaccacctggccaagctgggcatgtctggagctgtgctgctggagcgggagcggctgaccagcggcaccacctggcacacagctggcctgctgtggcagctgcggcccagtgatgtggaggtggagctgctggcccacacccggcgggtggtgtcccgggagctggaggaggagaccggcctgcacacaggctggatccagaatggaggcctcttcatcgccagcaaccggcagaggctggatgagtacaagaggctgatgagcctgggcaaggcctatggagtggagagccacgtgctgagccctgctgagaccaagaccctgtaccccctgatgaatgtggatgacctgtatggcaccctgtatgtgccccatgatggcaccatggaccctgctggcacctgcaccaccctggcccgggccgccagcgcccggggggcccaggtgattgagaactgccctgtgacaggcatccgggtgtggacagatgactttggagtgcggcgggtggccggcgtggagacccagcacggcagcatccagaccccctgtgtggtgaactgtgccggcgtgtgggccagcgctgtgggccgcatggccggcgtgaaggtgcccctggtggccatgcaccacgcctacgtggtgacagaaagaattgagggcatccagaacatgcccaacgtgcgggaccatgatgcctctgtgtacctgcggctgcagggagatgccctgtctgtgggcggctatgaggccaaccccatcttctgggaggaggtgtctgacaagtttgccttcggcctgtttgacctggactgggaggtgttcacccagcacattgaaggagccatcaacagagtgcctgtgctggagaagacaggcatcaagagcacagtgtgtggccctgagagcttcaccccagaccacaagcccctgatgggagaggcccctgagctgcggggcttcttcctgggctgcggcttcaacagcgctggcatgatgctgggcggcggctgcggccaggagctggcccactggatcatccacggccggcctgagaaggacatgcacggctatgacatccgccgcttccaccacagcctgacagaccacccccgctggatccgggagaggagccatgagagctatgccaagaactacagcgtggtgttcccccatgatgagcccctggccggcaggaacatgaggcgggaccccctgcacgaggagctgctgggccagggctgtgtgttccaggagagacatggctgggagcggcccggctggttccacccccggggccctgcccctgtgctggagtatgactactatggagcctacggcagccgggcccacgaggactatgcctacagaaggctgctggctgatgagtacacctttgccttccccccccaccacgacaccatcaagaaggagtgcctggcctgcagaggagctgctgctgtgtttgacatgagctactttgggaagttctacctggtgggcctggatgccaggaaggctgctgactggctgttcagcgcagatgtgtccaggcctcctggcagcacagtgtacacctgcatgctgaaccacagaggaggaacagaaagtgacctgactgtgtcccggctggcccccagccaccaggccagccccctggccccagcctttgaaggagatggctactacctggccatgggcggcgctgtggcccagcacaactggagccacatcaccaccgtgctgcaggaccagaagagccagtgccagctgattgacagcagcgaggacctgggcatgatcagcatccagggccctgccagccgggccatcctgcaggaggtgctggatgctgacctgagcaatgaggccttccccttcagcacccacaagctgctgcgggccgccggccacctggtgcgggccatgaggctgagctttgtgggggagctgggctgggagctgcacatccccaaggccagctgtgtgcctgtgtacagagctgtgatggccgccggggccaagcacggcctcatcaatgccggctaccgggccatcgacagcctgagcattgagaagggctaccgccactggcacgccgacctgcggccagatgacagccccctggaggccggcctggccttcacctgcaagctgaagagccctgtgcccttcctgggccgggaggccctggagcagcagagagctgctggcctgcggcggcggctggtgtgcttcaccatggaggacaaggtgcccatgtttggcctggaggccatctggagaaatggccaggtggtgggccacgtgagaagagctgactttggatttgccatcgacaagaccatcgcctacggctacatccatgaccccagcggcggccctgtgtccctggactttgtgaagagcggggactatgccctggagaggatgggcgtgacctatggagcccaggcccacctgaagagcccctttgaccccaacaacaagagggtgaagggcatctactag

SEQ ID NO: 19845 - DNA, 720 bp, synthetic construct
  source 1..720: mol_type = other DNA; note = Synthetic coding sequence
atggagggcaccgtggagagccagaccccagacctgagagatgtggagggcaaggtgggcaggaagaccccagagggcctgctgcggggcctgcggggggagtgtgagctgggcaccagcggggccctgctgctgcccggggccagcagcactggacatgacctgggggacaagatcatggccctgaagatggagctggcctacctgcgggccattgatgtgaagatcctgcagcagctggtgaccctgaatgaaggaattgaagctgtgcgctggctgctggaggagcggggcaccctgaccagccactgcagcagcctgaccagcagccagtacagcctgactggaggcagccctggccgcagcagaagaggctcctgggacagcctgcctgacaccagcaccacagaccggctggacagcgtgtccatcggcagcttcctggacacagtggcccccagcgagctggatgagcagggccccccaggggcccccaggtctgagatggactgggccaaggtgattgctggaggagagcgggccaggacagaggtggatgtggccgccacccggctgggcagcctgcgggctgtgtggaagcccccaggagagcggctgcagggcggccccccagagagcccagaagatgagagcgccaagctgggctttgaggcccactggttctgggagcagtgccaggatgatgtgaccttcctgtag

SEQ ID NO: 19846 - DNA, 294 bp, synthetic construct
  source 1..294: mol_type = other DNA; note = Synthetic coding sequence
atgagcagtggaaatgccaagattggccacccagcccccaacttcaaggccacagcagatgagggcatctccttccggggcctcttcatcattgatgacaagggcatcctgcggcagatcaccgtgaatgacctgcctgtgggccgctctgtggatgagaccctgcggctggtgcaggccttccagttcacagacaagcatggagaggtgtgcccagctggctggaagccaggcagtgacaccatcaagccagatgtgcagaagagcaaggagtacttcagcaagcagaagtag

SEQ ID NO: 19847 - DNA, 1668 bp, synthetic construct
  source 1..1668: mol_type = other DNA; note = Synthetic coding sequence
atggacaggagcaagaggaacagcattgctggcttccccccccgggtggagcggctggaggagtttgagggcggcggcggcggggagggcaatgtgtcccaggtgggccgggtgtggcccagcagctaccgggccctgatcagcgccttcagccggctgacccggctggatgacttcacctgtgagaagattggcagcggcttcttcagcgaggtgttcaaggtgcgccaccgggccagcggccaggtgatggccctgaagatgaacaccctgagcagcaacagagccaacatgctgaaggaggtgcagctgatgaaccggctgagccaccccaacatcctgcgctacatcaacagcggcaacctggagcagctgctggacagcaacctgcacctgccctggacagtgcgggtgaagctggcctatgacattgctgtgggcctgagctacctgcacttcaagggcatcttccaccgggacctgaccagcaagaactgcctgatcaagagagatgaaaatggctacagcgctgtggtggccgactttggcctggccgagaagatcccagatgtgtccatgggcagcgagaagctggccgtggtgggcagccccttctggatggcccctgaggtgctgagagatgagccctacaatgagaaggcagatgtgttctcctatggcatcatcctgtgtgagatcatcgcccgcatccaggccgaccctgactacctgcccaggacagagaactttggcctggactatgatgccttccagcacatggtgggggactgccccccagacttcctgcagctgaccttcaactgctgcaacatggaccccaagctgcggcccagctttgtggagatcggcaagaccctggaggagatcctgagccggctgcaggaggaggagcaggagcgggacaggaagctgcagcccacagcccggggcctgctggagaaggcccctggggtgaagaggctgagcagcctggatgacaagatcccccacaagagcccctgccccaggaggaccatctggctgagccgcagccagagcgacatcttcagcaggaagccacccaggacagtgtctgtgctggacccctactaccggcccagagatggagctgcccggacccccaaggtgaaccccttcagcgcccggcaggacctgatgggcggcaagatcaagttctttgacctgcccagcaagagcgtcatcagcctggtgtttgacctggatgcccctggccctggcaccatgcccctggccgactggcaggagcccctggccccacccatccgccgctggaggagcctgcccggcagccctgagttcctgcaccaggaggcctgcccctttgtgggccgggaggagagcctgagtgatggccccccaccccggctgagcagcctgaagtacagagtgaaggagatcccccccttccgggccagcgccctgcctgctgcccaggcccacgaggccatggactgcagcatcctgcaggaggagaatggcttcggcagccggccccagggcaccagcccctgcccagctggggccagcgaggagatggaggtggaggagaggcctgctggcagcaccccagccaccttcagcaccagcggcatcggcctgcagacccagggcaagcaggacggctag

SEQ ID NO: 19848 - DNA, 1629 bp, synthetic construct; identical to SEQ ID NO: 19274
  source 1..1629: mol_type = other DNA; note = Synthetic coding sequence

SEQ ID NO: 19849 - DNA, 1716 bp, synthetic construct
  source 1..1716: mol_type = other DNA; note = Synthetic coding sequence
atggacaggagcaagaggaacagcattgctggcttccccccccgggtggagcggctggaggagtttgagggcggcggcggcggggagggcaatgtgtcccaggtgggccgggtgtggcccagcagctaccgggccctgatcagcgccttcagccggctgacccggctggatgacttcacctgtgagaagattggcagcggcttcttcagcgaggtgttcaaggtgcgccaccgggccagcggccaggtgatggccctgaagatgaacaccctgagcagcaacagagccaacatgctgaaggaggtgcagctgatgaaccggctgagccaccccaacatcctgcgcttcatgggcgtgtgtgtgcaccagggccagctgcacgccctgacagagtacatcaacagcggcaacctggagcagctgctggacagcaacctgcacctgccctggacagtgcgggtgaagctggcctatgacattgctgtgggcctgagctacctgcacttcaagggcatcttccaccgggacctgaccagcaagaactgcctgatcaagagagatgaaaatggctacagcgctgtggtggccgactttggcctggccgagaagatcccagatgtgtccatgggcagcgagaagctggccgtggtgggcagccccttctggatggcccctgaggtgctgagagatgagccctacaatgagaaggcagatgtgttctcctatggcatcatcctgtgtgagatcatcgcccgcatccaggccgaccctgactacctgcccaggacagagaactttggcctggactatgatgccttccagcacatggtgggggactgccccccagacttcctgcagctgaccttcaactgctgcaacatggaccccaagctgcggcccagctttgtggagatcggcaagaccctggaggagatcctgagccggctgcaggaggaggagcaggagcgggacaggaagctgcagcccacagcccggggcctgctggagaaggcccctggggtgaagaggctgagcagcctggatgacaagatcccccacaagagcccctgccccaggaggaccatctggctgagccgcagccagagcgacatcttcagcaggaagccacccaggacagtgtctgtgctggacccctactaccggcccagagatggagctgcccggacccccaaggtgaaccccttcagcgcccggcaggacctgatgggcggcaagatcaagttctttgacctgcccagcaagagcgtcatcagcctggtgtttgacctggatgcccctggccctggcaccatgcccctggccgactggcaggagcccctggccccacccatccgccgctggaggagcctgcccggcagccctgagttcctgcaccaggaggcctgcccctttgtgggccgggaggagagcctgagtgatggccccccaccccggctgagcagcctgaagtacagagtgaaggagatcccccccttccgggccagcgccctgcctgctgcccaggcccacgaggccatggactgcagcatcctgcaggaggagaatggcttcggcagccggccccagggcaccagcccctgcccagctggggccagcgaggagatggaggtggaggagaggcctgctggcagcaccccagccaccttcagcaccagcggcatcggcctgcagacccagggcaagcaggacggctag

SEQ ID NO: 19850 - DNA, 1416 bp, synthetic construct
  source 1..1416: mol_type = other DNA; note = Synthetic coding sequence
atgctgggctcctggggctgctaccgctatgccaagctgttcagctgcagcctgagcacccacgcccgcttcatcaagatcctggacagcgtgctgcaccacctggtgcctgcctgggaccacaccctgggcaccttcagcgagatcaagcaggtgaagcagttcctgctgctgagccggcagaggcctggcctggtggcccagtgcctgcgggacagcgagagcagcaagcccagcttcatgccccggctgtacatcaacagaaggctggccatggagcaccgggcctgccccagccgggaccctgcctgcaagaatgctgtgttcacccaggtgtatgagggcctgaagcccagcgacaagtatgagaagcccctggactaccgctggcccatgagatatgaccagtggtgggagtgcaagttcatcgccgagggcatcatcgaccagggcggcggcttccgggacagcctggccgacatgtctgaggagctgtgccccagcagcgctgacacccctgtgcccctgcccttctttgtgaggacagccaaccagggcaatggaactggagaggcccgggacatgtatgtgcccaaccccagctgccgggactttgccaagtatgagtggattggccagctgatgggcgccgccctgcggggcaaggagttcctggtgctggccctgcccggctttgtgtggaagcagctgagcggggaggaggtgtcctggagcaaggacttccctgctgtggacagcgtgctggtgaagctgctggaggtgatggagggcatggacaaggagacctttgagttcaagtttgggaaggagctgaccttcaccaccgtgctgagtgaccagcaggtggtggagctgatccctgggggcgccggcatcgtggtgggctatggagacaggagccgcttcatccagctggtgcagaaggcccggctggaggagagcaaggagcaggtggccgccatgcaggccggcctgctgaaggtggtgccccaggccgtgctggacctgctgacctggcaggagctggagaagaaggtgtgtggggaccctgaggtgacagtggatgccctgaggaagctgaccaggtttgaagattttgagcccagcgacagccgggtgcagtacttctgggaggccctgaacaacttcaccaatgaagatagaagccgcttcctgcgctttgtgacaggccgcagccggctgcctgcccgcatctacatctacccagacaagctgggctatgagaccacagatgccctgcctgagagcagcacctgcagcagcaccctcttcctgccccactacgccagcgccaaggtgtgtgaggagaagctgcgctatgctgcctacaactgtgtggccatcgacacagacatgagcccctgggaggagtag

SEQ ID NO: 19851 - DNA, 825 bp, synthetic construct
  source 1..825: mol_type = other DNA; note = Synthetic coding sequence
atggccgcccctgaggccgaggtgctgagcagcgctgctgtgcctgacctggagtggtatgagaagtctgaggagacccacgccagccagatcgagctgctggagaccagcagcacccaggagcccctgaatgccagcgaggccttctgcccccgggactgcatggtgcctgtggtgtttcctggccctgtgtcccaggagggctgctgccagttcacctgtgagctgctgaagcacatcatgtaccagaggcagcagctgcccctgccctatgagcagctgaagcacttctacaggaagcccagcccccaggccgaggagatgctgaagaagaagccccgggccaccacagaggtgagcagcaggaagtgccagcaggccctggccgagctggagagcgtgctgagccacctggaggacttctttgcccggaccctggtgccccgggtgctgatcctgctgggcggcaatgccctgagccccaaggagttctatgagctggacctgagcctgctggccccctacagcgtggaccagagcctgagcacagctgcctgcctgcggcggctcttccgggccatcttcatggctgatgccttcagcgagctgcaggccccacccctgatgggcaccgtggtgatggcccagggccacaggaactgtggggaggactggttccggcccaagctgaactacagagtgcccagccggggccacaagctgactgtgaccctgagctgtggccggcccagcatccgcaccacagcctgggaggactacatctggttccaggcccctgtgaccttcaagggcttccgggagtag

SEQ ID NO: 19852 - DNA, 2586 bp, synthetic construct
  source 1..2586: mol_type = other DNA; note = Synthetic coding sequence
atggccggccctggccctggagctgtgctggagagcccccggcagctgctgggccgggtgcgcttcctggccgaggccgcccggagcctgcgggccggccggcccctgcctgctgccctggcctttgtgccccgggaggtgctgtacaagctgtacaaggaccctgctggccccagccgggtgctgctgcctgtgtgggaggccgagggcctgggcctgcgggtgggcgccgccggccctgcccctggcaccggcagcggccccctgcgggccgcccgggacagcattgagctgcggcggggggcctgtgtgaggaccactggagaggagctgtgcaatggacatggcctgtgggtgaagctgaccaaggagcagctggccgagcacctgggggactgtggcctgcaggagggctggctgctggtgtgcaggcctgctgagggcggggcccggctggtgcccatcgacacccccaaccacctgcagaggcagcagcagctgtttggagtggactacagacctgtgctgcgctgggagcaggtggtggacctgacctacagccaccggctgggcagccggccccagcctgctgaggcctatgcagaggccgtgcagaggctgctgtatgtgccccccacctggacctatgaatgtgatgaggacctgatccacttcctgtatgaccacctgggcaaggaggatgagaacctgggctctgtgaagcagtatgtggagagcattgatgtgtcctcctacacagaggagttcaacgtgtcctgcctgacagacagcaatgctgacacctactgggagagtgatggcagccagtgccagcactgggtgcggctgaccatgaagaagggcaccatcgtgaagaagctgctgctgactgtggacaccacagatgacaacttcatgcccaagagggtggtggtgtatggaggagagggggacaacctgaagaagctgagtgatgtgtccattgatgagaccctgattggagatgtgtgtgtgctggaggacatgacagtgcacctgcccatcatcgagatcagaattgtggagtgcagagatgatggcattgatgtgcggctgcggggcgtgaagatcaagagcagccggcagcgggagctgggcctgaatgctgacctcttccagcccaccagcctggtgcgctacccccggctggagggcacagatcctgaggtgctgtaccgccgggctgtgctgctgcagcgcttcatcaagatcctggacagcgtgctgcaccacctggtgcctgcctgggaccacaccctgggcaccttcagcgagatcaagcaggtgaagcagttcctgctgctgagccggcagaggcctggcctggtggcccagtgcctgcgggacagcgagagcagcaagcccagcttcatgccccggctgtacatcaacagaaggctggccatggagcaccgggcctgccccagccgggaccctgcctgcaagaatgctgtgttcacccaggtgtatgagggcctgaagcccagcgacaagtatgagaagcccctggactaccgctggcccatgagatatgaccagtggtgggagtgcaagttcatcgccgagggcatcatcgaccagggcggcggcttccgggacagcctggccgacatgtctgaggagctgtgccccagcagcgctgacacccctgtgcccctgcccttctttgtgaggacagccaaccagggcaatggaactggagaggcccgggacatgtatgtgcccaaccccagctgccgggactttgccaagtatgagtggattggccagctgatgggcgccgccctgcggggcaaggagttcctggtgctggccctgcccggctttgtgtggaagcagctgagcggggaggaggtgtcctggagcaaggacttccctgctgtggacagcgtgctggtgaagctgctggaggtgatggagggcatggacaaggagacctttgagttcaagtttgggaaggagctgaccttcaccaccgtgctgagtgaccagcaggtggtggagctgatccctgggggcgccggcatcgtggtgggctatggagacaggagccgcttcatccagctggtgcagaaggcccggctggaggagagcaaggagcaggtggccgccatgcaggccggcctgctgaaggtggtgccccaggccgtgctggacctgctgacctggcaggagctggagaagaaggtgtgtggggaccctgaggtgacagtggatgccctgaggaagctgaccaggtttgaagattttgagcccagcgacagccgggtgcagtacttctgggaggccctgaacaacttcaccaatgaagatagaagccgcttcctgcgctttgtgacaggccgcagccggctgcctgcccgcatctacatctacccagacaagctgggctatgagaccacagatgccctgcctgagagcagcacctgcagcagcaccctcttcctgccccactacgccagcgccaaggtgtgtgaggagaagctgcgctatgctgcctacaactgtgtggccatcgacacagacatgagcccctgggaggagtag

SEQ ID NO: 19853 - DNA, 1197 bp, synthetic construct
  source 1..1197: mol_type = other DNA; note = Synthetic coding sequence
atggagagcgtgctgagcaaatatgaggaccagatcaccatcttcacagactacctggaggagtacccagacacagatgagctggtgtggatcctgggcaagcagcacctgctgaagacagagaagagcaagctgctgagtgacatcagcgcccggctgtggttcacctacagaaggaagttcagccccatcggcggcaccggccccagcagtgatgctggctggggctgcatgctgcgctgtggccagatgatgctggcccaggccctgatctgccgccacctgggccgggactggagctgggagaagcagaaggagcagcccaaggagtaccagaggatcctgcagtgcttcctggacaggaaggactgctgctacagcatccaccagatggcccagatgggcgtgggggagggcaagagcatcggggagtggtttggccccaacacagtggcccaggtgctgaagaagctggccctgtttgatgagtggaacagcctggccgtgtatgtgtccatggacaacacagtggtgattgaggacatcaagaagatgtgccgggtgctgcccctgtctgctgacacagctggggaccggcccccagacagcctgacagccagcaaccagagcaagggcaccagcgcctactgcagcgcctggaagcccctgctgctgattgtgcccctgcggctgggcatcaaccagatcaaccctgtgtatgtggatgccttcaaggagtgcttcaagatgccccagagcctgggcgccctgggcggcaagcccaacaatgcctactacttcatcggcttcctgggagatgagctgatcttcctggacccccacaccacccagacctttgtggacacagaagaaaatggcaccgtgaatgaccagaccttccactgcctgcagagcccccagaggatgaacatcctgaacctggaccccagcgtggccctgggcttcttctgcaaggaggagaaggactttgacaactggtgcagcctggtgcagaaggagatcctgaaggagaacctgaggatgtttgagctggtgcagaagcaccccagccactggcccccatttgtgcccccagccaagccagaggtgaccaccactggagctgagttcatcgacagcacagagcagctggaggagtttgacctggaggaggactttgagatcctgtctgtgtag

SEQ ID NO: 19854 - DNA, 1701 bp, synthetic construct; identical to SEQ ID NO: 19423
  source 1..1701: mol_type = other DNA; note = Synthetic coding sequence

SEQ ID NO: 19855 - DNA, 930 bp, synthetic construct
  source 1..930: mol_type = other DNA; note = Synthetic coding sequence
atgccccgggcccggagcggccgccgcagcagaggagctgggggccgggaggagaccttcctgcgggtgcgggccaaccggcagacccggctgaatgccagaattggcaagatgaagaggaggaagcaggatgagggccaggtgtgccccctgtgcaaccggcccctggccggcagcgagcaggagatgagccgccacgtggagcactgcctgagcaagcgggagggcagctgcatggctgaagatgatgctgtggacattgaacatgagaacaacaacagatttgaggagtatgagtggtgtggccagaagaggatccgggccaccaccctgctggagggcggcttccggggcagcggcttcatcatgtgcagcggcaaggagaacccagacagtgatgctgacctggatgtggatggagatgacaccctggagtatggcaagccccagtacacagaagcagatgtgatcccctgcaccggggaggagcccggggaggccaaggagcgggaggccctgcggggagctgtgctgaatggaggcccccccagcacccgcatcaccccagagttcagcaagtgggccagtgatgctgagatgcccagcaccagcaatggagagagcagcaagcaggaggccatgcagaagacctgcaagaacagcgacatcgagaagatcacagaggacagcgctgtgaccacctttgaggccctgaaggcccgggtgcgggagctggagcggcagctgagcagaggagaccgctacaagtgcctgatctgcatggacagctacagcatgcccctgaccagcatccagtgctggcacgtgcactgtgaggagtgctggctgcggaccctgggcgccaagaagctgtgcccccagtgcaacaccatcacagcccctggggacctgcggcgcatctacctgtag

SEQ ID NO: 19856 - DNA, 1125 bp, synthetic construct
  source 1..1125: mol_type = other DNA; note = Synthetic coding sequence
atggagagcgtgctgagcaaatatgaggaccagatcaccatcttcacagactacctggaggagtacccagacacagatgagctggtgtggatcctgggcaagcagcacctgctgaagacaggaggcaccggccccagcagtgatgctggctggggctgcatgctgcgctgtggccagatgatgctggcccaggccctgatctgccgccacctgggccgggactggagctgggagaagcagaaggagcagcccaaggagtaccagaggatcctgcagtgcttcctggacaggaaggactgctgctacagcatccaccagatggcccagatgggcgtgggggagggcaagagcatcggggagtggtttggccccaacacagtggcccaggtgctgaagaagctggccctgtttgatgagtggaacagcctggccgtgtatgtgtccatggacaacacagtggtgattgaggacatcaagaagatgtgccgggtgctgcccctgtctgctgacacagctggggaccggcccccagacagcctgacagccagcaaccagagcaagggcaccagcgcctactgcagcgcctggaagcccctgctgctgattgtgcccctgcggctgggcatcaaccagatcaaccctgtgtatgtggatgccttcaaggagtgcttcaagatgccccagagcctgggcgccctgggcggcaagcccaacaatgcctactacttcatcggcttcctgggagatgagctgatcttcctggacccccacaccacccagacctttgtggacacagaagaaaatggcaccgtgaatgaccagaccttccactgcctgcagagcccccagaggatgaacatcctgaacctggaccccagcgtggccctgggcttcttctgcaaggaggagaaggactttgacaactggtgcagcctggtgcagaaggagatcctgaaggagaacctgaggatgtttgagctggtgcagaagcaccccagccactggcccccatttgtgcccccagccaagccagaggtgaccaccactggagctgagttcatcgacagcacagagcagctggaggagtttgacctggaggaggactttgagatcctgtctgtgtag

SEQ ID NO: 19857 - DNA, 558 bp, synthetic construct
  source 1..558: mol_type = other DNA; note = Synthetic coding sequence
atggagggctgtgtgagcaacctgatggtgtgcaacctggcctacagcggcaagctggaggagctgaaggagagcatcctggccgacaagagcctggccaccaggacagaccaggacagcaggacagccctgcactgggcctgcagcgctggccacacagaaattgtggagttcctgctgcagctgggcgtgcctgtgaatgacaaggatgatgctgccagcaagaacagacatgaaattgctgtgatgctgctggagggcggggccaacccagatgccaaggaccactatgaggccacagccatgcacagagctgctgccaagggcaacctgaagatgatccacatcctgctgtactacaaggccagcaccaacatccaggacacagagggcaacacccccctgcacctggcctgtgatgaggagcgggtggaggaggccaagctgctggtgtcccagggcgccagcatctacatcgagaacaaggaggagaagacccccctgcaggtggccaagggcggcctgggcctcatcctgaagaggatggtggagggctag

SEQ ID NO: 19858 - DNA, 333 bp, synthetic construct
  source 1..333: mol_type = other DNA; note = Synthetic coding sequence
atggagggctgtgtgagcaacctgatggtgtgcaacctggcctacagcggcaagctggaggagctgaaggagagcatcctggccgacaagagcctggccaccaggacagaccaggacagcaggacagccctgcactgggcctgcagcgctggccacacagaaattgtggagttcctgctgcagctgggcgtgcctgtgaatgacaaggatgatgctgccagcaagaacagacatgaaattgctgtgatgctgctggagggcggggccaacccagatgccaaggaccactatgaggccacagccatgcacagagctgctgccaaggacacctag

SEQ ID NO: 19859 - DNA, 546 bp, synthetic construct
  source 1..546: mol_type = other DNA; note = Synthetic coding sequence
atggtgctgggcgccggctggggctgggcctaccagctgcacctgctgcaggccctgaagaggaagccagacctcttcctgtgtgagcggctggatgtgaaggctgtgttccagtgtgctgtgctggccctgaagtttcctgaggcccccaccgtgaaggccagctgtggcttcttcacagagctgctgccccgctgtggggaggtggagagcgtgggcaaggtggtgcaggaggatggccgcatgctgctgattgctgtgctggaggccatcggcggccaggccagccgcagcctgatggactgctttgctgacatcctgtttgccctgaacaagcactgcttcagcctgctgtccatgtggatcaaggaggccctgcagcccccaggcttccccagcgcccggctgagccctgagcagaaggacaccttcagccagcagatcctgcgggagcgggtgaacaagagaagagtgaaggagatggtgaaggagttcaccctgctgtgccggggcctgcatggaacagactacacagctgactactag

SEQ ID NO: 19860 - DNA, 2892 bp, synthetic construct
  source 1..2892: mol_type = other DNA; note = Synthetic coding sequence
atggagcggcgggaggagcagcccggggctgctggagctggagctgccccagccctggacttcaccgtggagaatgtggagaaggccctgcaccagctgtactatgaccccaacatcgagaacaagaacctggcccagaagtggctgatgcaggcccaggtgagcccccaggcctggcacttctcctggcagctgctgcagcctgacaaggtgcctgagatccagtactttggagccagcgccctgcacatcaagatcagccgctactggagcgacatccccacagaccagtatgagagcctgaaggcccagctgttcacccagatcaccaggtttgccagcggcagcaagatcgtgctgacccggctgtgtgtggccctggccagcctggccctgtccatgatgccagatgcctggccctgtgctgtggccgacatggtgcggctcttccaggccgaggacagccctgtggatggccagggccgctgcctggccctgctggagctgctgactgtgctgcctgaggagttccagaccagccggctgccccagtacaggaagggcctggtgaggaccagcctggccgtggagtgtggggctgtgttccccctgctggagcagctgctgcagcagcccagcagccccagctgtgtgcggcagaaggtgctgaagtgcttcagctcctgggtgcagctggaggtgcccctgcaggactgtgaggccctgatccaggccgcctttgctgccctgcaggacagcgagctgtttgacagctctgtggaggccatcgtgaatgccatcagccagccagatgcccagagatatgtgaacaccctgctgaagctgatccccctggtgctgggcctgcaggagcagctgcggcaggccgtgcagaatggagacatggagaccagccacggcatctgcagaattgctgtggccctgggggagaaccacagccgggccctgctggaccaggtggagcactggcagagcttcctggccctggtgaacatgatcatgttctgcaccggcatccctggccactaccctgtgaatgagaccaccagcagcctgaccctgaccttctggtacaccctgcaggatgacatcctgagctttgaggccgagaagcaggccgtgtaccagcaggtgtacagacctgtgtacttccagctggtggatgtgctgctgcacaaggcccagttccccagtgatgaggagtatggcttctggagcagtgatgagaaggagcagttccgcatctacagagtggacatcagtgacaccctgatgtatgtgtatgagatgctgggcgctgagctgctgagcaacctgtatgacaagctgggccgcctgctgaccagcagcgaggagccctacagctggcagcacacagaggccctgctgtatggcttccagagcattgctgagaccattgatgtgaactacagtgatgtggtgcccggcctcatcggcctcatcccccgcatcagcatcagcaatgtgcagctggccgacacagtgatgttcaccatcggggccctgtctgagtggctggccgaccaccctgtgatgatcaacagcgtgctgcccctggtgctgcacgccctgggcaaccctgagctgtctgtgtcctctgtgtccaccctgaagaagatctgccgggagtgcaagtatgacctgcccccctatgctgccaacatcgtggccgtgtcccaggatgtgctgatgaagcagatccacaagaccagccagtgcatgtggctgatgcaggccctgggcttcctgctgagcgccctgcaggtggaggagatcctgaagaacctgcacagcctcatcagcccctacatccagcagctggagaagctggccgaggagatccccaaccccagcaacaagctggccatcgtgcacatcctgggcctgctgagcaacctcttcaccaccctggacatcagccaccatgaagatgaccacgagggccctgagctgaggaagctgcctgtgccccagggccccaaccctgtggtggtggtgctgcagcaggtgttccagctgatccagaaggtgctgagcaagtggctgaatgatgcccaggtggtggaggccgtgtgtgccatctttgagaagtctgtgaagaccctgctggatgactttgcccccatggtgccccagctgtgtgagatgctgggccgcatgtacagcaccatcccccaggccagcgccctggacctgacccggcagctggtgcacatctttgcccacgagcccgcccacttcccccccatcgaggccctcttcctgctggtgacctctgtgaccctgaccctcttccagcagggcccccgggaccacccagacatcgtggacagcttcatgcagctgctggcccaggccctgaagaggaagccagacctcttcctgtgtgagcggctggatgtgaaggctgtgttccagtgtgctgtgctggccctgaagtttcctgaggcccccaccgtgaaggccagctgtggcttcttcacagagctgctgccccgctgtggggaggtggagagcgtgggcaaggtggtgcaggaggatggccgcatgctgctgattgctgtgctggaggccatcggcggccaggccagccgcagcctgatggactgctttgctgacatcctgtttgccctgaacaagcactgcttcagcctgctgtccatgtggatcaaggaggccctgcagcccccaggcttccccagcgcccggctgagccctgagcagaaggacaccttcagccagcagatcctgcgggagcgggtgaacaagagaagagtgaaggagatggtgaaggagttcaccctgctgtgccggggcctgcatggaacagactacacagctgactactag

SEQ ID NO: 19861 - DNA, 2907 bp, synthetic construct
  source 1..2907: mol_type = other DNA; note = Synthetic coding sequence
atgaggctgctgcggcacacagaaagtgagcagtggttccaccgcttccccctgtgccccagcctgaccttctgggcccctgtggccatgtggccccagacccactgtgtgggcggccgcagcagcggcctgaccaagtggacctacagcttcagcgccagcctgcaggacggcagcttcccctatgacagcgtgccctggcagcagaacaccaaccagcccccaggcagcctgtctgtggtgaccaccgtgtggggcgtgaccaacaccagccagagccaggctgatgtgctgatcccccacgccacctgccggcccggccccctgctgatcacagcctgggagccctacggccagtgccagcagccccatgagagccggcggcagccccatggagtgggccatgaccaccagcagccccggccccagctgcccaccgtgtgtggggctgctgctgctgtgctgagccagggctggcccaggtctgccctgcaccctgctgagcacgtgtggccagcccagctgccccggcagaggggcctgtggggccagcctgctgctgctgctgctgctgctgctgtggccgctgctgctgccacagccacagccacagccacagccaccgtggccgccctgcaggagacccagaacaaggacatcaaccagtatggccctgcccctgtgctgctgcctgacctgctgaaggatggcctgggagatgaggagcggggggcccccatcggcatgcagaacagcatgaacccagcctccatggccgccggcatgaccccatctggcatgagcggcccccccatgggcatgaaccagcccaggcctcctggcatcagccccttcggcacccacggccagaggatgccccagcagacctacccaggcccccggccccagagcctgcccatccagaacatcaagaggccctacccaggagagcccaactacggcaaccagcagtatggccccaacagccagttccccacccagcccggccagtacccagcccccaaccccccccggcccctgaccagccccaactacccaggccagaggatgcccagccagcccagcagcggccagtaccccccacccaccgtgaacatgggccagtactacaagccagagcagttcaacggccagaacaacaccttcagcggcagcagctacagcaactacagccagggcaatgtgaacagaccacccaggcctgtgcctgtggccaactacccccacagccctgtgcccggcaaccccaccccacccatgaccccaggcagcagcatccccccctacctgagccccagccaggatgtgaagccacccttccccccagacatcaagcccaacatgtctgccctgcccccacctccagaccacaatgatgagctgcggctgaccttccctgtgagagatggagtggtgctggagcccttccggctggagcacaacctggccgtgagcaaccacgtgttccacctgcggcccaccgtgcaccagaccctgatgtggagcgacctggagctgcagttcaagtgctaccaccatgaagatcggcagatgaacaccaactggccagcctctgtgcaggtgtctgtgaatgccacccccctgaccatcgagcggggggacaacaagaccagccacaagcccctgcacctgaagcacgtgtgccagcccggcaggaacaccatccagatcaccgtgacagcctgctgctgcagccacctgtttgtgctgcagctggtgcaccggcccagcgtgcgctctgtgctgcagggcctgctgaagaagaggctgctgcctgctgagcactgcatcaccaagaagaggaacttcagctctgtggccgccagcagcggcaacaccaccctgaatggagaagatggagtggagcagacagccatcaaggtgtccctgaagtgccccatcaccttccgccgcatccagctgcctgcccggggccatgactgcaagcacgtgcagtgctttgacctggagagctacctgcagctgaactgtgagcggggcacctggcgctgccctgtgtgcaagacagccctgctggagggcctggaggtggaccagtacatgtggggcatcctgaatgccatccacagcgagtttgaggaggtgaccatcgaccccacctgctcctggaggcctgtgcccatcaagagtgacctgcacatcaaggatgatcctgatggcatccccagcaagcgcttcaagaccatgagccccagccagatgatcatgcccaacgtgatggagatgattgctgccctgggccctggccccagcccctaccccctgcccccacctcctgggggcaccaacagcaatgactacagcagccagaacaactaccagggccacggcaactttgacttcccccacggcaaccctgggggcacctccatgaatgacttcatgcacggccccccccagctgagccaccccccagacatgcccaacaacatggccgccctggagaagcccctgagccaccccatgcaggagaccatgcctcatgctggcagcagtgaccagccccaccccagcatccagcagggcctgcacgtgccccaccccagcagccagagcggcccccccctgcaccacagcggggcccctcctcctccacccagccagcccccccggcagcccccccaggccgcccccagcagccacccccacagcgacctgaccttcaaccccagcagcgccctggagggccaggccggggcccagggcgccagtgacatgcctgagcccagcctggacctgctgcctgagctgaccaacccagatgagctgctgagctacctggaccccccagacctgcccagcaacagcaatgatgacctgctgagcctgtttgagaacaactag

SEQ ID NO: 19862 - DNA, 603 bp, synthetic construct
  source 1..603: mol_type = other DNA; note = Synthetic coding sequence
atggccatggagatgaggctgcctgtggccaggaagcccctgtctgagcggctgggccgggacaccaagaagcacctggtggtgcctggggacaccatcaccacagacaccggcttcatgaggggccacggcacctacatgggagaggagaagctgattgcctctgtggccggctctgtggagcgggtgaacaagctgatctgtgtgaaggccctgaagacccgctacatcggggaggtgggggacatcgtggtgggccgcatcacagaggtgcagcagaagcgctggaaggtggagaccaacagccggctggacagcgtgctgctgctgagctccatgaacctgcccggcggggagctgcggcggcgctctgcagaagatgagctggccatgaggggcttcctgcaggagggggacctgatctctgctgaggtgcaggccgtgttcagtgatggagctgtgtccctgcacaccaggagcctgaagtatggcaagacccacttccatgacctgccctgtggggccagcgtcatcctgggcaacaacggcttcatctggatctaccccaccccagagcacaaggaggaggaggccggcggctag

SEQ ID NO: 19863 - DNA, 792 bp, synthetic construct
  source 1..792: mol_type = other DNA; note = Synthetic coding sequence
atggccatggagatgaggctgcctgtggccaggaagcccctgtctgagcggctgggccgggacaccaagaagcacctggtggtgcctggggacaccatcaccacagacaccggcttcatgaggggccacggcacctacatgggagaggagaagctgattgcctctgtggccggctctgtggagcgggtgaacaagctgatctgtgtgaaggccctgaagacccgctacatcggggaggtgggggacatcgtggtgggccgcatcacagaaagaagaagatctgcagaagatgagctggccatgaggggcttcctgcaggagggggacctgatctctgctgaggtgcaggccgtgttcagtgatggagctgtgtccctgcacaccaggagcctgaagtatggcaagctgggccagggcgtgctggtgcaggtgagccccagcctggtgaagaggcagaagacccacttccatgacctgccctgtggggccagcgtcatcctgggcaacaacggcttcatctggatctaccccaccccagagcacaaggaggaggaggccggcggcttcatcgccaacctggagcctgtgtccctggccgaccgggaggtgatcagccggctgaggaactgcatcatcagcctggtgacccagaggatgatgctgtatgacaccagcatcctgtactgctatgaggccagcctgccccaccagatcaaggacatcctgaagccagagatcatggaggagatcgtgatggagacccggcagaggctgctggagcaggagggctag

SEQ ID NO: 19864 - DNA, 858 bp, synthetic construct
  source 1..858: mol_type = other DNA; note = Synthetic coding sequence
atggccatggagatgaggctgcctgtggccaggaagcccctgtctgagcggctgggccgggacaccaagaagcacctggtggtgcctggggacaccatcaccacagacaccggcttcatgaggggccacggcacctacatgggagaggagaagctgattgcctctgtggccggctctgtggagcgggtgaacaagctgatctgtgtgaaggccctgaagacccgctacatcggggaggtgggggacatcgtggtgggccgcatcacagaggtgcagcagaagcgctggaaggtggagaccaacagccggctggacagcgtgctgctgctgagctccatgaacctgcccggcggggagctgcggcggcgctctgcagaagatgagctggccatgaggggcttcctgcaggagggggacctgatctctgctgaggtgcaggccgtgttcagtgatggagctgtgtccctgcacaccaggagcctgaagtatggcaaggtgagccccagcctggtgaagaggcagaagacccacttccatgacctgccctgtggggccagcgtcatcctgggcaacaacggcttcatctggatctaccccaccccagagcacaaggaggaggaggccggcggcttcatcgccaacctggagcctgtgtccctggccgaccgggaggtgatcagccggctgaggaactgcatcatcagcctggtgacccagaggatgatgctgtatgacaccagcatcctgtactgctatgaggccagcctgccccaccagatcaaggacatcctgaagccagagatcatggaggagatcgtgatggagacccggcagaggctgctggagcaggagggctag

SEQ ID NO: 19865 - DNA, 882 bp, synthetic construct
  source 1..882: mol_type = other DNA; note = Synthetic coding sequence
atggccatggagatgaggctgcctgtggccaggaagcccctgtctgagcggctgggccgggacaccaagaagcacctggtggtgcctggggacaccatcaccacagacaccggcttcatgaggggccacggcacctacatgggagaggagaagctgattgcctctgtggccggctctgtggagcgggtgaacaagctgatctgtgtgaaggccctgaagacccgctacatcggggaggtgggggacatcgtggtgggccgcatcacagaggtgcagcagaagcgctggaaggtggagaccaacagccggctggacagcgtgctgctgctgagctccatgaacctgcccggcggggagctgcggcggcgctctgcagaagatgagctggccatgaggggcttcctgcaggagggggacctgatctctgctgaggtgcaggccgtgttcagtgatggagctgtgtccctgcacaccaggagcctgaagtatggcaagctgggccagggcgtgctggtgcaggtgagccccagcctggtgaagaggcagaagacccacttccatgacctgccctgtggggccagcgtcatcctgggcaacaacggcttcatctggatctaccccaccccagagcacaaggaggaggaggccggcggcttcatcgccaacctggagcctgtgtccctggccgaccgggaggtgatcagccggctgaggaactgcatcatcagcctggtgacccagaggatgatgctgtatgacaccagcatcctgtactgctatgaggccagcctgccccaccagatcaaggacatcctgaagccagagatcatggaggagatcgtgatggagacccggcagaggctgctggagcaggagggctag

SEQ ID NO: 19866 - DNA, 3195 bp, synthetic construct
  source 1..3195: mol_type = other DNA; note = Synthetic coding sequence
atggccagcgagagcgagaccctgaaccccagcgcccgcatcatgaccttctaccccaccatggaggagttcaggaacttcagccgctacatcgcctacatcgagagccagggcgcccaccgggccggcctggccaaggtggtgccccccaaggagtggaagccccgggccagctatgatgacattgatgacctggtgatcccagcccccatccagcagctggtgacaggccagagcggcctcttcacccagtacaacatccagaagaaggccatgacagtgcgggagttcaggaagatcgccaacagcgacaagtactgcaccccccgctacagcgagtttgaggagctggagaggaagtactggaagaacctgaccttcaacccccccatctacggggctgatgtgaatggcaccctgtatgagaagcacgtggatgagtggaacatcggccgcctgcggaccatcctggacctggtggagaaggagagcggcatcaccatcgagggcgtgaacaccccctacctgtacttcggcatgtggaagaccagctttgcctggcacacagaggacatggacctgtacagcatcaactacctgcactttggagagcccaagtcctggtacagcgtgcccccagagcacggcaagaggctggagcggctggccaagggcttcttccctggcagcgcccagagctgtgaggccttcctgcggcacaagatgaccctcatcagccccctgatgctgaagaagtatggcatcccctttgacaaggtgacccaggaggccggggagttcatgatcaccttcccctacggctaccacgccggcttcaaccacggcttcaactgtgccgagagcaccaactttgccacccggcgctggattgaatatggcaagcaggccgtgctgtgcagctgcaggaaggacatggtgaagatctccatggatgtgtttgtgaggaagttccagcctgagcgctacaagctgtggaaggccggcaaggacaacacagtgattgaccacaccctgcccaccccagaggccgctgagttcctgaaggagagcgagctgccccccagggctggaaatgaggaggagtgcccagaggaggacatggagggcgtggaggatggagaggagggggacctgaagaccagcctggccaagcaccgcatcggcaccaagaggcaccgggtgtgcctggagatcccccaggaggtgtcccagagcgagctgttccccaaggaggacctgagcagcgagcagtatgagatgacagaatgtcctgctgccctggcccctgtgcggcccacccacagctctgtgcggcaggtggaggatggcctgaccttcccagactacagcgacagcacagaggtgaagtttgaggagctgaagaatgtgaagctggaggaggaggatgaggaggaggagcaggccgccgccgccctggacctgtctgtgaacccagcctctgtgggcggccgcctggtgttcagcggcagcaagaagaagagcagcagcagcctgggcagcggcagcagccgggacagcatcagcagtgacagcgagaccagcgagcccctgagctgccgggcccagggccagacaggagtgctgactgtgcacagctatgccaagggagatggccgggtgacagtgggggagccctgcaccaggaagaagggcagcgctgcccggagcttcagcgagcgggagctggccgaggtggctgatgagtacatgttcagcctggaggagaacaagaagagcaagggccggcggcagcccctgagcaagctgcccaggcaccaccccctggtgctgcaggagtgtgtgtctgatgatgagaccagcgagcagctgaccccagaggaggaggccgaggagacagaggcctgggccaagcccctgagccagctgtggcagaaccggccccccaactttgaagctgagaaggagttcaatgagaccatggcccagcaggccccccactgtgctgtgtgcatgatcttccagacctaccaccaggtggagtttggaggcttcaaccagaactgtggaaatgccagtgacctggccccccagaagcagaggaccaagcccctcatccctgagatgtgcttcaccagcacaggctgcagcacagacatcaacctgagcaccccctacctggaggaggatggcaccagcatcctggtgtcctgcaagaagtgcagcgtgcgggtgcacgccagctgctacggcgtgcccccagccaaggccagcgaggactggatgtgcagccgctgcagcgccaatgccctggaggaggactgctgcctgtgcagcctgcggggcggggccctgcagagggccaatgatgaccgctgggtgcacgtgtcctgtgctgtggccatcctggaggccaggtttgtgaacattgctgagaggagccctgtggatgtgtccaagatccccctgccccgcttcaagctgaagtgcatcttctgcaagaagaggaggaagaggacagctggctgctgcgtgcagtgcagccacggccgctgccccacagccttccacgtgtcctgtgcccaggccgccggcgtgatgatgcagccagatgactggccctttgtggtgttcatcacctgcttccgccacaagatccccaacctggagcgggccaagggggccctgcagagcatcacagctggccagaaggtgatcagcaagcacaagaatggccgcttctaccagtgtgaggtggtgcggctgaccacagagaccttctatgaggtgaactttgatgatggcagcttcagtgacaacctgtacccagaggacatcgtgtcccaggactgcctgcagtttggccccccagctgagggggaggtggtgcaggtgcgctggacagatggccaggtgtatggagccaagtttgtggccagccaccccatccagatgtaccaggtggagtttgaagatggcagccagctggtggtgaagagagatgatgtgtacaccctggatgaggagctgcccaagagggtgaagagccggctgtctgtggccagtgacatgaggttcaatgagatcttcacagagaaggaggtgaagcaggagaagaagaggcagagggtcatcaacagccgctaccgggaggactacatcgagcccgccctgtaccgggccatcatggagtag

SEQ ID NO: 19867 - DNA, 2745 bp, synthetic construct; identical to SEQ ID NO: 18914
  source 1..2745: mol_type = other DNA; note = Synthetic coding sequence

SEQ ID NO: 19868 - DNA, 1215 bp, synthetic construct
  source 1..1215: mol_type = other DNA; note = Synthetic coding sequence
atggacttcaacatgaagaagctggccagtgatgctggcatcttcttcaccagggctgtgcagttcacagaggagaagtttggccaggccgagaagacagagctggatgcccactttgagaacctgctggcccgggctgacagcaccaagaactggacagagaagatcctgcggcagacagaggtgctgctgcagcccaaccccagcgcccgggtggaggagttcctgtatgagaagctggacaggaaggtgcccagccgggtgaccaacggggagctgctggcccagtacatggctgatgctgccagcgagctgggccccaccaccccctacggcaagaccctcatcaaggtggccgaggccgagaagcagctgggcgctgctgagcgggacttcatccacacagccagcatctccttcctgacccccctgaggaacttcctggagggggactggaagaccatcagcaaggagcggcggctgctgcagaacagaaggctggacctggatgcctgcaaggcccggctgaagaaggccaaggctgctgaggccaaggccacctgtgagggggacacagtgcctgacttccaggagacccggcccaggaactacatcctgagcgccagcgccagcgccctgtggaatgatgaggtggacaaggccgagcaggagctgcgggtggcccagacagaatttgaccggcaggccgaggtgacccggctgctgctggagggcatcagcagcacccacgtgaaccacctgcgctgcctgcacgagtttgtgaagagccagaccacctactatgcccagtgctaccgccacatgctggacctgcagaagcagctgggcagcagccagggcgccatcttccctggcacctttgtgggcaccacagagcccgccagcccccccctgagcagcaccagccccaccacagctgctgccaccatgcctgtggtgcccagcgtggccagcctggcccctcctggagaggccagcctgtgcctggaggaggtggcccccccagccagcggcaccaggaaggcccgggtgctgtatgactatgaagctgctgacagcagcgagctggccctgctggctgatgagctgatcaccgtgtacagcctgcccggcatggaccctgactggctgattggagagcggggcaacaagaagggcaaggtgcctgtgacctacctggagctgctgtcctag

SEQ ID NO: 19869 - DNA, 1188 bp, synthetic construct
  source 1..1188: mol_type = other DNA; note = Synthetic coding sequence
atggacttcaacatgaagaagctggccagtgatgctggcatcttcttcaccagggctgtgcagttcacagaggagaagtttggccaggccgagaagacagagctggatgcccactttgagaacctgctggcccgggctgacagcaccaagaactggacagagaagatcctgcggcagacagaggtgctgctgcagcccaaccccagcgcccgggtggaggagttcctgtatgagaagctggacaggaaggtgcccagccgggtgaccaacggggagctgctggcccagtacatggctgatgctgccagcgagctgggccccaccaccccctacggcaagaccctcatcaaggtggccgaggccgagaagcagctgggcgctgctgagcgggacttcatccacacagccagcatctccttcctgacccccctgaggaacttcctggagggggactggaagaccatcagcaaggagcggcggctgctgcagaacagaaggctggacctggatgcctgcaaggcccggctgaagaaggccaaggctgctgaggccaaggccaccaccgtgcctgacttccaggagacccggcccaggaactacatcctgagcgccagcgccagcgccctgtggaatgatgaggtggacaaggccgagcaggagctgcgggtggcccagacagaatttgaccggcaggccgaggtgacccggctgctgctggagggcatcagcagcacccacgtgaaccacctgcgctgcctgcacgagtttgtgaagagccagaccacctactatgcccagtgctaccgccacatgctggacctgcagaagcagctgggccgcttccctggcacctttgtgggcaccacagagcccgccagcccccccctgagcagcaccagccccaccacagctgctgccaccatgcctgtggtgcccagcgtggccagcctggcccctcctggagaggccagcctgtgcctggaggaggtggcccccccagccagcggcaccaggaaggcccgggtgctgtatgactatgaggccgctgacagcagcgagctggccctgctggctgatgagctgatcaccgtgtacagcctgcccggcatggaccctgactggctgattggagagcggggcaacaagaagggcaaggtgcctgtgacctacctggagctgctgtcctag

SEQ ID NO: 19870 - DNA, 1188 bp, synthetic construct; identical to SEQ ID NO: 19869
  source 1..1188: mol_type = other DNA; note = Synthetic coding sequence

SEQ ID NO: 19871 - DNA, 615 bp, synthetic construct
  source 1..615: mol_type = other DNA; note = Synthetic coding sequence
atgtcctggacctgcccccgctgccagcagcctgtgttctttgctgagaaggtgagcagcctgggcaagaactggcaccgcttctgcctgaagtgtgagcgctgccacagcatcctgagccctgggggccatgctgagcacaacggccggccctactgccacaagccctgctacggggccctgtttggcccccggggcgtgaacattggaggagtgggcagctacctgtacaacccccccacccccagccctggctgcaccacccccctgagccccagcagcttcagccccccccggcccaggacaggcctgccccagggcaagaagagccccccccacatgaagaccttcaccggggagaccagcctgtgccccggctgtggggagcctgtgtactttgctgagaaggtgatgagcctgggcaggaactggcaccggccctgcctgcgctgccagcgctgccacaagaccctgacagctggcagccacgccgagcatgatggagtgccctactgccacgtgccctgctacggctacctgtttggccccaagggcgtgaacattggagatgtgggctgctacatctatgaccctgtgaagatcaagttcaagtag

SEQ ID NO: 19872 - DNA, 1221 bp, synthetic construct
  source 1..1221: mol_type = other DNA; note = Synthetic coding sequence
atggagagcctgcggggctacacccacagcgacatcggctaccgcagcctggccgtgggagaagatattgaggaggtgaatgatgagaagctgactgtgaccagcctgatggcccggggcggggaggatgaggagaacaccaggagcaagccagaatatggaacagaagctgagaacaacgtgggcacagagggctctgtgcccagtgatgaccaggaccgggagggcggcggcggccacgagcctgagcagcagcaggaggagccccccctgaccaagccagagcagcagcaggaggagccccccctgctggagctgaagcaggagcaggaggagcccccccagaccaccgtggagggcccccagcctgctgagggcccccagacagctgagggcccccagcccccagagaggaagagaagaagaagaacagccttcacccagttccagctgcaggagctggagaacttctttgatgagagccagtacccagatgtggtggcccgggagcggctggccgcccggctgaacctgacagaggacagagtgcaggtgtggttccagaacagaagagccaagtggaagaggaaccagagggtgctgatgctgaggaacacagccacagctgacctggcccaccccctggacatgttcctgggcggggcctactatgctgccccagccctggaccctgccctgtgtgtgcacctggtgccccagctgccccggccccctgtgctgcctgtgccccccatgccaccccggccccccatggtgcccatgccacccaggcctcccatcgcccccatgccacccatggcccctgtgcccccaggcagcaggatggcccctgtgcccccaggccccaggatggcccctgtgcccccctggccacccatggcccctgtgcccccctggccacccatggcccctgtgcccaccggcccccccatggcccctgtgcccccaggcccccccatggcccgggtgcccccaggcccccccatggcccgggtgcccccaggcccccccatggcccccctgcccccaggcccccccatggcccccctgcccccaggcccccccatggcccccctgcccccaggcccccccatggcccccctgccccccaggagccacgtgccccacacaggcctggcccctgtgcacatcacctgggcccctgtgatcaacagctactatgcctgccccttcttctag

SEQ ID NO: 19873 - DNA, 873 bp, synthetic construct
  source 1..873: mol_type = other DNA; note = Synthetic coding sequence
atgagccccagcgccaagaagaggcccaagaacagccgggtgtccaagatgcaggatgagaagctgagagatgaaacagagcagcctgtgtccaaggtgattgaaagaaaccggctgaggacagtgctgaagaacctgagcctgctgaagctgctgaagagcagcaacagacgcatccaggagctgcacaagctggccaagcgctgctggcacagcctgctgtctgtgcccaagatcctgcgcatcagcagcggggagaacagcgcctgcaacaagaccaagcagaacaatgaggagttccaggagatcggctgcagcgagaaggagctgaagagcaagaagctggagagcactggagaccccaagaagaaggagtacaaggagtggaagagccaggtgcagagcggcatgaggaacaaggagaagaccagcctggccgccatgcccaggaaggagaagcacatcgagcctgaggtgcccaggaccagcagagatgacagcctgaaccctggggtgcagggccggcagcccctgacagagggccccagggtcatcttcatcaagccctacagaaacagaacacccatgggccacatgaagcagctggatgtggccgaccagtggatctggtttgagggcctgcccacccgcatccacctgcctgccccccgggtgatgtgccgcagcagcaccctgcgctgggtgaagaggcgctgcacccgcttctgcagcgccagcctggagatgcccatgtggcacccctacaaggtggatgtgacctggacccgggcccggggggccagccggggctggaggagccgccaccagctgaagggcagaaatggctggaggaacagccgggtgtacaagtag

SEQ ID NO: 19874 - DNA, 1644 bp, synthetic construct; identical to SEQ ID NO: 19587
  source 1..1644: mol_type = other DNA; note = Synthetic coding sequence

SEQ ID NO: 19875 - DNA, 1881 bp, synthetic construct
  source 1..1881: mol_type = other DNA; note = Synthetic coding sequence
atgtgcagcaccctgaagaagtgtggcacctacagaacagaggtggctgaatgtcatgaccacggcagcaccttccagggcaggaagaagggcggcagcagcttccgggacaactttgacaagaggagctgccactatgagcacggcggctatgagcggccccccagccactgccaggagaatgatggctctgtggagatgagagatgtgcacaaggaccagcagctgcggcacaccccctacagcatccgctgtgaaagaaggatgaagtggcacagtgaagatgagatccgcatcaccacctggaggaacaggaagcccccagagaggaagatgagccagaacacccaggacggctacaccaggaactggttcaaggtgaccatcccctacggcatcaagtatgacaaggcctggctgatgaacagcatccagagccactgcagcgaccgcttcacccctgtggacttccactacgtgaggaacagagcctgcttctttgtgcaggatgccagcgctgccagcgccctgaaggatgtgtcctacaagatctatgatgatgagaaccagaagatctgcatctttgtgaaccacagcacagccccctacagcgtgaagaacaagctgaagccaggccagatggagatgctgaagctgaccatgaacaagcgctacaacgtgtcccagcaggccctggacctgcagaacctgcgctttgatcctgacctgatgggccgggacatcgacatcatcctgaacagaagaaactgcatggccgccaccctgaagatcattgaaagaaacttccctgagctgctgagcctgaacctgtgcaacaacaagctgtaccagctggatggcctgagtgacatcacagagaaggcccccaaggtgaagaccctgaacctgagcaagaacaagctggagagcgcctgggagctgggcaaggtgaagggcctgaagctggaggagctgtggctggagggcaaccccctgtgcagcaccttcagtgaccagagcgcctacgtgtctgccatccgggactgcttccccaagctgctgcggctggatggccgggagctgagcgcccctgtgattgtggacatcgacagcagcgagaccatgaagccctgcaaggagaacttcaccggcagcgagaccctgaagcacctggtgctgcagttcctgcagcagtactacagcatctatgattctggggaccggcagggcctgctgggcgcctaccatgatgaggcctgcttcagcctggccatcccctttgaccccaaggacagcgcccccagcagcctgtgcaagtactttgaggacagcaggaacatgaagaccctgaaggacccctacctgaagggggagctgctgcggaggaccaagagggacatcgtggacagcctgagcgccctgcccaagacccagcacgacctgagcagcatcctggtggatgtgtggtgccagacagagaggatgctgtgcttctctgtgaatggagtcttcaaggaggtggagggccagagccagggctctgtgctggccttcaccaggaccttcatcgccaccccaggcagcagcagcagcctgtgcatcgtgaatgatgagctgtttgtgagagatgccagcccccaggagacccagagcgccttcagcatccctgtgtccaccctgagcagcagcagcgagcccagcctgagccaggagcagcaggagatggtgcaggccttcagcgcccagagcggcatgaagctggagtggagccagaagtgcctgcaggacaatgagtggaactacacccgggccggccaggccttcaccatgctgcagacagagggcaagatcccagctgaggccttcaagcagatctcctag

SEQ ID NO: 19876 - DNA, 1881 bp, synthetic construct; identical to SEQ ID NO: 19875
  source 1..1881: mol_type = other DNA; note = Synthetic coding sequence

SEQ ID NO: 19877 - DNA, 1230 bp, synthetic construct
  source 1..1230: mol_type = other DNA; note = Synthetic coding sequence
atgaagtggcacagtgaagatgagatccgcatcaccacctggaggaacaggaagcccccagagaggaagatgagccagaacacccaggacggctacaccaggaactggttcaaggtgaccatcccctacggcatcaagtatgacaaggcctggctgatgaacagcatccagagccactgcagcgaccgcttcacccctgtggacttccactacgtgaggaacagagcctgcttctttgtgcaggatgccagcgctgccagcgccctgaaggatgtgtcctacaagatctatgatgatgagaaccagaagatctgcatctttgtgaaccacagcacagccccctacagcgtgaagaacaagctgaagccaggccagatggagatgctgaagctgaccatgaacaagcgctacaacgtgtcccagcaggccctggacctgcagaacctgcgctttgatcctgacctgatgggccgggacatcgacatcatcctgaacagaagaaactgcatggccgccaccctgaagatcattgaaagaaacttccctgagctgctgagcctgaacctgtgcaacaacaagctgtaccagctggatggcctgagtgacatcacagagaaggcccccaaggtgaagaccctgaacctgagcaagaacaagctggagagcgcctgggagctgggcaaggtgaagggcctgaagctggaggagctgtggctggagggcaaccccctgtgcagcaccttcagtgaccagagcgcctacgtgtctgccatccgggactgcttccccaagctgctgcggctggatggccgggagctgagcgcccctgtgattgtggacatcgacagcagcgagaccatgaagccctgcaaggagaacttcaccggcagcgagaccctgaagcacctggtgctgcagttcctgcagcagtactacagcatctatgattctggggaccggcagggcctgctgggcgcctaccatgatgaggcctgcttcagcctggccatcccctttgaccccaaggacagcgcccccagcagcctgtgcaagtactttgaggacagcaggaacatgaagaccctgaaggacccctacctgaagggggagctgctgcggaggaccaagagggacatcgtggacagcctgagcgccctgcccaagacccagcacgacctgagcagcatcctggtggatgtgtggtgccagacagtgcccagcggccagtag

SEQ ID NO: 19878 - DNA, 1326 bp, synthetic construct; identical to SEQ ID NO: 18228
  source 1..1326: mol_type = other DNA; note = Synthetic coding sequence

SEQ ID NO: 19879 - DNA, 1158 bp, synthetic construct
  source 1..1158: mol_type = other DNA; note = Synthetic coding sequence
atggcctctgtggccgccgcccgggctgtgcctgtgggcagcggcctgcggggcctgcagaggaccctgcccctggtggtgatcctgggcgccaccggcaccgggaagagcaccctggccctgcagctgggccagaggctgggcggggagatcgtgtctgctgacagcatgcagccccaggagatgggcacagagaaggtgattgacaggaaggtggagctggagaaggaggatggcctggtgctgcacaagaggctgagccaggtggaccctgagatggccgccaagctgcacccccatgacaagaggaaggtggcccggagcctgcaggtgtttgaggagaccggcatcagccacagcgagttcctgcaccggcagcacacagaggagggcggcggccccctgggcggccccctgaagttcagcaacccctgcatcctgtggctgcatgctgaccaggctgatgagcggctggacaagagggtggatgacatgctggccgccggcctgctggaggagctgcgggacttccaccggcgctacaaccagaagaatgtgtctgagaacagccaggactaccagcacggcatcttccagagcatcggcttcaaggagttccacgagtacctgatcacagagggcaagtgcaccctggagaccagcaaccagctgctgaagaagggcatcgaggccctgaagcaggtgaccaagagatatgccaggaagcagaaccgctgggtgaagaaccgcttcctgagcaggcctggccccatcgtgccccctgtgtatggcctggaggtgtctgatgtgtccaagtgggaggagagcgtgctggagcccgccctggagatcgtgcagagcttcatccagggccacaagcccacagccacccccatcaagatgccctacaatgaagctgagaacaagaggagctaccacctgtgtgacctgtgtgaccgcatcatcattggagaccgggagtgggccgcccacatcaagagcaagagccacctgaaccagctgaagaagagaagaaggctggacagtgatgctgtgaacaccatcgagagccagagcgtgtccccagaccacaacaaggagcccaaggagaagggcagccctggccagaatgaccaggagctgaagtgcagcgtgtag

SEQ ID NO: 19880 - DNA, 987 bp, synthetic construct
  source 1..987: mol_type = other DNA; note = Synthetic coding sequence
atgaagaggcccaaggagcccagcggcagtgatggagagagtgatggccccattgatgtgggccaggagggccagctgagccagatggcccggcccctgagcacccccagcagcagccagatgcaggccaggaagaagcaccggggcatcatcgagaagagaagaagagaccgcatcaacagcagcctgtctgagctgcggcggctggtgcccacagcctttgagaagcagggcagcagcaagctggagaaggccgaggtgctgcagatgacagtggaccacctgaagatgctgcacgccactggaggcaccggcttctttgatgcccgggccctggccgtggacttccgcagcatcggcttcagagaatgtctgacagaggtgatccgctacctgggcgtgctggagggccccagcagcagagctgaccctgtgcgcatccggctgctgagccacctgaacagctatgctgctgagatggagcccagccccacccccaccggccccctggccttccctgcctggccctggagcttcttccacagctgccccggcctgcctgccctgagcaaccagctggccatcctgggccgggtgcccagccctgtgctgcccggggtgagcagccctgcctaccccatcccagccctgaggacagcccccctgcggcgggccaccggcatcatcctgcctgccaggagaaatgtgctgcccagcagaggagccagcagcacccggcgggcccggcccctggagaggcctgccacccctgtgcctgtggcccccagcagccgggccgcccggagcagccacatcgcccccctgctgcagagcagcagccccaccccacctggccccactggatctgctgcctacgtggccgtgcccacccccaacagcagcagccctggccctgctggccggcctgctggggccatgctgtaccacagctgggtgtctgagatcacagaaattggagccttctag

SEQ ID NO: 19881 - DNA, 2262 bp, synthetic construct
  source 1..2262: mol_type = other DNA; note = Synthetic coding sequence
atggagacctttgagcccatcagccaggagcccctgagccaggccagctatgacaaggccccagaccctgtgcctgagctgcaggacagcttctatgcagagctgcagagagctgagagcctgcaggagaagagcatcaaggaggccaagaccaagtgcaggaccatcgccagcctgctgacagctgcccccaacccccacagcaaaggagtgctgatgttcaagaagaggcggcagagggccaagaagtacaccctggtgtcctttggagctgctgctggcactggagctgaggaggaggatggagtgccccccaccagcgagagcgagctggatgaggaggccttcagtgatgcccggagcctgaccaaccagagcgactgggacagcccctacctggacatggagctggcccgggccggcagccgggccagcgagggccagggcagcggcctgggcggccagctgtctgaggtgtctggccggggcgtgcagctgtttgagcagcagaggcagagagctgacagcagcacccaggagctggcccgggtggagcctgctgccatgctgaatggagagggcctgcagagccccccccgggcccagagcgcccctcctgaggccgctgtgctgccccccagccccctgcctgcccctgtggccagcccccggcccttccagcccggcggcggggcccccaccccagcccccagcatcttcaacagaagtgcccggcccttcaccccaggcctgcagggccagaggcccaccaccaccagcgtcatcttccggcccctggcccccaagagggccaatgacagcctgggcggcctgagccctgcccccccacccttcctgagcagccagggccccacccccctgcccagcttcaccagcggcgtgcccagccacgcccctgtgtctggcagccccagcacccccaggagcagcggccctgtgacagccaccagcagcctgtacatcccagcccccagcaggcctgtgaccccaggaggagcccctgagcccccagccccacccagcgctgctgccatgaccagcacagccagcatcttcctgagcgcccccctgcggcccagcgcccggcctgaggccccagcccctggccctggggcccctgagccccccagcgcccgggagcagaggatctctgtgcctgctgccaggacaggcatcctgcaggaggccaggagaagaggcaccaggaagcagatgttccggcctgggaaggaggagaccaagaacagccccaaccctgagctgctgagcctggtgcagaacctggatgagaagcccagggctggaggagctgagagcggccctgaggaggatgccctgagcctgggcgctgaggcctgcaacttcatgcagcctgtgggcgcccggagctacaagaccctgccccacgtgacccccaagaccccaccacccatggcccccaagaccccaccacccatgacccccaagaccccacctcctgtggcccccaagccacccagccggggcctgctggatggcctggtgaatggagctgccagcagcgctggcatccctgagcccccccggctgcagggccggggcggggagctgtttgccaagaggcagagcagagctgaccgctacgtggtggagggcaccccaggccctggcctgggcccccggcccaggagccccagccccacccccagcctgccccccagctggaagtacagccccaacatccgggcccccccacccatcgcctacaaccccctgctgagccccttcttcccccaggccgcccggaccctgcccaaggcccagagccagggcccccgggccacccccaagcagggcatcaaggccctggacttcatgaggcaccagccctaccagctgaagacagccatgttctgctttgatgaggtgccccccaccccaggccccatcgccagcggcagccccaagacagcccgggtgcaggagatccgccgcttcagcaccccagccccccagcccacagctgagcccctggcccccaccgtgctggcccccagggctgccaccaccctggatgagcccatctggaggacagagctggccagcgcccctgtgcccagccctgcccctcctcctgaggccccccggggcctgggcgccagccccagcagctgtggcttccaggtggcccggccccgcttcagcgccaccaggacaggcctgcaggcccacgtgtggaggcctggggccggccaccagtag

SEQ ID NO: 19882 - DNA, 1041 bp, synthetic construct; identical to SEQ ID NO: 18335
  source 1..1041: mol_type = other DNA; note = Synthetic coding sequence

SEQ ID NO: 19883 - DNA, 1569 bp, synthetic construct
  source 1..1569: mol_type = other DNA; note = Synthetic coding sequence
atgagcccccagaagagggtgaagaatgtgcaggcccagaacagaaccagccagggcagcagcagcttccagaccaccctgagcgcctggaaggtgaagcaggaccccagcaacagcaagaacatcagcaagcacggccagaacaaccctgtgggggactatgagcacgcagatgaccaggccgaggaggatgccctgcagatggctgtgggctactttgagaagggccccatcaaggccagccagaacaaggacaagaccctggagaagcacctgaagacagtggagaatgtggcctggaagaatggcctggccagcgaggagattgacatcctgctgaacatcgccctgagcggcaagtttggaaatgctgtgaacacccgcatcctgaagtgcatgatcccagccaccgtcatcagtgaagattctgtggtgaaggctgtgtcctggctgtgtgtgggcaaatgttctggcagcaccaaggtgctcttctaccgctggctggtggccatgtttgacttcatcgacaggaaggagcagatcaacctgctgtatggcttcttctttgccagcctgcaggatgatgccctgtgcccctacgtgtgccacctgctgtacctgctgaccaagaaggaaaatgtgaagcccttccgggtgaggaagctgctggacctgcaggccaagatgggcatgcagccccacctgcaggccctgctgagcctgtacaagttctttgccccagccctgatctctgtgtccctgcctgtgaggaagaagatctacttcaagaacagcgagaacctgtggaagacagccctgctggccgtgaagcagaggaacagaggccccagccctgagcccctgaagctgatgctgggccctgccaacgtgcggcccctgaagaggaagtggaacagcctgagcgtcatccctgtgctgaacagcagcagctacaccaaggaatgtgggaagaaggagatgagcctgagtgactgcctgaacagaagtggcagcttccccctggagcagctgcagagcttcccccagctgctgcagaacatccactgcctggagctgcccagccagatgggctctgtgctgaacaacagcctgctgctgcactacatcaactgtgtgagagatgagcctgtgctgctgcgcttctactactggctgagccagaccctgcaggaggagtgcatctggtacaaggtgaacaactatgagcacggcaaggagttcaccaacttcctggacaccatcatccgggcagagtgcttcctgcaggagggcttctacagctgtgaggccttcctgtacaagagcctgcccctgtgggatggcctgtgctgccgcagccagttcctgcagctggtgtcctggatccccttcagcagcttcagcgaggtgaagcccctgctgtttgaccacctggcccagctgttcttcaccagcaccatctacttcaagtgcagcgtgctgcagagcctgaaggagctgctgcagaactggctgctgtggctgtccatggacatccacatgaagcctgtgaccaacagccccctgtag

SEQ ID NO: 19884 - DNA, 2271 bp, synthetic construct
  source 1..2271: mol_type = other DNA; note = Synthetic coding sequence
atgagcccccagaagagggtgaagaatgtgcaggcccagaacagaaccagccagggcagcagcagcttccagaccaccctgagcgcctggaaggtgaagcaggaccccagcaacagcaagaacatcagcaagcacggccagaacaaccctgtgggggactatgagcacgcagatgaccaggccgaggaggatgccctgcagatggctgtgggctactttgagaagggccccatcaaggccagccagaacaaggacaagaccctggagaagcacctgaagacagtggagaatgtggcctggaagaatggcctggccagcgaggagattgacatcctgctgaacatcgccctgagcggcaagtttggaaatgctgtgaacacccgcatcctgaagtgcatgatcccagccaccgtcatcagtgaagattctgtggtgaaggctgtgtcctggctgtgtgtgggcaaatgttctggcagcaccaaggtgctcttctaccgctggctggtggccatgtttgacttcatcgacaggaaggagcagatcaacctgctgtatggcttcttctttgccagcctgcaggatgatgccctgtgcccctacgtgtgccacctgctgtacctgctgaccaagaaggaaaatgtgaagcccttccgggtgaggaagctgctggacctgcaggccaagatgggcatgcagccccacctgcaggccctgctgagcctgtacaagttctttgccccagccctgatctctgtgtccctgcctgtgaggaagaagatctacttcaagaacagcgagaacctgtggaagacagccctgctggccgtgaagcagaggaacagaggccccagccctgagcccctgaagctgatgctgggccctgccaacgtgcggcccctgaagaggaagtggaacagcctgagcgtcatccctgtgctgaacagcagcagctacaccaaggaatgtgggaagaaggagatgagcctgagtgactgcctgaacagaagtggcagcttccccctggagcagctgcagagcttcccccagctgctgcagaacatccactgcctggagctgcccagccagatgggctctgtgctgaacaacagcctgctgctgcactacatcaactgtgtgagagatgagcctgtgctgctgcgcttctactactggctgagccagaccctgcaggaggagtgcatctggtacaaggtgaacaactatgagcacggcaaggagttcaccaacttcctggacaccatcatccgggcagagtgcttcctgcaggagggcttctacagctgtgaggccttcctgtacaagagcctgcccctgtgggatggcctgtgctgccgcagccagttcctgcagctggtgtcctggatccccttcagcagcttcagcgaggtgaagcccctgctgtttgaccacctggcccagctgttcttcaccagcaccatctacttcaagtgcagcgtgctgcagagcctgaaggagctgctgcagaactggctgctgtggctgtccatggacatccacatgaagcctgtgaccaacagccccctggagaccaccctgggcggctccatgaacagcgtgtccaagctgatccactacgtgggctggctgagcaccacagccatgaggctggagagcaacaacaccttcctgctgcacttcatcctggacttctatgagaaggtgtgtgacatctacatcaactacaacctgcccctggtggtgctcttccccccaggcatcttctacagcgccctgctgagcctggacaccagcatcctgaaccagctgtgcttcatcatgcaccgctacaggaagaacctgacagctgccaagaagaatgagctggtgcagaagaccaagtctgagttcaacttcagcagcaagacctaccaggagttcaaccactacctgacctccatggtgggctgcctgtggaccagcaagccctttgggaagggcatctacattgatcctgagatcctggagaagacaggagtggccgagtacaagaacagcctgaatgtggtgcaccaccccagcttcctgtcctatgctgtgtccttcctgctgcaggagagccctgaggagaggacagtgaatgtgagcagcatccggggcaagaagtggagctggtacctggactacctgttcagccagggcctgcagggcctgaagctgttcatccgcagctctgtgcaccacagcagcatccccagggctgagggcatcaactgcaacaaccagtactag

SEQ ID NO: 19885 - DNA, 933 bp, synthetic construct
  source 1..933: mol_type = other DNA; note = Synthetic coding sequence
atggctgatgctgctgccacagctggggccggcggcagcggcaccaggagcggcagcaagcagagcaccaacccagctgacaactaccacctggcccggcggaggaccctgcaggtggtggtgagcagcctgctgacagaggccggctttgagagcgctgagaaggcctctgtggagaccctgacagagatgctgcagagctacatcagcgagatcggccgcagcgccaagagctactgtgagcacacagcccggacccagcccaccctgagtgacatcgtggtgaccctggtggagatgggcttcaacgtggacaccctgcctgcctatgccaagaggagccagaggatggtgatcacagcccctcctgtgaccaaccagcctgtgacccccaaggccctgacagctggccagaaccggccccaccccccccacatccccagccacttccctgagttcccagacccccacacctacatcaagacccccacctaccgggagcctgtgtctgactaccaggtgctgcgggagaaggccgccagccagaggagagatgtggagcgggccctgacccgcttcatggccaagacaggagagacccagagcctcttcaaggatgatgtgtccaccttccccctgattgctgcccggcccttcaccatcccctacctgacagccctgctgcccagcgagctggagatgcagcagatggaggagacagacagcagcgagcaggatgagcagacagacacagagaacctggccctgcacatctccatggaggacagcggggctgagaaggagaacacctctgtgctgcagcagaaccccagcctgagcggcagcagaaatggagaggagaacatcatcgacaacccctacctgcggcctgtgaagaagcccaagatccggaggaagaagagcctgtcctag

SEQ ID NO: 19886 - DNA, 1935 bp, synthetic construct
  source 1..1935: mol_type = other DNA; note = Synthetic coding sequence
atggaggagaccatgaagctggccaccatggaggacacagtggagtactgcctcttcctgatcccagatgagagccgggacagcgacaagcacaaggagatcctgcagaagtacatcgagcgcatcatcaccaggtttgcccccatgctggtgccctacatctggcagaaccagcccttcaacctgaagtacaagccaggcaagggcggcgtgcctgcccacatgtttggagtgaccaagtttggagacaacattgaagatgagtggttcatcgtgtatgtgatcaagcagatcaccaaggagttccctgagctggtggccagaattgaggacaatgatggagagttcctgctgattgaagctgctgacttcctgcccaagtggctggaccctgagaacagcaccaacagagtcttcttctgccacggggagctgtgcatcatcccagcccccaggaagagcggggctgagagctggctgcccaccaccccacccaccatcccccaggccctgaacatcatcacagcccacagcgagaagatcctggccagcgagagcatccgggctgctgtgaacagacgcatccggggctacccagagaagatccaggccagcctgcaccgggcccactgcttcctgcctgctggcatcgtggccgtgctgaagcagaggccccggctggtggccgctgctgtgcaggccttctacctgcgggaccccatcgacctgcgggcctgcagggtcttcaagaccttcctgcctgagacccgcatcatgacctctgtgaccttcaccaagtgcctgtatgcccagctggtgcagcagagatttgtgcctgacagaagaagtggctaccgcctgcccccacccagcgacccccagtaccgggcccacgagctgggcatgaagctggcccacggctttgagatcctgtgcagcaagtgcagcccccacttcagtgactgcaagaagagcctggtgacagccagccccctgtgggccagcttcctggagagcctgaagaagaatgactacttcaagggcctcatcgagggcagcgcccagtaccgggagcggctggagatggccgagaactacttccagctgtctgtggactggccagagagcagcctggccatgagccctggagaggagatcctgaccctgctgcagaccatcccctttgatattgaggacctgaagaaggaggccgccaacctgcccccagaagatgatgaccagtggctggacctgagcccagaccagctggaccagctgctgcaggaggccgtgggcaagaaggagagcgagagcgtgtccaaggaggagaaggagcagaactatgacctgacagaggtgtctgagagcatgaaggccttcatcagcaaggtgtccacccacaagggagctgagctgccccgggagcccagcgaggcccccatcacctttgatgctgacagcttcctgaactactttgacaagatcctgggcccccggcccaatgaaagtgacagtgatgacctggatgatgaagattttgagtgcctggacagtgatgatgacctggactttgagacccatgagcctggagaggaggccagcctgaagggcaccctggacaacctgaagagctacatggcccagatggaccaggagctggcccacacctgcatcagcaagagcttcaccaccaggaaccaggtggagcctgtgtcccagaccacagacaacaacagtgatgaggaggacagcggcaccggggagagcgtgatggcccctgtggatgtggacctgaacctggtgagcaacatcctggagagctacagcagccaggccggcctggccggccctgccagcaacctgctgcagagcatgggcgtgcagctgcctgacaacacagaccaccggcccaccagcaagcccaccaagaactag

SEQ ID NO: 19887 - DNA, 2163 bp, synthetic construct
  source 1..2163: mol_type = other DNA; note = Synthetic coding sequence
atgtctgtgtctgggaagaaggagtttgatgtgaagcagatcctgcggctgcgctggcgctggttcagccaccccttccagggcagcaccaacacaggcagctgcctgcagcaggagggctatgagcaccggggcacccctgtgcagggccgcctgaagagccacagccgggacagaaatggcctgaagaagagcaacagccctgtgcaccacaacatcctggcccctgtgcccggccctgccccagcccaccagagagctgtgcagaacctgcagcagcacaacctgattgtgcacttccaggccaatgaagacacccccaagtctgtgcctgagaagaacctcttcaaggaggcctgtgagaagagggcccaggacctggagatgatggctgatgacaacatcgaggacagcacagcccggctggacacccagcacagcgaggacatgaatgccaccaggtctgaggagcagttccacgtgatcaaccacgccgagcagaccctgaggaagatggagaactacctgaaggagaagcagctgtgtgatgtgctgctgattgctggccacctgcgcatcccagcccaccggctggtgctgtctgctgtgtctgactactttgctgccatgttcaccaatgatgtgctggaggccaagcaggaggaggtgaggatggagggcgtggaccccaatgccctgaacagcctggtgcagtatgcctacacaggagtgctgcagctgaaggaggacaccatcgagagcctgctggccgccgcctgcctgctgcagctgacccaggtgattgatgtgtgcagcaacttcctgatcaagcagctgcaccccagcaactgcctgggcatccgcagctttggagatgcccagggctgcacagagctgctgaatgtggcccacaagtacaccatggagcacttcatcgaggtgatcaagaaccaggagttcctgctgctgcctgccaatgagatcagcaagctgctgtgcagtgatgacatcaacgtgcctgatgaggagaccatcttccacgccctgatgcagtgggtgggccatgatgtgcagaaccggcagggcgagctgggcatgctgctgagctacatccggctgcccctgctgcccccccagctgctggccgacctggagaccagctccatgttcaccggggacctggagtgccagaagctgctgatggaggccatgaagtaccacctgctgcctgagcggcgctccatgatgcagagccccaggaccaagcccaggaagagcacagtgggcgccctgtatgctgtgggcggcatggatgccatgaagggcaccaccaccatcgagaagtatgacctgcggaccaacagctggctgcacatcggcaccatgaatggaagaaggctgcagtttggagtggccgtcatcgacaacaagctgtatgtggtgggcggcagagatggcctgaagaccctgaacacagtggagtgcttcaaccctgtgggcaagatctggacagtgatgccacccatgagcacccaccgccacggcctgggcgtggccaccctggagggccccatgtatgctgtgggcggccatgatggctggagctacctgaacacagtggagcgctgggaccctgagggccggcagtggaactacgtggcctccatgagcacccccaggagcacagtgggcgtggtggccctgaacaacaagctgtatgccatcggcggcagagatggcagcagctgcctgaagtccatggagtactttgacccccacaccaacaagtggagcctgtgtgcccccatgagcaagaggcggggcggcgtgggcgtggccacctacaacggcttcctgtatgtggtgggcggccatgatgccccagccagcaaccactgcagccggctgagtgactgtgtggagagatatgaccccaagggggacagctggagcacagtggcccccctgtctgtgcccagagatgctgtggccgtgtgccccctgggggacaagctgtatgtggtgggcggctatgatggccacacctacctgaacacagtggagagctatgatgcccagagaaatgagtggaaggagagcatgcaggagctgctgcagaacttctacaccacccagaagctgaaggagaccctgggccactag

SEQ ID NO: 19888 - DNA, 2157 bp, synthetic construct
  source 1..2157: mol_type = other DNA; note = Synthetic coding sequence
atgtctgtgtctgggaagaaggagtttgatgtgaagcagatcctgcggctgcgctggcgctggttcagccaccccttccagggcagcaccaacacaggcagctgcctgcagcaggagggctatgagcaccggggcacccctgtgcagggccgcctgaagagccacagccgggacagaaatggcctgaagaagagcaacagccctgtgcaccacaacatcctggcccctgtgcccggccctgccccagcccaccagagagctgtgcagaacctgcagcagcacaacctgattgtgcacttccaggccaatgaagacacccccaagtctgtgcctgagaagaacctcttcaaggaggcctgtgagaagagggcccaggacctggagatgatggctgatgacaacatcgaggacagcacagcccggctggacacccagcacagcgaggacatgaatgccaccaggtctgaggagcagttccacgtgatcaaccacgccgagcagaccctgaggaagatggagaactacctgaaggagaagcagctgtgtgatgtgctgctgattgctggccacctgcgcatcccagcccaccggctggtgctgtctgctgtgtctgactactttgctgccatgttcaccaatgatgtgctggaggccaagcaggaggaggtgaggatggagggcgtggaccccaatgccctgaacagcctggtgcagtatgcctacacaggagtgctgcagctgaaggaggacaccatcgagagcctgctggccgccgcctgcctgctgcagctgacccaggtgattgatgtgtgcagcaacttcctgatcaagcagctgcaccccagcaactgcctgggcatccgcagctttggagatgcccagggctgcacagagctgctgaatgtggcccacaagtacaccatggagcacttcatcgaggtgatcaagaaccaggagttcctgctgctgcctgccaatgagatcagcaagctgctgtgcagtgatgacatcaacgtgcctgatgaggagaccatcttccacgccctgatgcagtgggtgggccatgatgtgcagaaccggcagggcgagctgggcatgctgctgagctacatccggctgcccctgctgcccccccagctgctggccgacctggagaccagctccatgttcaccggggacctggagtgccagaagctgctgatggaggccatgaagtaccacctgctgcctgagcggcgctccatgatgcagagccccaggaccaagcccaggaagagcacagtgggcgccctgtatgctgtgggcggcatggatgccatgaagggcaccaccaccatcgagaagtatgacctgcggaccaacagctggctgcacatcggcaccatgaatggaagaaggctgcagtttggagtggccgtcatcgacaacaagctgtatgtggtgggcggcagagatggcctgaagaccctgaacacagtggagtgcttcaaccctgtgggcaagatctggacagtgatgccacccatgagcacccaccgccacggcctgggcgtggccaccctggagggccccatgtatgctgtgggcggccatgatggctggagctacctgaacacagtggagcgctgggaccctgagggccggcagtggaactacgtggcctccatgagcacccccaggagcacagtgggcgtggtggccctgaacaacaagctgtatgccatcggcggcagagatggcagcagctgcctgaagtccatggagtactttgacccccacaccaacaagtggagcctgtgtgcccccatgagcaagaggcggggcggcgtgggcgtggccacctacaacggcttcctgtatgtggtgggcggccatgatgccccagccagcaaccactgcagccggctgagtgactgtgtggagagatatgaccccaagggggacagctggagcacagtggcccccctgtctgtgcccagagatgctgtggccgtgtgccccctgggggacaagctgtatgtggtgggcggctatgatggccacacctacctgaacacagtggagagctatgatgcccagagaaatgagtggaaggaggaggtgcctgtgaacatcggccgggccggggcctgtgtggtggtggtgaagctgccctag

SEQ ID NO: 19889 - DNA, 1134 bp, synthetic construct
  source 1..1134: mol_type = other DNA; note = Synthetic coding sequence
atgaatggacctgtgagccccaagagcaaggcccggcccagcagccccagcacctcctggcacaggcctgccagcccctgccccagccctggccctggccacaccctgccccccaagccacccagcccccggggcaccacagccagccccaagggccgggtgcggaggaaggaggaggccaaggagagccccagcgctgctggccctgaggacaagagccagagcaagagaagagccagcaatgagaaggagagcgctgccccagccagccctgcccccagccctgcccccagccccaccccagccccaccccagaaggagcagcccccagctgagacccccacagccccagcccctcctgtgacccccagcaagcccatggccggcaccacagaccgggaggaggccacccggctgctggccgagaagaggcggcaggcccgggagcagcgggagcgggaggagcaggagcggcggctgcaggccgagcgggacaagaggatgagggaggagcagctggcccgggaggccgaggcccgggcagagcgggaggccgaggccaggagaagagaggagcaggaggcccgggagaaggcccaggccgagcaggaggagcaggagcggctgcagaagcagaaggaggaggccgaggcccggagccgggaggaggccgagcggcagaggctggagcgggagaagcacttccagcagcaggagcaggagcggcaggagaggaggaagaggctggaggagatcatgaagaggaccaggaagtctgaggtgtctgagaccaagaagcaggacagcaaggaggccaatgccaacggcagcagccctgagcctgtgaaggctgtggaggcccggagccctggcctgcagaaggaggccgtgcagaaggaggagcccatcccccaggagccccagtggagcctgcccagcaaggagctgcctgccagcctggtgaatggcctgcagcccctgcctgcccaccaggagaatggcttcagcaccaacggccccagcggggacaagagcctgagcaggaccccagagaccctgctgccctttgctgaggccgaggccttcctgaagaaggctgtggtgcagagcccccaggtgacagaggtgctgtag

SEQ ID NO: 19890 - DNA, 2427 bp, synthetic construct
  source 1..2427: mol_type = other DNA; note = Synthetic coding sequence
atggagagcggccccagggctgagctgggcgctggggcccccccagctgtggtggcccggaccccacctgagccccggcccagccctgagggggaccccagccccccacctccacccatgtctgccctggtgcctgacaccccaccagacaccccaccagccatgaagaatgccaccagcagcaagcagctgcccctggagcctgagagccccagcggccaggtgggccccaggcctgccccaccccaggaggagagccccagcagcgaggccaagagccggggccccaccccaccagccatgggccccagagatgcccggcccccccggcgcagcagccagcccagccccacagctgtgcctgccagtgacagcccccccaccaagcaggaggtgaagaaggccggggagcggcacaagctggccaaggagcggcgggaggagcgggccaagtacctggccgccaagaaggctgtgtggctggagaaggaggagaaggccaaggccctgcgggagaagcagctgcaggagaggagaagaaggctggaggagcagaggctgaaggccgagcagaggcgggccgccctggaggagcggcagaggcagaagctggagaagaacaaggagagatatgaagctgccatccagaggtctgtgaagaagacctgggccgagatccggcagcagcgctggagctgggccggggccctgcaccacagcagccctggccacaagaccagcggcagccgctgcagcgtgtctgctgtgaacctgcccaagcacgtggacagcatcatcaacaagaggctgagcaagagcagcgccaccctgtggaacagccccagcaggaacagaagcctgcagctgagcgcctgggagagcagcatcgtggaccggctgatgacccccaccctgtccttcctggcccggagccgctctgctgtgaccctgcccagaaatggccgggaccaggccgtgcctgtgtgccccaggtctgccagcgccagccccctgaccccctgcagcgtgaccaggtctgtgcaccgctgtgccccagctggggagcggggggagaggaggaagcccaatgctgggggcagccctgcccctgtgagaagaagacctgaggccagccctgtgcagaagaaggagaagaaggacaaggagagagaaaatgagaaggagaagagcgccctggcccgggagaggagcctgaagaagaggcagagcctgcctgccagcccccgggcccggctgagcgccagcacagccagcgagctgagccccaagagcaaggcccggcccagcagccccagcacctcctggcacaggcctgccagcccctgccccagccctggccctggccacaccctgccccccaagccacccagcccccggggcaccacagccagccccaagggccgggtgcggaggaaggaggaggccaaggagagccccagcgctgctggccctgaggacaagagccagagcaagagaagagccagcaatgagaaggagagcgctgccccagccagccctgcccccagccctgcccccagccccaccccagccccaccccagaaggagcagcccccagctgagacccccacagatgctgctgtgctgaccagccccccagccccagcccctcctgtgacccccagcaagcccatggccggcaccacagaccgggaggaggccacccggctgctggccgagaagaggcggcaggcccgggagcagcgggagcgggaggagcaggagcggcggctgcaggccgagcgggacaagaggatgagggaggagcagctggcccgggaggccgaggcccgggcagagcgggaggccgaggcccggcggcgggaggagcaggaggcccgggagaaggcccaggccgagcaggaggagcaggagcggctgcagaagcagaaggaggaggccgaggcccggagccgggaggaggccgagcggcagaggctggagcgggagaagcacttccagcagcaggagcaggagcggcaggagaggaggaagaggctggaggagatcatgaagaggaccaggaagtctgaggtgtctgagaccaagaagcaggacagcaaggaggccaatgccaacggcagcagccctgagcctgtgaaggctgtggaggcccggagccctggcctgcagaaggaggccgtgcagaaggaggagcccatcccccaggagccccagtggagcctgcccagcaaggagctgcctgccagcctggtgaatggcctgcagcccctgcctgcccaccaggagaatggcttcagcaccaacggccccagcggggacaagagcctgagcaggaccccagagaccctgctgccctttgctgaggccgaggccttcctgaagaaggctgtggtgcagagcccccaggtgacagaggtgctgtag

SEQ ID NO: 19891 - DNA, 2526 bp, synthetic construct
  source 1..2526: mol_type = other DNA; note = Synthetic coding sequence
atggagagcggccccagggctgagctgggcgctggggcccccccagctgtggtggcccggaccccacctgagccccggcccagccctgagggggaccccagccccccacctccacccatgtctgccctggtgcctgacaccccaccagacaccccaccagccatgaagaatgccaccagcagcaagcagctgcccctggagcctgagagccccagcggccaggtgggccccaggcctgccccaccccaggaggagagccccagcagcgaggccaagagccggggccccaccccaccagccatgggccccagagatgcccggcccccccggcgcagcagccagcccagccccacagctgtgcctgccagtgacagcccccccaccaagcaggaggtgaagaaggccggggagcggcacaagctggccaaggagcggcgggaggagcgggccaagtacctggccgccaagaaggctgtgtggctggagaaggaggagaaggccaaggccctgcgggagaagcagctgcaggagaggagaagaaggctggaggagcagaggctgaaggccgagcagaggcgggccgccctggaggagcggcagaggcagaagctggagaagaacaaggagagatatgaagctgccatccagaggtctgtgaagaagacctgggccgagatccggcagcagcgctggagctgggccggggccctgcaccacagcagccctggccacaagaccagcggcagccgctgcagcgtgtctgctgtgaacctgcccaagcacgtggacagcatcatcaacaagaggctgagcaagagcagcgccaccctgtggaacagccccagcaggaacagaagcctgcagctgagcgcctgggagagcagcatcgtggaccggctgatgacccccaccctgtccttcctggcccggagccgctctgctgtgaccctgcccagaaatggccgggaccagggccggggctgtgaccccggccggggccccacctggggccgggccggggccagcctggcccggggcccccagcctgacaggacccaccccagcgctgctgtgcctgtgtgccccaggtctgccagcgccagccccctgaccccctgcagcgtgaccaggtctgtgcaccgctgtgccccagctggggagcggggggagaggaggaagcccaatgctgggggcagccctgcccctgtgagaagaagacctgaggccagccctgtgcagaagaaggagaagaaggacaaggagagagaaaatgagaaggagaagagcgccctggcccgggagaggagcctgaagaagaggcagagcctgcctgccagcccccgggcccggctgagcgccagcacagccagcgagctgagccccaagagcaaggcccggcccagcagccccagcacctcctggcacaggcctgccagcccctgccccagccctggccctggccacaccctgccccccaagccacccagcccccggggcaccacagccagccccaagggccgggtgcggaggaaggaggaggccaaggagagccccagcgctgctggccctgaggacaagagccagagcaagagaagagccagcaatgagaaggagagcgctgccccagccagccctgcccccagccctgcccccagccccaccccagccccaccccagaaggagcagcccccagctgagacccccacagatgctgctgtgctgaccagccccccagccccagcccctcctgtgacccccagcaagcccatggccggcaccacagaccgggaggaggccacccggctgctggccgagaagaggcggcaggcccgggagcagcgggagcgggaggagcaggagcggcggctgcaggccgagcgggacaagaggatgagggaggagcagctggcccgggaggccgaggcccgggcagagcgggaggccgaggcccggcggcgggaggagcaggaggcccgggagaaggcccaggccgagcaggaggagcaggagcggctgcagaagcagaaggaggaggccgaggcccggagccgggaggaggccgagcggcagaggctggagcgggagaagcacttccagcagcaggagcaggagcggcaggagaggaggaagaggctggaggagatcatgaagaggaccaggaagtctgaggtgtctgagaccaagcagaagcaggacagcaaggaggccaatgccaacggcagcagccctgagcctgtgaaggctgtggaggcccggagccctggcctgcagaaggaggccgtgcagaaggaggagcccatcccccaggagccccagtggagcctgcccagcaaggagctgcctgccagcctggtgaatggcctgcagcccctgcctgcccaccaggagaatggcttcagcaccaacggccccagcggggacaagagcctgagcaggaccccagagaccctgctgccctttgctgaggccgaggccttcctgaagaaggctgtggtgcagagcccccaggtgacagaggtgctgtag

SEQ ID NO: 19892 - DNA, 495 bp, synthetic construct
  source 1..495: mol_type = other DNA; note = Synthetic coding sequence
aacctgcccaagcacgtggacagcatcatcaacaagaggcagaggctggagcgggagaagcacttccagcagcaggagcaggagcggcaggagaggaggaagaggctggaggagatcatgaagaggaccaggaagtctgaggtgtctgagaccaagaagcaggacagcaaggaggccaatgccaacggcagcagccctgagcctgtgaaggctgtggaggcccggagccctggcctgcagaaggaggccgtgcagaaggaggagcccatcccccaggagccccagtggagcctgcccagcaaggagctgcctgccagcctggtgaatggcctgcagcccctgcctgcccaccaggagaatggcttcagcaccaacggccccagcggggacaagagcctgagcaggaccccagagaccctgctgccctttgctgaggccgaggccttcctgaagaaggctgtggtgcagagcccccaggtgacagaggtgctgtag

SEQ ID NO: 19893 - DNA, 345 bp, synthetic construct
  source 1..345: mol_type = other DNA; note = Synthetic coding sequence
atggtgatccgggtgtacatcgccagcagcagcggcagcacagccatcaagaagaagcagcaggatgtgctgggcttcctggaggccaacaagattggatttgaggagaaggacattgctgccaatgaggagaacaggaagtggatgagagaaaatgtgcctgagaacagcaggcctgccaccggctaccccctgcccccccagatcttcaatgaaagccagtacagaggagactatgatgccttctttgaggccagagaaaataatgctgtgtatgccttcctgggcctgacagcccctcctggcagcaaggaggccgaggtgcaggccaagcagcaggcctag

SEQ ID NO: 19894 - DNA, 537 bp, synthetic construct
  source 1..537: mol_type = other DNA; note = Synthetic coding sequence
atgagcggcttcagcacagaggagcgggccgcccccttcagcctggagtacagagtcttcctgaagaatgagaagggccagtacatcagccccttccatgacatccccatctatgctgacaaggatgtgttccacatggtggtggaggtgccccgctggagcaatgccaagatggagatcgccaccaaggaccccctgaaccccatcaagcaggatgtgaagaagggcaagctgcgctacgtggccaacctcttcccctacaagggctacatctggaactacggggccatcccccagacctgggaggaccccggccacaatgacaagcacacaggctgctgcggggacaatgaccccattgatgtgtgtgaaattggcagcaaggtgtgtgcccggggggagatcatcggcgtgaaggtgctgggcatcctggccatgattgatgaaggagaaacagactggaaggtgattgccatcaacgtggatgatcctgatgctgccaactacaacgtgtgcaacagcgtggtgatcctgtag

SEQ ID NO: 19895 - DNA, 870 bp, synthetic construct
  source 1..870: mol_type = other DNA; note = Synthetic coding sequence
atgagcggcttcagcacagaggagcgggccgcccccttcagcctggagtacagagtcttcctgaagaatgagaagggccagtacatcagccccttccatgacatccccatctatgctgacaaggatgtgttccacatggtggtggaggtgccccgctggagcaatgccaagatggagatcgccaccaaggaccccctgaaccccatcaagcaggatgtgaagaagggcaagctgcgctacgtggccaacctcttcccctacaagggctacatctggaactacggggccatcccccagacctgggaggaccccggccacaatgacaagcacacaggctgctgcggggacaatgaccccattgatgtgtgtgaaattggcagcaaggtgtgtgcccggggggagatcatcggcgtgaaggtgctgggcatcctggccatgattgatgaaggagaaacagactggaaggtgattgccatcaacgtggatgatcctgatgctgccaactacaatgacatcaatgatgtgaagaggctgaagccaggctacctggaggccaccgtggactggttccgccgctacaaggtgcctgatggcaagccagaaaatgaatttgccttcaatgctgagttcaaggacaaggactttgccatcgacatcatcaagagcacccatgaccactggaaggccctggtgaccaagaagaccaacgggaagggcatcagctgcatgaacaccaccctgtctgagagccccttcaagtgtgaccctgatgctgcccgggccatcgtggatgccctgcccccaccctgtgagagcgcctgcaccgtgcccacagatgtggacaagtggttccaccaccagaagaactag

SEQ ID NO: 19896 - DNA, 2103 bp, synthetic construct
  source 1..2103: mol_type = other DNA; note = Synthetic coding sequence
atgacagagcgctgcagcctgtggagcgccctgtctgctgctgcctgctgcttctaccggggcagctttgtgcagttcagcaaggagaagtacatcctggacagcagccctgagaagctgcacaaggagctggaggaggagctgaagctgagcagcacagacctgcggagccacgcctggtaccacggccgcatcccccgggaggtgtctgagaccctggtgcagagaaatggagacttcctgatccgggacagcctgaccagcctgggggactatgtgctgacctgccgctggaggaaccaggccctgcacttcaagatcaacaaggtggtggtgaaggccggggagagctacacccacatccagtacctgtttgagcaggagagctttgaccacgtgcctgccctggtgcgctaccacgtgggcagcaggaaggctgtgtctgagcagagcggggccatcatctactgccctgtgaacagaaccttccccctgcgctacctggaggccagctatggcctgggccagggcagcagcaagccagccagccctgtgagccccagcggccccaagggcagccacatgaagagaagatctgtgaccatgacagatggcctgacagctgacaaggtgaccaggagtgatggctgccccaccagcaccagcctgccccggccccgggacagcatccgcagctgtgccctgtccatggaccagatcccagacctgcacagccccatgagccccatcagcgagagccccagcagccctgcctacagcacagtgaccagggtgcatgctgccccagctgcccccagcgccacagccctgcctgccagccctgtggcccggcgcagcagcgagccccagctgtgccccggcagcgcccccaagacccacggggagagtgacaagggcccccacaccagccccagccacaccctgggcaaggccagccccagccccagcctgagcagctacagcgaccctgacagcggccactactgccagctgcagccccctgtgcggggcagccgggagtgggccgccacagagaccagcagccagcaggcccggagctatggagagcggctgaaggagctgtctgaaaatggagcccctgagggggactggggcaagaccttcaccgtgcccatcgtggaggtgaccagcagcttcaacccagccaccttccagagcctgctgatcccccgggacaaccggcccctggaggtgggcctgctgaggaaggtgaaggagctgctggccgaggtggatgcccggaccctggcccggcacgtgaccaaggtggactgcctggtggcccgcatcctgggcgtgaccaaggagatgcagaccctgatgggcgtgcgctggggcatggagctgctgaccctgccccacggccggcagctgcggctggacctgctggagcgcttccacaccatgagcatcatgctggccgtggacatcctgggctgcaccggcagcgctgaggagcgggccgccctgctgcacaagaccatccagctggccgctgagctgcggggcaccatgggcaacatgttctcctttgctgctgtgatgggcgccctggacatggcccagatcagccggctggagcagacctgggtgaccctgcggcagaggcacacagagggcgccatcctgtatgagaagaagctgaagcccttcctgaagagcctgaatgaaggcaaggagggcccccccctgagcaacaccaccttcccccacgtgctgcccctcatcaccctgctggagtgtgacagcgcccctcctgagggccctgagccctggggcagcacagaacatggagtggaggtggtgctggcccacctggaggccgccaggacagtggcccaccacggcggcctgtaccacaccaatgctgaggtgaagctgcagggcttccaggcccggcctgagctgctggaggtgttcagcacagagttccagatgaggctgctgtggggcagccagggcgccagcagcagccaggccaggagatatgagaagtttgacaaggtgctgacagccctgagccacaagctggagcctgctgtgcgcagcagcgagctgtag

SEQ ID NO: 19897 - DNA, 2379 bp, synthetic construct
  source 1..2379: mol_type = other DNA; note = Synthetic coding sequence
atggccccagccctgcccagcccccacaaggctgtggcccggcctgagctgctgctggacacagctgcccacagcggcaagctgcgggccccagatggaggagagggcgcagaatgtgccggccacaatggaggccccagctggggcgtgggccagggccagagccaggagcccagccggcagggcatcccccaggccccctggctggtgtcctggcagaggcggggcttcccccccagcagcttctgccccggccccctgaggacagagaagctgcgggccggccgctgccccctgctgctgtgtggcggggccgccggggagcctgaggccggcagtgactatgtgaagttcagcaaggagaagtacatcctggacagcagccctgagaagctgcacaaggagctggaggaggagctgaagctgagcagcacagacctgcggagccacgcctggtaccacggccgcatcccccgggaggtgtctgagaccctggtgcagagaaatggagacttcctgatccgggacagcctgaccagcctgggggactatgtgctgacctgccgctggaggaaccaggccctgcacttcaagatcaacaaggtggtggtgaaggccggggagagctacacccacatccagtacctgtttgagcaggagagctttgaccacgtgcctgccctggtgcgctaccacgtgggcagcaggaaggctgtgtctgagcagagcggggccatcatctactgccctgtgaacagaaccttccccctgcgctacctggaggccagctatggcctgggccagggcagcagcaagccagccagccctgtgagccccagcggccccaagggcagccacatgaagagaagatctgtgaccatgacagatggcctgacagctgacaaggtgaccaggagtgatggctgccccaccagcaccagcctgccccggccccgggacagcatccgcagctgtgccctgtccatggaccagatcccagacctgcacagccccatgagccccatcagcgagagccccagcagccctgcctacagcacagtgaccagggtgcatgctgccccagctgcccccagcgccacagccctgcctgccagccctgtggcccggcgcagcagcgagccccagctgtgccccggcagcgcccccaagacccacggggagagtgacaagggcccccacaccagccccagccacaccctgggcaaggccagccccagccccagcctgagcagctacagcgaccctgacagcggccactactgccagctgcagccccctgtgcggggcagccgggagtgggccgccacagagaccagcagccagcaggcccggagctatggagagcggctgaaggagctgtctgaaaatggagcccctgagggggactggggcaagaccttcaccgtgcccatcgtggaggtgaccagcagcttcaacccagccaccttccagagcctgctgatcccccgggacaaccggcccctggaggtgggcctgctgaggaaggtgaaggagctgctggccgaggtggatgcccggaccctggcccggcacgtgaccaaggtggactgcctggtggcccgcatcctgggcgtgaccaaggagatgcagaccctgatgggcgtgcgctggggcatggagctgctgaccctgccccacggccggcagctgcggctggacctgctggagcgcttccacaccatgagcatcatgctggccgtggacatcctgggctgcaccggcagcgctgaggagcgggccgccctgctgcacaagaccatccagctggccgctgagctgcggggcaccatgggcaacatgttctcctttgctgctgtgatgggcgccctggacatggcccagatcagccggctggagcagacctgggtgaccctgcggcagaggcacacagagggcgccatcctgtatgagaagaagctgaagcccttcctgaagagcctgaatgaaggcaaggagggcccccccctgagcaacaccaccttcccccacgtgctgcccctcatcaccctgctggagtgtgacagcgcccctcctgagggccctgagccctggggcagcacagaacatggagtggaggtggtgctggcccacctggaggccgccaggacagtggcccaccacggcggcctgtaccacaccaatgctgaggtgaagctgcagggcttccaggcccggcctgagctgctggaggtgttcagcacagagttccagatgaggctgctgtggggcagccagggcgccagcagcagccaggccaggagatatgagaagtttgacaaggtgctgacagccctgagccacaagctggagcctgctgtgcgcagcagcgagctgtag

SEQ ID NO: 19898 - DNA, 2112 bp, synthetic construct
  source 1..2112: mol_type = other DNA; note = Synthetic coding sequence
atgacagctgtgggccgccgctgcccagccctgggcagcagaggagctgctggggagcctgaggccggcagtgactatgtgaagttcagcaaggagaagtacatcctggacagcagccctgagaagctgcacaaggagctggaggaggagctgaagctgagcagcacagacctgcggagccacgcctggtaccacggccgcatcccccgggaggtgtctgagaccctggtgcagagaaatggagacttcctgatccgggacagcctgaccagcctgggggactatgtgctgacctgccgctggaggaaccaggccctgcacttcaagatcaacaaggtggtggtgaaggccggggagagctacacccacatccagtacctgtttgagcaggagagctttgaccacgtgcctgccctggtgcgctaccacgtgggcagcaggaaggctgtgtctgagcagagcggggccatcatctactgccctgtgaacagaaccttccccctgcgctacctggaggccagctatggcctgggccagggcagcagcaagccagccagccctgtgagccccagcggccccaagggcagccacatgaagagaagatctgtgaccatgacagatggcctgacagctgacaaggtgaccaggagtgatggctgccccaccagcaccagcctgccccggccccgggacagcatccgcagctgtgccctgtccatggaccagatcccagacctgcacagccccatgagccccatcagcgagagccccagcagccctgcctacagcacagtgaccagggtgcacgccgccccagctgcccccagcgccacagccctgcctgccagccctgtggcccggcgcagcagcgagccccagctgtgccccggcagcgcccccaagacccatggagagagtgacaagggcccccacaccagccccagccacaccctgggcaaggccagccccagccccagcctgagcagctacagcgaccctgattctggccactactgccagctgcagccccctgtgcggggcagccgggagtgggccgccacagagaccagcagccagcaggcccggagctatggagagcggctgaaggagctgtctgaaaatggagcccctgagggggactggggcaagaccttcaccgtgcccatcgtggaggtgaccagcagcttcaacccagccaccttccagagcctgctgatcccccgggacaaccggcccctggaggtgggcctgctgaggaaggtgaaggagctgctggccgaggtggatgcccggaccctggcccggcacgtgaccaaggtggactgcctggtggcccgcatcctgggcgtgaccaaggagatgcagaccctgatgggcgtgcgctggggcatggagctgctgaccctgccccacggccggcagctgcggctggacctgctggagcgcttccacaccatgagcatcatgctggccgtggacatcctgggctgcaccggcagcgctgaggagagagctgccctgctgcacaagaccatccagctggccgctgagctgcggggcaccatgggcaacatgttctcctttgctgctgtgatgggcgccctggacatggcccagatcagccggctggagcagacctgggtgaccctgcggcagaggcacacagaaggagccatcctgtatgagaagaagctgaagcccttcctgaagagcctgaatgaaggcaaggagggcccccccctgagcaacaccaccttcccccacgtgctgcccctcatcaccctgctggagtgtgacagcgcccctcctgagggccctgagccctggggcagcacagagcacggcgtggaggtggtgctggcccacctggaggccgccaggacagtggcccaccacggcggcctgtaccacaccaatgctgaggtgaagctgcagggcttccaggcccggcctgagctgctggaggtgttcagcacagagttccagatgaggctgctgtggggcagccagggcgccagcagcagccaggcccggcgctatgagaagtttgacaaggtgctgacagccctgagccacaagctggagcctgctgtgcgcagcagcgagctgtag

SEQ ID NO: 19899 - DNA, 1869 bp, synthetic construct
  source 1..1869: mol_type = other DNA; note = Synthetic coding sequence
atggaccagctgccccagaagaacctgctgcggctgcaccctgctggcagcgctggctgcagcactggagtggagagcagctccatggatggcttctggatggaggtggagcagatccagcagagagatgagctgcgggaggaggacagcggcggcaatgaaggccagctgcctgaggagggggaggccgagagccagtggctgcaggacaccggcctgagcggcctgctgggcggcctgggcctggatggagaccaccaggagctgctgagcaccctgacccagacccaggtggccgctgtgtgccggcggctggacatctatgcccggtctgtgcggcggcagcacaagacccctgtgagagatgtgagagatgtgtttggagtcttcaacagcggcaagatgagcagtgaaaatggagacagcggcatgaagggggcccagctgagcagcggggccagcaagtttcctcctgctgctgagcccggcggcctgcaggagcaggccggccgggaggaggccttcaacatggattctgcctacagcgagcaggccgctgtgctgctgcagaggagccggcccagcagaggaggcaccagcgcctggggcaagtgcagcctgcccaagttcaccgtgcccaagggccgcctgggcgtgacccgcatcggggacctgagcctgcaggacatgaggaaggtgcccagcctggccctgattgagctgacagccctgtgtgacatcctgggcctggacctgaagaggagcaaggccggcaagtggaaggctgctgagacccggctgtttggagtgcccctggacagcctgctggaggccgaccacaaggtgctgcccagcacccaggtgcccctggtgctgcaggccctgctgagctgcctggagaagaggggcctggacatggagggcatcctgcgggtgcccggcagccaggcccgggtgaagggcctggagcagaagctggagcgggacttctacgccggcctcttctcctgggatgaggtgcaccacaatgatgccagtgacctgctgaagcgcttcatcaggaagctgcccacccccctgctgacagctgagtacctgcctgcctttgctgtggtgcccaacatccccaacctgaagcagaggctgcaggtgctgcacctgctgatcctgatcctgcctgagcccaacagaaatgccctgaaggccctgctggagttcctgaggaaggtggtggcccgggagcagcacaacaagatgaccctgagaaatgtgtccacagtgatggcccccaacctcttcctgcaccagggccggccccccaagctgcccaagggcaaggagaagcagctggccgagggcgctgctgaggtggtgcagatcatggtgcactaccaggacctgctgtggacagtggccagcttcctggtggcccaggtgaggaagctgaatgacagcagcagccggcggccccagctgtgtgatgctggcctgaagacctggctgcggaggatgcacgccgaccgggacaaggctggagatggcctggaggccacccccaaggtggccaagatccaggtggtgtggcccatcaaggaccccctgaaggtgcccctgacccccagcaccaaggtggcccacgtgctgcggcagttcacagagcacctgagccctggcagcaagggccaggaggacagcgaggacatggacagcctgctgctgcaccaccgctccatggagagcgccaacatcctgctgtatgaggtgggcggcaacatcaatgagcaccggctggaccctgatgcctacctgctggacctgtaccgggccaacccccacggggagtgggtgctgaagcagaaccccacctag

SEQ ID NO: 19900 - DNA, 846 bp, synthetic construct
  source 1..846: mol_type = other DNA; note = Synthetic coding sequence
atggccacagagctgcagtgcccagacagcatgccctgccacaaccagcaggtgaacagcgccagcacccccagccctgagcagctgcggcctggggacctgatcctggaccatgctgggggcaacagagccagccgggccaaggtgatcctgctgaccggctacgcccacagcagcctgcctgctgagctggacagcggggcctgtggcggcagcagcctgaacagcgagggcaacagcggcagcggggacagcagcagctatgatgccccagctggcaacagcttcctggaggactgtgagctgagccggcagatcggggcccagctgaagctgctgcccatgaatgaccagatccgggagctgcagaccatcatccgggacaagacagccagcagaggagacttcatgttttctgctgacaggctcatccggctggtggtggaggagggcctgaaccagctgccctacaaggagtgcatggtgaccacccccaccggctacaagtatgagggcgtgaagtttgagaagggcaactgtggggtgtccatcatgaggtctggagaggccatggagcagggcctgcgggactgctgccgcagcatccgcatcggcaagatcctgatccagagtgatgaggagacccagagggccaaggtgtactatgccaagttccccccagacatctacagaaggaaggtgctgctgatgtaccccatcctgagcactggaaacacagtcatcgaggccgtgaaggtgctgattgaacatggagtgcagcccagcgtcatcatcctgctgagcctcttcagcaccccccacggggagttctccatgaggcagtag

SEQ ID NO: 19901 - DNA, 930 bp, synthetic construct
  source 1..930: mol_type = other DNA; note = Synthetic coding sequence
atggccacagagctgcagtgcccagacagcatgccctgccacaaccagcaggtgaacagcgccagcacccccagccctgagcagctgcggcctggggacctgatcctggaccatgctgggggcaacagagccagccgggccaaggtgatcctgctgaccggctacgcccacagcagcctgcctgctgagctggacagcggggcctgtggcggcagcagcctgaacagcgagggcaacagcggcagcggggacagcagcagctatgatgccccagctggcaacagcttcctggaggactgtgagctgagccggcagatcggggcccagctgaagctgctgcccatgaatgaccagatccgggagctgcagaccatcatccgggacaagacagccagcagaggagacttcatgttttctgctgacaggctcatccggctggtggtggaggagggcctgaaccagctgccctacaaggagtgcatggtgaccacccccaccggctacaagtatgagggcgtgaagtttgagaagggcaactgtggggtgtccatcatgaggtctggagaggccatggagcagggcctgcgggactgctgccgcagcatccgcatcggcaagatcctgatccagagtgatgaggagacccagagggccaaggtgtactatgccaagttccccccagacatctacagaaggaaggtgctgctgatgtaccccatcctgagcactggaaacacagtcatcgaggccgtgaaggtgctgattgaacatggagtgcagcccagcgtcatcatcctgctgagcctcttcagcaccccccacggggccaagagcatcatccaggagttccctgagatcaccatcctgaccacagaggtgcaccctgtggcccccacccacttcggccagaagtacttcggcacagactag

SEQ ID NO: 19902 - DNA, 633 bp, synthetic construct
  source 1..633: mol_type = other DNA; note = Synthetic coding sequence
atggtgtctggcagcgagcagaagttcctgattggcctgggcaagagccagatctacacctgggatggccggcagagcgaccgctggatcaagctggacctgaagacagagctgccccgggacaccctgctgtctgtggagatcgtgcatgagctgaagggggagggcaaggcccagaggaagatcagcgccatccacatcctggatgtgctggtgctgaatggaacagatgtgcgggagcagcacttcaaccagaggatccagctggccgagaagtttgtgaaggctgtgtccaagcccagcaggccagacatgaaccccatccgggtgaaggaggtgtaccgcctggaggagatggagaagatctttgtgcggctggagatgaagatcatcaagggcagcagcggcacccccaagctgagctacacaggaagagatgacagacactttgtgcccatgggcctgtacatcgtgaggacagtgaatgagccctggaccatgggcttcagcaagagcttcaagaagaagttcttctacaacaagaagaccaaggacagcacctttgacctgcctgctgacagcatcgcccccttccacctgcccagcctggcctgcctgagcaagatggactag

SEQ ID NO: 19903 - DNA, 1119 bp, synthetic construct
  source 1..1119: mol_type = other DNA; note = Synthetic coding sequence
atgaagagaagaacagatcctgagtgcacagcccccatcaagaagcagaagaagagggtggccgagctggccctgagcctgagcagcaccagtgatgatgagccccccagctctgtgtcccatggagccaaggccagcaccaccagcctgagcggcagtgacagcgagacagagggcaagcagcacagcagtgacagctttgatgatgccttcaaggctgacagcctggtggagggcaccagcagccgctacagcatgtacaacagcgtgtcccagaagctgatggccaagatgggcttccgggagggggagggcctgggcaagtacagccagggcaggaaggacatcgtggaggccagcagccagaagggcagaagaggcctgggcctgaccctgcggggctttgaccaggagctgaatgtggactggagagatgagcctgagcccagcgcctgtgagcaggtgtcctggttccctgagtgcaccacagagatcccagacacccaggagatgtctgactggatggtggtgggcaagaggaagatgatcattgaagatgaaacagagttctgtggggaggagctgctgcacagcgtgctgcagtgcaagaagcccctggtgaaggaccgggaggccgagctgctgtactttgctgatgtgtgtgccggccctgggggcttctctgaatatgtgctgtggaggaagaagtggcacgccaagggcttcggcatgaccctgaagggccccaatgacttcaagctggaggacttctacagcgccagcagcgagctgtttgagccctactatggagagggcggcattgatggagatggagacatcaccaggcctgagaacatcagcgccttcaggaactttgtgctggacaacacagacaggaagggcgtgcacttcctgatggctgatggcggcttctctgtggagggccaggagaacctgcaggagatcctgagcaagcagctgctgctgtgccagttcctgatggccctgagcatcgtgaggactggaggccacttcatctgcaagacctttgacctcttcacccccttctctgtgggcctggtgtacctgctgtactgctgctttgagcgggtgtgctag

SEQ ID NO: 19904 - DNA, 615 bp, synthetic construct; identical to SEQ ID NO: 19509
  source 1..615: mol_type = other DNA; note = Synthetic coding sequence

SEQ ID NO: 19905 - DNA, 1443 bp, synthetic construct
  source 1..1443: mol_type = other DNA; note = Synthetic coding sequence
atggccggctacctgtctgagagtgactttgtgatggtggaggagggcttcagcacccgggacctgctgaaggagctgaccctgggcgccagccaggccaccacagatgaggtggccgccttctttgtggccgacctgggcgccatcgtgaggaagcacttctgcttcctgaagtgcctgccccgggtgcggcccttctatgctgtgaagtgcaacagcagccctggggtgctgaaggtgctggcccagctgggcctgggcttcagctgtgccaacaaggccgagatggagctggtgcagcacatcggcatcccagccagcaagatcatctgtgccaacccctgcaagcagatcgcccagatcaagtatgctgccaagcacggcatccagctgctgagctttgacaatgagatggagctggccaaggtggtgaagagccaccccagcgccaagatggtgctgtgcatcgccacagatgacagccacagcctgagctgcctgagcctgaagtttggagtgtccctgaagagctgccgccacctgctggagaatgccaagaagcaccacgtggaggtggtgggcgtgtccttccacatcggcagcggctgcccagacccccaggcctatgcccagagcattgctgatgcccggctggtgtttgagatgggcacagagctgggccacaagatgcacgtgctggacctgggcggcggcttccctggaacagagggcgccaaggtgcgctttgaggagatcgccagcgtcatcaacagcgccctggacctgtacttccctgagggctgcggcgtggacatctttgctgagctgggccgctactacgtgaccagcgccttcaccgtggccgtgtccatcatcgccaagaaggaggtgctgctggaccagcccggccgggaggcccccctgcccccaccccacatcgccacctgtgccgccagcgagcccagccccccagcagaagaaaatggcagcaccagcaagaccatcgtgtaccacctggatgagggcgtgtatggcatcttcaacagcgtgctgtttgacaacatctgccccacccccatcctgcagaagaagcccagcacagagcagcccctgtacagcagcagcctgtggggccctgctgtggatggctgtgactgtgtggccgagggcctgtggctgccccagctgcacgtgggggactggctggtgtttgacaacatgggcgcctacacagtgggcatgggcagccccttctggggcacccaggcctgccacatcacctacgccatgagccgggtggcctgggaggccctgcggcggcagctgatggctgctgagcaggaggatgatgtggagggcgtgtgcaagcccctgagctgtggctgggagatcacagacaccctgtgtgtgggccctgtgttcaccccagccagcatcatgtag

SEQ ID NO: 19906 - DNA, 1383 bp, synthetic construct; identical to SEQ ID NO: 18687
  source 1..1383: mol_type = other DNA; note = Synthetic coding sequence

SEQ ID NO: 19907 - DNA, 2508 bp, synthetic construct
  source 1..2508: mol_type = other DNA; note = Synthetic coding sequence
atgaagagaagaacagatcctgagtgcacagcccccatcaagaagcagaagaagagggtggccgagctggccctgagcctgagcagcaccagtgatgatgagccccccagctctgtgtcccatggagccaaggccagcaccaccagcctgagcggcagtgacagcgagacagagggcaagcagcacagcagtgacagctttgatgatgccttcaaggctgacagcctggtggagggcaccagcagccgctacagcatgtacaacagcgtgtcccagaagctgatggccaagatgggcttccgggagggggagggcctgggcaagtacagccagggcaggaaggacatcgtggaggccagcagccagaagggcagaagaggcctgggcctgaccctgcggggctttgaccaggagctgaatgtggactggagagatgagcctgagcccagcgcctgtgagcaggtgtcctggttccctgagtgcaccacagagatcccagacacccaggagatgtctgactggatggtggtgggcaagaggaagatgatcattgaagatgaaacagagttctgtggggaggagctgctgcacagcgtgctgcagtgcaagtctgtgtttgatgtgctggatggagaggagatgagaagagcccggacccgggccaacccctatgagatgatccggggcgtcttcttcctgaacagagctgccatgaagatggccaacatggactttgtgtttgacaggatgttcaccaacccccgggacagctatggcaagcccctggtgaaggaccgggaggccgagctgctgtactttgctgatgtgtgtgccggccctgggggcttctctgaatatgtgctgtggaggaagaagtggcacgccaagggcttcggcatgaccctgaagggccccaatgacttcaagctggaggacttctacagcgccagcagcgagctgtttgagccctactatggagagggcggcattgatggagatggagacatcaccaggcctgagaacatcagcgccttcaggaactttgtgctggacaacacagacaggaagggcgtgcacttcctgatggctgatggcggcttctctgtggagggccaggagaacctgcaggagatcctgagcaagcagctgctgctgtgccagttcctgatggccctgagcatcgtgaggactggaggccacttcatctgcaagacctttgacctcttcacccccttctctgtgggcctggtgtacctgctgtactgctgctttgagcgggtgtgcctcttcaagcccatcaccagcaggcctgccaacagcgagagatatgtggtgtgcaagggcctgaaggtgggcattgatgatgtgcgggactacctgtttgctgtgaacatcaagctgaaccagctgaggaacacagacagtgatgtgaacctggtggtgcccctggaggtgatcaagggggaccacgagttcacagactacatgatccgcagcaatgaaagccactgcagcctgcagatcaaggccctggccaagatccacgcctttgtgcaggacaccaccctgtctgagccccggcaggccgagatcaggaaggagtgcctgcggctgtggggcatcccagaccaggcccgggtggcccccagcagcagtgaccccaagagcaagttctttgagctgatccagggcacagaaattgacatcttctcctacaagcccaccctgctgaccagcaagaccctggagaagatccggcctgtgtttgactaccgctgcatggtgtctggcagcgagcagaagttcctgattggcctgggcaagagccagatctacacctgggatggccggcagagcgaccgctggatcaagctggacctgaagacagagctgccccgggacaccctgctgtctgtggagatcgtgcatgagctgaagggggagggcaaggcccagaggaagatcagcgccatccacatcctggatgtgctggtgctgaatggaacagatgtgcgggagcagcacttcaaccagaggatccagctggccgagaagtttgtgaaggctgtgtccaagcccagcaggccagacatgaaccccatccgggtgaaggaggtgtaccgcctggaggagatggagaagatctttgtgcggctggagatgaagatcatcaagggcagcagcggcacccccaagctgagctacacaggaagagatgacagacactttgtgcccatgggcctgtacatcgtgaggacagtgaatgagccctggaccatgggcttcagcaagagcttcaagaagaagttcttctacaacaagaagaccaaggacagcacctttgacctgcctgctgacagcatcgcccccttccacatctgctactacggccgcctcttctgggagtggggagatggcatccgggtgcatgacagccagaagccccaggaccaggacaagctgagcaaggaggatgtgctgtccttcatccagatgcaccgggcctag

SEQ ID NO: 19908 - DNA, 252 bp, synthetic construct
  source 1..252: mol_type = other DNA; note = Synthetic coding sequence
tgacaggagctgctgaaggagaagaccctggccgagcagaacctggaggacacccggcagcagctgctggccgcccggagcagccaggccaaggccatcaacaccctggagaccagggtgcgggagctggagcagaccctgcaggccagcgaggagcagctgcagcagagcaagggcatcgtggccgcccaggagacccagatccaggagctggtgtctgcctactggagctgctgcatccctggcccctag

SEQ ID NO: 19909 - DNA, 2304 bp, synthetic construct
  source 1..2304: mol_type = other DNA; note = Synthetic coding sequence
atgtttgccaagctgaagaagaagattgctgaggagacagctgtggcccagaggcctggaggagccacccgcatccccaggtctgtgtccaaggagagcgtggcctccatgggcgctgacagcggagatgactttgccagtgatggcagcagcagccgggaggacctgagcagccagctgctgcggagaaatgagcagatcaggaagctggaggcccggctgagtgactatgcagagcaggtgaggaacctgcagaagatcaaggagaagctggagatcgccctggagaagcaccaggacagctccatgaggaagttccaggagcagaatgagaccttccaggccaacagagccaagatggccgagggcctggccctggccctggccaggaaggaccaggagtggagcgagaagatggaccagctggagaaggagaagaacatcctgacagcccagctgcaggagatgaagaaccagagcatgaacctcttccagaggagagatgagatggatgagctggagggcttccagcagcaggagctgagcaagatcaagcacatgctgctgaagaaggaggagagcctgggcaagatggagcaggagctggaggcccggacccgggagctgagcaggacccaggaggagctgatgaacagcaaccagatgagcagtgacctgagccagaagctggaggagctgcagaggcactacagcaccctggaggagcagagggaccacgtgattgccagcaagacaggagctgagagcaagatcacagccctggagcagaaggagcaggagctgcaggccctgatccagcagctgagcattgacctgcagaaggtgacagctgagacccaggagaaggaggatgtgatcacccacctgcaggagaaggtggccagcctggagaagaggctggagcagaacctgagcggggaggagcacctgcaggagctgctgaaggagaagaccctggccgagcagaacctggaggacacccggcagcagctgctggccgcccggagcagccaggccaaggccatcaacaccctggagaccagggtgcgggagctggagcagaccctgcaggccagcgaggagcagctgcagcagagcaagggcatcgtggccgcccaggagacccagatccaggagctggccgccgccaaccaggagagcagccacgtgcagcagcaggccctggccctggagcagcagttcctggagaggacccaggccctggaggcccagatcgtggccctggagaggaccagggctgctgaccagaccacagctgagcagggcatgaggcagctggagcaggagaatgctgccctgaaggaatgtagaaatgaatatgaaagaagcctgcagaaccaccagtttgagctgaagaagctgaaggaggagtggagccagcgggagatcgtgtctgtggccatggcccaggccctggaggaggtgaggaagcagcgggaggagttccagcagcaggccgccaacctgacagccatcattgatgagaaggagcagaacctgcgggagaagacagaggtgctgctgcagaaggagcaggagatcctgcagctggagcggggccacaacagcgccctgctgcagatccaccagctgcaggccgagctggaggccctgcggaccctgaaggccgaggaggccgctgtggtggccgagcaggaggacctgctgcggctgcggggccccctgcaggccgaggccctgtctgtgaatgaaagccacgtgaccagccgggccatgcaggaccccgtcttccagctgcccacagctggccgcacccccaacggggaggtgggcgccatggacctgacccagctgcagaaggagaagcaggacctggagcagcagctgctggagaagaacaagaccatcaagcagatgcagcagaggatgctggagctgaggaagaccctgcagaaggagctgaagatccggccagacaatgagctgtttgaggtgcgggagaagccaggccctgagatggccaacatggcccccagcgtgaccaacaacacagacctgacagatgcccgggagatcaactttgagtacctgaagcacgtggtgctgaagttcatgagctgccgggagagcgaggccttccacctgatcaaggctgtgtctgtgctgctgaacttcagccaggaggaggagaacatgctgaaggagaccctggagtacaagatgtcctggtttggcagcaagccagcccccaagggcagcatccggcccagcatcagcaacccccgcatcccctggagctag

SEQ ID NO: 19910 - DNA, 291 bp, synthetic construct
  source 1..291: mol_type = other DNA; note = Synthetic coding sequence
tgagccaagatcaaggcccgggacctgcggggcaagaagaaggaggagctgctgaagcagctggatgacctgaaggtggagctgagccagctgcgggtggccaaggtgactggaggagctgccagcaagctgagcaagatccgggtggtgaggaagagcatcgcccgggtgctgaccgtcatcaaccagacccagaaggagaacctgaggaagttctacaaggctgctgctgggggcccctgcatccagatggacagagtgctgccccagcccccagcctgcagctgctag

SEQ ID NO: 19911 - DNA, 1035 bp, synthetic construct
  source 1..1035: mol_type = other DNA; note = Synthetic coding sequence
atgagaagaagaagagaggaggagggcatccagctgaggaagcagaagcgggagcagcagctgttcaagagaagaaatgtggagctgatcaatgaggaggccgccatgtttgacagcctgctgatggacagctatgtgagcagcaccaccggggagagcgtcatcacccgggagatggtggagatgctgttcagtgatgacagcgacctgcagctggccaccacccagaagttcaggaagctgctgagcaaggagcccagcccccccattgatgaagtcatcaacaccccccgggtggtggacagatttgtggagttcctgaagagaaatgaaaactgcaccctgcaggccgtgtgggccctgggcaacattgctggggacagctctgtgtgccgggactatgtgctgaactgcagcatcctgaaccccctgctgaccctgctgaccaagagcacccggctgaccatgaccagaaatgctgtgtgggccctgagcaacctgtgccggggcaagaaccccccacctgagtttgccaaggtgagcccctgcctgcctgtgctgagccggctgctcttcagcagtgacagcgacctgctggctgatgcctgctgggccctgagctacctgagtgatggccccaatgagaagatccaggccgtgattgattctggagtgtgccggcggctggtggagctgctgatgcacaatgactacaaggtggccagccctgccctgcgggctgtgggcaacatcgtgactggagatgacatccagacccaggtgatcctgaactgcagcgccctgccctgcctgctgcacctgctgagcagccccaaggagagcatcaggaaggaggcctgctggaccatcagcaacatcacagctggcaacagagcccagatccaggccgtgattgatgccaacatcttccctgtgctgattgagatcctgcagaaggccgagttccgcaccaggaaggaggccgcctgggccatcaccaatgccaccagcggcggcaccccagagcagatctag

SEQ ID NO: 19912 - DNA, 582 bp, synthetic construct; identical to SEQ ID NO: 18345
  source 1..582: mol_type = other DNA; note = Synthetic coding sequence

SEQ ID NO: 19913 - DNA, 1611 bp, synthetic construct
  source 1..1611: mol_type = other DNA; note = Synthetic coding sequence
atggagaccatggccagccctgggaaggacaactacaggatgaagagctacaagaacaatgccctgaaccctgaggagatgagaagaagaagagaggaggagggcatccagctgaggaagcagaagcgggagcagcagctgttcaagagaagaaatgtggagctgatcaatgaggaggccgccatgtttgacagcctgctgatggacagctatgtgagcagcaccaccggggagagcgtcatcacccgggagatggtggagatgctgttcagtgatgacagcgacctgcagctggccaccacccagaagttcaggaagctgctgagcaaggagcccagcccccccattgatgaagtcatcaacaccccccgggtggtggacagatttgtggagttcctgaagagaaatgaaaactgcaccctgcagtttgaagctgcctgggccctgaccaacatcgccagcggcaccagccagcagaccaagatcgtcatcgaggccggggctgtgcccatcttcatcgagctgctgaacagcgactttgaagatgtgcaggagcaggccgtgtgggccctgggcaacattgctggggacagctctgtgtgccgggactatgtgctgaactgcagcatcctgaaccccctgctgaccctgctgaccaagagcacccggctgaccatgaccagaaatgctgtgtgggccctgagcaacctgtgccggggcaagaaccccccacctgagtttgccaaggtgagcccctgcctgcctgtgctgagccggctgctcttcagcagtgacagcgacctgctggctgatgcctgctgggccctgagctacctgagtgatggccccaatgagaagatccaggccgtgattgattctggagtgtgccggcggctggtggagctgctgatgcacaatgactacaaggtggccagccctgccctgcgggctgtgggcaacatcgtgactggagatgacatccagacccaggtgatcctgaactgcagcgccctgccctgcctgctgcacctgctgagcagccccaaggagagcatcaggaaggaggcctgctggaccatcagcaacatcacagctggcaacagagcccagatccaggccgtgattgatgccaacatcttccctgtgctgattgagatcctgcagaaggccgagttccgcaccaggaaggaggccgcctgggccatcaccaatgccaccagcggcggcaccccagagcagatccgctacctggtgtccctgggctgcatcaagcccctgtgtgacctgctgactgtgatggacagcaagatcgtgcaggtggccctgaatggcctggagaacatcctgcggctgggggagcaggagggcaagaggagcggcagcggcgtgaacccctactgcggcctcatcgaggaggcctacggcctggacaagattgagttcctgcagagccatgagaaccaggagatctaccagaaggcctttgacctgattgagcactactttggagtggaggatgatgacagcagcctggccccccaggtggatgagacccagcagcagttcatcttccagcagcctgaggcccccatggagggcttccagctgtag

SEQ ID NO: 19914 - DNA, 2769 bp, synthetic construct
  source 1..2769: mol_type = other DNA; note = Synthetic coding sequence
atgatcaccagcgctgctggcatcatcagcctgctggatgaagatgagccccagctgaaggagtttgccctgcacaagctgaatgctgtggtgaatgacttctgggccgagatcagcgagagcgtggacaagattgaggtgctgtatgaagatgagggcttccgcagccggcagtttgctgccctggtggccagcaaggtgttctaccacctgggcgcctttgaggagagcctgaactatgccctgggcgctggggacctcttcaacgtgaatgacaacagtgaatatgtggagaccatcatcgccaagtgcatcgaccactacaccaagcagtgtgtggagaatgctgacctgcctgagggggagaagaagcccatcgaccagaggctggagggcatcgtgaacaagatgttccagcgctgcctggatgaccacaagtacaagcaggccatcggcatcgccctggagacccggcggctggatgtgtttgagaagaccatcctggagagcaatgatgtgcccggcatgctggcctacagcctgaagctgtgcatgagcctgatgcagaacaagcagttcaggaacaaggtgctgcgggtgctggtgaagatctacatgaacctggagaagccagacttcatcaacgtgtgccagtgcctgatcttcctggatgacccccaggccgtgtctgacatcctggagaagctggtgaaggaggacaacctgctgatggcctaccagatctgctttgacctgtatgaaagtgccagccagcagttcctgagcagcgtcatccagaacctgaggacagtgggcacccccatcgcctctgtgcccggcagcaccaacacaggcaccgtgcccggcagcgagaaggacagcgacagcatggagacagaggagaagaccagcagcgcctttgtgggcaagaccccagaggccagccctgagcccaaggaccagaccctgaagatgatcaagatcctgagcggggagatggccatcgagctgcacctgcagttcctgatccggaacaacaacacagacctgatgatcctgaagaacaccaaggatgctgtgagaaattctgtgtgccacacagccaccgtgattgccaacagcttcatgcactgcggcaccaccagtgaccagttcctgcgggacaacctggagtggctggcccgggccaccaactgggccaagttcaccgccacagccagcctgggcgtcatccacaagggccacgagaaggaggccctgcagctgatggccacctacctgcccaaggacaccagccctggcagcgcctaccaggagggcggcggcctgtatgccctgggcctcatccacgccaaccacggcggggacatcatcgactacctgctgaaccagctgaagaatgccagcaatgacatcgtgagacatggaggcagcctgggcctgggcctggccgccatgggcacagcccggcaggatgtgtatgacctgctgaagaccaacctgtaccaggatgatgctgtgactggagaggccgccggcctggccctgggcctggtgatgctgggcagcaagaatgcccaggccatcgaggacatggtgggctacgcccaggagacccagcacgagaagatcctgcggggcctggccgtgggcatcgccctggtgatgtatggccgcatggaggaggctgatgccctgattgagagcctgtgccgggacaaggaccccatcctgcggcgcagcggcatgtacacagtggccatggcctactgcggcagcggcaacaacaaggccatccggcggctgctgcacgtggccgtgtctgatgtgaatgatgatgtgagaagagctgctgtggagagcctgggcttcatcctcttccgcaccccagagcagtgccccagcgtggtgtccctgctgtctgagagctacaacccccacgtgcgctacggggccgccatggccctgggcatctgctgtgccggcactggaaacaaggaggccatcaacctgctggagcccatgaccaatgaccctgtgaactacgtgcggcagggcgccctgattgccagcgccctgatcatgatccagcagacagagatcacctgccccaaggtgaaccagttccggcagctgtacagcaaggtgatcaatgacaagcatgatgatgtgatggccaagtttggagccatcctggcccagggcatcctggatgctgggggccacaacgtgaccatcagcctgcagagcaggacaggccacacccacatgcccagcgtggtgggcgtgctggtgttcacccagttctggttctggttccccctgagccacttcctgagcctggcctacacccccacctgtgtgattggcctgaacaaggacctgaaggtgtccacagctgtgctgagcatcacagccaaggccaagaagaaggagaaggagaaggagaagaaggaggaggagaagatggaggtggatgaggccgagaagaaggaggagaaggagaagaagaaggagcctgagcccaacttccagctgctggacaacccagcccgggtgatgcctgcccagctgaaggtgctgaccatgcctgagacctgccgctaccagcccttcaagcccctgagcattggaggcatcatcatcctgaaggacaccagcgaggacatcgaggagctggtggagcctgtggccgcccacggccccaagattgaggaggaggagcaggagcctgagcccccagagccctttgagtacattgatgactag

SEQ ID NO: 19915 - DNA, 1227 bp, synthetic construct
  source 1..1227: mol_type = other DNA; note = Synthetic coding sequence
atgcctgaggagcaggccttctctgtgctggtgaagatcatgtttgattatggcctgcgggagctgttcaagcagaactttgaggacctgcactgcaagttctaccagctggagcggctgatgcaggagtacatcccagacctgtacaaccacttcctggacatcagcctggaggcccacatgtatgccagccagtggttcctgaccctcttcaccgccaagttccccctgtacatggtgttccacatcatcgacctgctgctgtgtgagggcatcagcgtcatcttcaacgtggccctgggcctgctgaagaccagcaaggatgacctgctgctgacagactttgaaggagccctgaagttcttccgggtgcagctgcccaagcgctacagaagtgaggagaatgccaagaagctgatggagctggcctgcaacatgaagatcagccagaagaagctgaagaagtatgagaaggagtaccacaccatgagggagcagcaggcccagcaggaggaccccatcgagagatttgagcgggagaacagaaggctgcaggaggccaacatgaggctggagcaggagaatgatgacctggcccacgagctggtgaccagcaagatcgccctgaggaaggacctggacaatgctgaggagaaggcagatgccctgaacaaggagctgctgatgaccaagcagaagctgattgatgctgaggaggagaagaggcggctggaggaggagagcgcccagctgaaggagatgtgccggcgggagctggacaaggccgagagcgagatcaagaagaacagcagcatcattggagactacaagcagatctgcagccagctgtctgagcggctggagaagcagcagacagccaacaaggtggagattgagaagatccggcagaaggtggatgactgtgagcgctgccgggagttcttcaacaaggagggccgggtgaagggcatcagcagcaccaaggaggtgctggatgaggacacagatgaggagaaggagaccctgaagaaccagctgcgggagatggagctggagctggcccagaccaagctgcagctggtggaggccgagtgcaagatccaggacctggagcaccacctgggcctggccctgaatgaggtgcaggccgccaagaagacctggttcaacagaaccctgagcagcatcaagacagccaccggggtgcagggcaaggagacctgctag

SEQ ID NO: 19916 - DNA, 3210 bp, synthetic construct
  source 1..3210: mol_type = other DNA; note = Synthetic coding sequence
atggatgacaaggcctctgtgggcaagatctctgtgtccagtgacagcgtgtccaccctgaacagtgaagattttgtgctggtgtcccggcagggagatgagacccccagcaccaacaacggcagtgatgatgagaagacaggcctgaagatcgtgggcaatggcagcgagcagcagctgcagaaggagctggctgatgtgctgatggacccccccatggatgaccagcctggagagaaggagctggtgaagaggagccagctggatggagaaggagatggccccctgagcaaccagctgagcgccagcagcaccatcaaccctgtgcccctggtgggcctgcagaagccagagatgagcctgcctgtgaagccaggccagggcgacagcgaggccagcagccccttcacccctgtggctgatgaggacagcgtggtgttcagcaagctgacctacctgggctgtgcctctgtgaatgcccccaggtctgaggtggaggccctgaggatgatgagcatcctgcggagccagtgccagatcagcctggatgtgaccctgtctgtgcccaacgtgtctgagggcatcgtgcggctgctggacccccagaccaacacagaaattgccaactaccccatctacaagatcctcttctgtgtgcggggccatgatggcaccccagagagtgactgctttgccttcacagagagccactacaatgctgagctgttccgcatccacgtgttccgctgtgagatccaggaggccgtgagccgcatcctgtacagctttgccacagccttccgccgcagcgccaagcagacccccctgagcgccacagctgccccccagaccccagacagcgacatcttcaccttctctgtgtccctggagatcaaggaggatgatggcaagggctacttctctgctgtgcccaaggacaaggaccggcagtgcttcaagctgcggcagggcatcgacaagaagatcgtcatctacgtgcagcagaccaccaacaaggagctggccatcgagcgctgcttcggcctgctgctgagccctgggaaggatgtgaggaacagcgacatgcacctgctggacctggagagcatgggcaagagcagtgatggcaagagctatgtgatcaccggctcctggaaccccaagagcccccacttccaggtggtgaatgaggagacccccaaggacaaggtgctcttcatgaccacagctgtggacctggtgatcacagaggtgcaggagcctgtgcgcttcctgctggagaccaaggtgcgggtgtgcagccccaatgaaagactcttctggcccttcagcaagaggagcaccacagagaacttcttcctgaagctgaagcagatcaagcagcgggagaggaagaacaacacagacaccctgtatgaggtggtgtgcctggagagcgagagcgagcgggagaggaggaagaccacagccagccccagcgtgcggctgccccagagcggcagccagagcagcgtcatccccagccccccagaagatgatgaggaggaggacaatgatgagcccctgctgagcggcagcggagatgtgtccaaagaatgtgccgagaagatcctggagacctggggcgagctgctgagcaagtggcacctgaacctgaatgtgcggcccaagcagctgagcagcctggtgagaaatggagtgcctgaggccctgcggggggaggtgtggcagctgctggccggctgccacaacaatgaccacctggtggagaagtaccgcatcctgatcaccaaggagagcccccaggacagcgccatcacccgggacatcaacagaaccttccctgcccatgactacttcaaggacacaggaggagatggccaggacagcctgtacaagatctgcaaggcctacagcgtgtatgatgaggagatcggctactgccagggccagagcttcctggccgctgtgctgctgctgcacatgcctgaggagcaggccttctctgtgctggtgaagatcatgtttgattatggcctgcgggagctgttcaagcagaactttgaggacctgcactgcaagttctaccagctggagcggctgatgcaggagtacatcccagacctgtacaaccacttcctggacatcagcctggaggcccacatgtatgccagccagtggttcctgaccctcttcaccgccaagttccccctgtacatggtgttccacatcatcgacctgctgctgtgtgagggcatcagcgtcatcttcaacgtggccctgggcctgctgaagaccagcaaggatgacctgctgctgacagactttgagggcgccctgaagttcttccgggtgcagctgcccaagcgctacagaagtgaagaaaatgccaagaagctgatggagctggcctgcaacatgaagatcagccagaagaagctgaagaagtatgagaaggagtaccacaccatgagggagcagcaggcccagcaggaggaccccatcgagagatttgaaagagaaaatagaaggctgcaggaggccaacatgaggctggagcaggagaatgatgacctggcccacgagctggtgaccagcaagatcgccctgaggaaggacctggacaatgctgaggagaaggcagatgccctgaacaaggagctgctgatgaccaagcagaagctgattgatgctgaggaggagaagaggcggctggaggaggagagcgcccagctgaaggagatgtgcagaagagagctggacaaggccgagagcgagatcaagaagaacagcagcatcatcggggactacaagcagatctgcagccagctgtctgagcggctggagaagcagcagacagccaacaaggtggagattgagaagatccggcagaaggtggatgactgtgagcgctgccgggagttcttcaacaaggagggccgggtgaagggcatcagcagcaccaaggaggtgctggatgaggacacagatgaggagaaggagaccctgaagaaccagctgcgggagatggagctggagctggcccagaccaagctgcagctggtggaggccgagtgcaagatccaggacctggagcaccacctgggcctggccctgaatgaggtgcaggccgccaagaagacctggttcaacagaaccctgagcagcatcaagacagccactggagtgcagggcaaggagacctgctag

SEQ ID NO: 19917 - DNA, 2808 bp, synthetic construct
  source 1..2808: mol_type = other DNA; note = Synthetic coding sequence
atgcagaggaagctggtgaccctggtgaactgccagctggtggaggaggagggccgggtgcgggccatgagagctgcccggagcctgggggagaggacagtgacagagctgatcctgcagcaccagaacccccagcagctgagcgccaacctgtgggccgctgtgcgggcccggggctgccagttcctgggccctgccatgcaggaggaggccctgaagctggtgctgctggccctggaggatggcagcgccctgagcaggaaggtgctggtgctgtttgtggtgcagaggctggagccccgcttcccccaggccagcaagaccagcatcggccacgtggtgcagctgctgtaccgggccagctgcttcaaggtgaccaagagagatgaggacagcagcctgatgcagctgaaggaggagttccgctcctatgaggccctgcggcgggagcatgatgcccagatcgtgcacatcgccatggaggccggcctgcgcatcagccctgagcagtggagcagcctgctgtatggagacctggcccacaagagccacatgcagagcatcatcgacaagctgcagagccctgagagctttgccaagtctgtgcaggagctgaccatcgtgctgcagaggactggagaccctgccaacctgaaccggctgcggccccacctggagctgctggccaacatcgaccccaacccagatgctgtgagccccacctgggagcagctggagaatgccatggtggccgtgaagacagtggtgcacggcctggtggacttcatccagaactacagcaggaaaggacatgagaccccccagccccagcccaacagcaagtacaagacctccatgtgccgggacctgcggcagcagggcggctgcccccggggcaccaactgcacctttgcccacagccaggaggagctggagaagtaccgcctgaggaacaagaagatcaatgccaccgtgaggaccttccccctgctgaacaaggtgggcgtgaacaacacagtgaccaccacagctggaaatgtcatctctgtgattggcagcacagagaccaccgggaagatcgtgcccagcaccaacggcatcagcaatgcagaaaattctgtgtcccagctgatcagccgcagcacagacagcaccctgcgggccctggagaccgtgaagaaggtgggcaaggtgggcgccaacggccagaatgctgctggccccagcgctgacagcgtgacagagaacaagattggcagcccccccaagacccctgtgtccaatgtggccgccaccagcgctggccccagcaatgtgggcacagagctgaacagcgtgccccagaagagcagccccttcctgaccagggtgcctgtgtacccaccccacagcgagaacatccagtacttccaggaccccaggacccagatcccctttgaggtgccccagtacccccagacaggctactacccacctccacccaccgtgcctgctggggtggccccctgtgtgcccaggtttgtgcgcagcaacaacgtgcctgagagcagcctgcccccagcctccatgccctatgctgaccactacagcaccttcagcccccgggacaggatgaacagcagcccctaccagcccccaccaccccagccctacggccctgtgccccctgtgcccagcggcatgtatgcccctgtgtatgacagccgccgcatctggaggcctcccatgtaccagagagatgacatcatccgcagcaacagcctgccccccatggatgtgatgcacagctctgtgtaccagaccagcctgcgggagcgctacaacagcctggatggctactacagcgtggcctgccagccccccagcgagcccaggaccaccgtgcccctgccccgggagccctgtggccacctgaagaccagctgtgaggagcagatccggaggaagccagaccagtgggcccagtaccacacccagaaggcccccctggtgagcagcaccctgcctgtggccacccagagccccaccccacccagccccctcttctctgtggacttccgggctgacttcagcgagagcgtgtctggcaccaagtttgaggaggaccacctgagccactacagcccctggagctgtggcaccatcggcagctgcatcaatgccatcgacagcgagcccaaggatgtgattgccaacagcaatgctgtgctgatggacctggacagcggagatgtgaagagaagagtgcacctgtttgagacccagaggaggaccaaggaggaggaccccatcatccccttcagtgatggccccatcatcagcaagtggggcgccatcagccgcagcagcaggacaggctaccacaccacagatcctgtgcaggccacagccagccagggcagcgccaccaagcccatctctgtgtctgactatgtgccctacgtgaatgctgtggacagccgctggagcagctatggaaatgaggccaccagcagcgcccactacgtggagcgggaccgcttcatcgtgacagacctgagcggccacaggaagcacagcagcactggagacctgctgagcctggagctgcagcaggccaagagcaacagcctgctgctgcagcgggaggccaatgccctggccatgcagcagaagtggaacagcctggatgagggccgccacctgaccctgaacctgctgagcaaggagattgagctgagaaatggagaggtgaagaagctgaacctgagcgccagctgcctgatgtacctgttctctgctgctgcctcctggctgtaccactactag

SEQ ID NO: 19918 - DNA, 1437 bp, synthetic construct
  source 1..1437: mol_type = other DNA; note = Synthetic coding sequence
atgcctgtgcaggccgcccagtggacagagttcctgagctgccccatctgctacaatgaatttgatgaaaatgtgcacaagcccatcagcctgggctgcagccacacagtgtgcaagacctgcctgaacaagctgcacaggaaggcctgcccctttgaccagacagccatcaacacagacattgatgtgctgcctgtgaactttgccctgctgcagctggtgggcgcccaggtgcctgaccaccagagcatcaagctgagcaacctgggggagaacaagcactatgaggtggccaagaagtgtgtggaggacctggccctgtacctgaagcccctgagcggcggcaagggcgtggccagcctgaaccagagcgccctgagccggcccatgcagaggaagctggtgaccctggtgaactgccagctggtggaggaggagggccgggtgcgggccatgagagctgcccggagcctgggggagaggacagtgacagagctgatcctgcagcaccagaacccccagcagctgagcgccaacctgtgggccgctgtgcgggcccggggctgccagttcctgggccctgccatgcaggaggaggccctgaagctggtgctgctggccctggaggatggcagcgccctgagcaggaaggtgctggtgctgtttgtggtgcagaggctggagccccgcttcccccaggccagcaagaccagcattggacatgtggtgcagctgctgtaccgggccagctgcttcaaggtgaccaagagagatgaggacagcagcctgatgcagctgaaggaggagttccgctcctatgaggccctgcggcgggagcatgatgcccagatcgtgcacatcgccatggaggccggcctgcgcatcagccctgagcagtggagcagcctgctgtatggagacctggcccacaagagccacatgcagagcatcatcgacaagctgcagagccctgagagctttgccaagtctgtgcaggagctgaccatcgtgctgcagaggactggagaccctgccaacctgaaccggctgcggccccacctggagctgctggccaacatcgaccccaacccagatgctgtgagccccacctgggagcagctggagaatgccatggtggccgtgaagacagtggtgcacggcctggtggacttcatccagaactacagcaggaagggccacgagaccccccagccccagcccaacagcaagtacaagacctccatgtgccgggacctgcggcagcagggcggctgcccccggggcaccaactgcacctttgcccacagccaggaggagctggagaagtaccgcctgaggaacaagaagatcaatgccacagaggtgctgaagcagcagggcaagctgttccaggtgcagacagagttccagatgcagaagacagtgttccccagctag

SEQ ID NO: 19919 - DNA, 3576 bp, synthetic construct; identical to SEQ ID NO: 19472
  source 1..3576: mol_type = other DNA; note = Synthetic coding sequence

SEQ ID NO: 19920 - DNA, 1569 bp, synthetic construct
  source 1..1569: mol_type = other DNA; note = Synthetic coding sequence
atggccgccagcgccaagaggaagcaggaggagaagcacctgaagatgctgcgggacatgacaggcctgccccacaacaggaagtgctttgactgtgaccagaggggccccacctacgtgaacatgacagtgggcagctttgtgtgcaccagctgcagcggcagcctgcggggcctgaaccccccccaccgggtgaagagcatctccatgaccaccttcacccagcaggagattgagttcctgcagaagcacggcaatgaggtgtgcaagcagatctggctgggcctgtttgatgacaggagcagcgccatcccagacttccgggacccccagaaggtgaaggagttcctgcaggagaagtatgagaagaagcgctggtacgtgcccccagagcaggccaaggtggtggcctctgtgcacgccagcatcagcggcagcagcgccagcagcaccagcagcaccccagaggtgaagcccctgaagagcctgctgggggacagcgcccccaccctgcacctgaacaagggcacccccagccagagccctgtggtgggccgcagccagggccagcagcaggagaagaagcagtttgacctgctgagtgacctgggcagtgacatctttgctgccccagccccccagagcacagccacagccaactttgccaactttgcccacttcaacagccatgctgggggcagcgctgcctctgtgaatgccaactttgcccactttgacaacttccccaagagcagcagcgctgactttggcaccttcaacaccagccagagccaccagacagccagcgctgtgtccaaggtgtccaccaacaaggccggcctgcagacagctgacaagtatgctgccctggccaacctggacaacatcttctctgctggccagggcggggaccagggcagcggcttcggcaccaccgggaaggcccctgtgggctctgtggtgtctgtgcccagccagagcagcgccagcagtgacaagtatgctgccctggccgagctggacagcgtcttcagcagcgctgccaccagcagcaatgcctacaccagcaccagcaatgccagcagcaatgtgtttggaacagtgcctgtggtggccagcgcccagacccagcctgccagcagctctgtgcctgccccctttggagccacccccagcaccaacccctttgtggccgccgccggccccagcgtggccagcagcaccaaccccttccagaccaatgcccggggggccacagctgccacctttggaacagcctccatgtccatgcccaccggcttcggcaccccagccccctacagcctgcccaccagcttcagcggcagcttccagcagcctgccttccctgcccaggccgccttcccccagcagacagccttcagccagcagcccaacggggccggctttgctgccttcggccagaccaagcctgtggtgaccccatttggccaggtggccgctgctggggtgagcagcaaccccttcatgaccggggcccccaccggccagttccccaccggcagcagcagcaccaaccccttcctgtag

SEQ ID NO: 19921 - DNA, 1524 bp, synthetic construct
  source 1..1524: mol_type = other DNA; note = Synthetic coding sequence
atgcaggatgacagcattgaggccagcaccagcatcagccagctgctgcgggagagctacctggccgagaccaggcaccggggcaacaatgaaagaagcagagctgagcccagcagcaacccctgccacttcggcagccccagcggggctgctgagggcggcggcggccaggatgacctgcctgacctgagcgccttcctgagccaggaggagctggatgaatctgtgaacctggcccggctggccatcaactatgaccccctggagaaggcagatgagacccaggccaggaagaggctgagcccagaccagatgaagcacagccccaacctgagctttgagcccaacttctgccaggacaaccccaggagccccaccagcagcaaggagagcccccaggaggccaagaggccccagtactgcagcgagacccagagcaagaaggtgttcctgaacaaggctgctgacttcatcgaggagctgagcagcctcttcaagagccacagcagcaagaggatccggccccgggcctgcaagaaccacaagagcaagctggagagccagaacaaggtgatgcaggagaacagcagcagcttcagtgacctgtctgaaagaagagagaggagctctgtgcccatccccatcccagctgacacccgggacaatgaggtgaaccacgccctggagcagcaggaggccaagagaagagaggccgagcaggccgccagcgaggccgccggcggggacaccaccccaggcagcagccccagcagcctgtactatgaggagcccctgggccagcccccacgcttcacccagaagctgcggagccgggaggtgcctgagggcaccagggtgcagctggactgcatcgtggtgggcatccccccaccccaggtgcgctggtactgtgagggcaaggagctggagaacagcccagacatccacatcgtgcaggccggcaacctgcacagcctgaccatcgccgaggcctttgaggaggacaccggccgctacagctgctttgccagcaacatctatggaacagacagcaccagcgctgagatctacatcgagggcgtgagcagcagtgacagcgagggggaccccaacaaggaggagatgaaccgcatccagaagcccaatgaggtgagcagcccccccaccaccagcgctgtgattcctcctgctgtgccccaggcccagcacctggtggcccagccccgggtggccaccatccagcagtgccagagccccaccaactacctgcagggcctggatggcaagcccatcatcgccgcccctgtgttcaccaagatgctgcagaacctgagcgccagcgagggccagctggtggtgtttgaatgtcgggtgaagggggcccccagccccaaggtggagtggtaccgggagggcaccctgattgaggacagcccagacttccgcatcctgcagaagaagcccaggtccatggccgagcccgggaaggatgacttcaacttcaacctgctggtgtatgaatag

SEQ ID NO: 19922 - DNA, 3150 bp, synthetic construct
  source 1..3150: mol_type = other DNA; note = Synthetic coding sequence
atgctgtgctggggcaatgccagctttggccagctgggcctgggcggcattgatgaggagatcgtgctggagcccaggaagagtgacttcttcatcaacaagagggtgagagatgtgggctgcggcctgcggcacacagtgtttgtgctggatgatggcaccgtgtacacctgtggctgcaatgacctgggccagctgggccacgagaagagcaggaagaagccagagcaggtggtggccctggatgcccagaacatcgtggccgtgtcctgtggggaggcccacaccctggccctgaatgacaagggccaggtgtatgcctggggcctggacagtgatggccagctgggcctggtgggcagcgaggagtgcatccgggtgcccaggaacatcaagagcctgagtgacatccagatcgtgcaggtggcctgtggctactaccacagcctggccctgagcaaggccagcgaggtgttctgctggggccagaacaagtatggccagctgggcctgggcacagactgcaagaagcagaccagcccccagctgctgaagagcctgctgggcatccccttcatgcaggtggccgccggcggggcccacagctttgtgctgaccctgagcggggccatcttcggctggggcaggaacaagtttggccagctgggcctgaatgatgaaaatgacagatatgtgcccaacctgctgaagagcctgcggagccagaagatcgtgtacatctgctgcggggaggaccacacagctgccctgaccaaggagggcggcgtcttcaccttcggggccggcggctacggccagctgggccacaacagcaccagccatgagatcaaccccaggaaggtgtttgagctgatgggcagcatcgtgacagaaattgcctgtggccggcagcacaccagcgcctttgtgcccagcagcggccgcatctacagctttggcctgggcggcaatggccagctgggcaccggcagcaccagcaacaggaagagccccttcaccgtgaagggcaactggtacccctacaacggccagtgcctgcctgacatcgacagcgaggagtacttctgtgtgaagaggatcttctctggaggagaccagagcttcagccactacagcagcccccagaactgtggccccccagatgacttccgctgccccaaccccaccaagcagatctggacagtgaatgaggccctgatccagaagtggctgagctaccccagcggccgcttccctgtggagatcgccaatgaaattgatggcaccttcagcagcagcggctgcctgaatggcagcttcctggccgtgtccaatgatgaccactacagaacaggcacccgcttcagcggcgtggacatgaatgctgcccggctgctcttccacaagctgatccagcctgaccacccccagatcagccagcaggtggccgccagcctggagaagaacctgatccccaagctgaccagcagcctgcctgatgtggaggccctgcgcttctacctgaccctgcctgagtgccccctgatgtctgacagcaacaacttcaccaccatcgccatcccctttggaacagccctggtgaacctggagaaggcccccctgaaggtgctggagaactggtggagcgtgctggagcccccactcttcctgaagatcgtggagctgttcaaggaggtggtggtgcacctgctgaagctgtacaagattggcatccccccatctgaaagacgcatcttcaacagcttcctgcacacagccctgaaggtgctggagatcctgcaccgggtgaatgagaagatgggccagatcatccagtatgacaagttctacatccacgaggtgcaggagctgattgacatcagaaatgactacatcaactgggtgcagcagcaggcctacggcatgctggccgacatccctgtgaccatctgcacctacccctttgtgtttgatgcccaggccaagaccaccctgctgcagacagatgctgtgctgcagatgcagatggccatcgaccaggcccaccggcagaatgtgagcagcctcttcctgcccgtcatcgagagcgtgaacccctgcctgatcctggtggtgcggcgggagaacatcgtgggagatgccatggaggtgctgaggaagaccaagaacatcgactacaagaagcccctgaaggtgatctttgtgggagaagatgctgtggatgctgggggcgtgaggaaggagttcttcctgctgatcatgagggagctgctggaccccaagtatggcatgttccgctactatgaggacagccgcctcatctggttcagtgacaagacctttgaggacagcgacctcttccacctgattggagtcatctgtggcctggccatctacaactgcaccatcgtggacctgcacttccccctggccctgtacaagaagctgctgaagaagaagcccagcctggatgacctgaaggagctgatgccagatgtgggccgctccatgcagcagctgctggactacccagaagatgacatcgaggagaccttctgcctgaacttcaccatcaccgtggagaactttggagccacagaggtgaaggagctggtgctgaatggagctgacacagctgtgaacaagcagaaccggcaggagtttgtggatgcctacgtggactacatcttcaacaagtctgtggccagcctgtttgatgccttccacgccggcttccacaaggtgtgtggcggcaaggtgctgctgctcttccagcccaatgagctgcaggccatggtgattggcaacaccaactatgactggaaggagctggagaagaacacagagtacaagggggagtactgggccgagcaccccaccatcaagatcttctgggaggtgttccacgagctgcccctggagaagaagaagcagttcctgctcttcctgaccggcagtgaccgcatccccatcctgggcatgaagagcctgaagctggtgatccagagcactggaggaggagaggagtacctgcctgtgagccacacctgcttcaacctgctggacctgcccaagtacacagagaaggagaccctgcggagcaagctgatccaggccatcgaccacaatgaaggcttcagcctcatctag

SEQ ID NO: 19923 - DNA, 726 bp, synthetic construct; identical to SEQ ID NO: 19313
  source 1..726: mol_type = other DNA; note = Synthetic coding sequence

SEQ ID NO: 19924 - DNA, 870 bp, synthetic construct
  source 1..870: mol_type = other DNA; note = Synthetic coding sequence
atgatcatcaactggaaccaggtgtctgtgctgtggaagtgcctgctgaagcagagcgccagctaccaggaccggcggcagagctggaggcgggcctccatgaaggagaccaacagaaggaagagcctgcaccccatccaccagggcatcacagagctgagccgcagcatctctgtggacctggccgagagcaagaggctgggctgcctgctgctgagcagcttccagttcagcatccagaagctggagcccttcctgcgggacaccaagggcttcagcctggagagcttccgggccaaggccagcagcctgtctgaggagctgaagcactttgctgatggcctggagacagatggcaccctgcagaagtgctttgaggacagcaatggcaaggccagtgacttcagcctggaggcctctgtggccgagatgaaggagtacatcaccaagttcagcctggagcggcagacctgggaccagctgctgctgcactaccagcaggaggccaaggagatcctgagccggggcagcacagaggccaagatcacagaggtgaaggtggagcccatgacctacctgggcagcagccagaatgaggtgctgaacaccaagccagactaccagaagatcctgcagaaccagagcaaggtgtttgactgcatggagctggtgatggatgagctgcagggctctgtgaagcagctgcaggccttcatggatgagagcacccagtgcttccagaaggtgtctgtgcagctgggcaagaggtccatgcagcagctggaccccagccctgccaggaagctgctgaagctgcagctgcagaaccccccagccatccacggcagcggcagcggcagctgccagtag

SEQ ID NO: 19925 - DNA, 750 bp, synthetic construct
  source 1..750: mol_type = other DNA; note = Synthetic coding sequence
atgacctctgtgaccaggtctgagatcattgatgagctgagccgcagcatctctgtggacctggccgagagcaagaggctgggctgcctgctgctgagcagcttccagttcagcatccagaagctggagcccttcctgcgggacaccaagggcttcagcctggagagcttccgggccaaggccagcagcctgtctgaggagctgaagcactttgctgatggcctggagacagatggcaccctgcagaagtgctttgaggacagcaatggcaaggccagtgacttcagcctggaggcctctgtggccgagatgaaggagtacatcaccaagttcagcctggagcggcagacctgggaccagctgctgctgcactaccagcaggaggccaaggagatcctgagccggggcagcacagaggccaagatcacagaggtgaaggtggagcccatgacctacctgggcagcagccagaatgaggtgctgaacaccaagccagactaccagaagatcctgcagaaccagagcaaggtgtttgactgcatggagctggtgatggatgagctgcagggctctgtgaagcagctgcaggccttcatggatgagagcacccagtgcttccagaaggtgtctgtgcagctgggcaagaggtccatgcagcagctggaccccagccctgccaggaagctgctgaagctgcagctgcagaaccccccagccatccacggcagcggcagcggcagctgccagtag

SEQ ID NO: 19926 - DNA, 855 bp, synthetic construct
  source 1..855: mol_type = other DNA; note = Synthetic coding sequence
atgacctctgtgaccaggtctgagatcattgatgagcagagcgccagctaccaggaccggcggcagagctggaggcgggcctccatgaaggagaccaacagaaggaagagcctgcaccccatccaccagggcatcacagagctgagccgcagcatctctgtggacctggccgagagcaagaggctgggctgcctgctgctgagcagcttccagttcagcatccagaagctggagcccttcctgcgggacaccaagggcttcagcctggagagcttccgggccaaggccagcagcctgtctgaggagctgaagcactttgctgatggcctggagacagatggcaccctgcagaagtgctttgaggacagcaatggcaaggccagtgacttcagcctggaggcctctgtggccgagatgaaggagtacatcaccaagttcagcctggagcggcagacctgggaccagctgctgctgcactaccagcaggaggccaaggagatcctgagccggggcagcacagaggccaagatcacagaggtgaaggtggagcccatgacctacctgggcagcagccagaatgaggtgctgaacaccaagccagactaccagaagatcctgcagaaccagagcaaggtgtttgactgcatggagctggtgatggatgagctgcagggctctgtgaagcagctgcaggccttcatggatgagagcacccagtgcttccagaaggtgtctgtgcagctgggcaagaggtccatgcagcagctggaccccagccctgccaggaagctgctgaagctgcagctgcagaaccccccagccatccacggcagcggcagcggcagctgccagtag

SEQ ID NO: 19927 - DNA, 1071 bp, synthetic construct
  source 1..1071: mol_type = other DNA; note = Synthetic coding sequence
atgacctctgtgaccaggtctgagatcattgatgagaagggccctgtgatgagcaagacccatgaccaccagctggagagcagcctgagccctgtggaggtgtttgccaagaccagcgccagcctggagatgaaccagggcgtgtctgaggagcgcatccacctgggcagcagccccaagaagggcggcaactgtgacctgagccaccaggagcggctgcagagcaagagcctgcacctgagcccccaggagcagagcgccagctaccaggaccggcggcagagctggaggcgggcctccatgaaggagaccaacagaaggaagagcctgcaccccatccaccagggcatcacagagctgagccgcagcatctctgtggacctggccgagagcaagaggctgggctgcctgctgctgagcagcttccagttcagcatccagaagctggagcccttcctgcgggacaccaagggcttcagcctggagagcttccgggccaaggccagcagcctgtctgaggagctgaagcactttgctgatggcctggagacagatggcaccctgcagaagtgctttgaggacagcaatggcaaggccagtgacttcagcctggaggcctctgtggccgagatgaaggagtacatcaccaagttcagcctggagcggcagacctgggaccagctgctgctgcactaccagcaggaggccaaggagatcctgagccggggcagcacagaggccaagatcacagaggtgaaggtggagcccatgacctacctgggcagcagccagaatgaggtgctgaacaccaagccagactaccagaagatcctgcagaaccagagcaaggtgtttgactgcatggagctggtgatggatgagctgcagggctctgtgaagcagctgcaggccttcatggatgagagcacccagtgcttccagaaggtgtctgtgcagctgggcaagaggtccatgcagcagctggaccccagccctgccaggaagctgctgaagctgcagctgcagaaccccccagccatccacggcagcggcagcggcagctgccagtag

SEQ ID NO: 19928 - DNA, 1071 bp, synthetic construct; identical to SEQ ID NO: 19927
  source 1..1071: mol_type = other DNA; note = Synthetic coding sequence

SEQ ID NO: 19929 - DNA, 1617 bp, synthetic construct
  source 1..1617: mol_type = other DNA; note = Synthetic coding sequence
atggctgctgctgcctctgtgacaggccgggtgacctgggccgccagccccatgaggagcctgggcctgggccgccgcctgagcctgcccggcccccggctggatgctgtgacagctgctgtgaaccccagcctgagtgaccacggcaatggcctgggccggggcacccggggcagcggctgcagcggcggcagcctggtggccgactggggcggcggcgctgctgctgctgctgctgtggccctggccctggccccagccctgagcaccatgaggcggggcagcagcgagagcgagctggccgcccgctgggaggccgaggccgtggccgccgccaaggctgctgccaaggccgaggccgaggccacagctgagaccgtggccgagcaggtgcgggtggatgctggagctgctggggagcctgagtgcaaggccggggaggagcagcccaaggtgctggccccagccccagcccagcccagcgctgctgaggagggcaacacccaggtgctgcagaggcccccacccaccctgccccccagcaagcccaagcctgtgcagggcctgtgcccccacggcaagccccgggacaagggccgcagctgcaagaggagcagcggccacggcagcggggagaatggcagccagaggcctgtgacagtggacagcagcaaggcccggaccagcctggatgccctgaagatcagcatccggcagctgaagtggaaggagttcccctttggaagaaggctgccctgtgacatctactggcacggcgtgtccttccatgacaatgacatcttcagcggccaggtgaacaagtttcctggcatgacagagatggtgaggaagatcaccctgagcagagctgtgaggaccatgcagaacctcttccctgaggagtacaacttctaccccaggtcctggatcctgcctgatgagttccagctgtttgtggcccaggtgcagatggtgaaggatgatgaccccagctggaagcccaccttcatcgtgaagccagatggcggctgccagggagatggcatctacctgatcaaggaccccagcgacatccggctggccggcaccctgcagagcaggcctgctgtggtgcaggagtacatctgcaagcccctgctgattgacaagctgaagtttgacatccggctgtatgtgctgctgaagagcctggaccccctggagatctacatcgccaaggatggcctgagccgcttctgcacagagccctaccaggagcccacccccaagaacctgcaccgcatcttcatgcacctgaccaactacagcctgaacatccacagcggcaacttcatccacagcgacagcgccagcacaggcagcaagaggaccttcagcagcatcctgtgccgcctgagcagcaagggcgtggacatcaagaaggtgtggagcgacatcatctctgtggtgatcaagacagtcatcgccctgaccccagagctgaaggtgttctaccagagcgacatccccaccggccggcccggccccacctgcttccaggtgaccatcgccagcagccagcctgccttccctgccctgaccggcctgaagagggccctgtggctgcgggtgggctag

SEQ ID NO: 19930 - DNA, 1356 bp, synthetic construct
  source 1..1356: mol_type = other DNA; note = Synthetic coding sequence
atgacagagatggtgaggaagatcaccctgagcagagctgtgaggaccatgcagaacctcttccctgaggagtacatctgcaagcccctgctgattgacaagctgaagtttgacatccggctgtatgtgctgctgaagagcctggaccccctggagatctacatcgccaaggatggcctgagccgcttctgcacagagccctaccaggagcccacccccaagaacctgcaccgcatcttcatgcacctgaccaactacagcctgaacatccacagcggcaacttcatccacagcgacagcgccagcacaggcagcaagaggaccttcagcagcatcctgtgccgcctgagcagcaaaggagtggacatcaagaaggtgtggagcgacatcatctctgtggtgatcaagacagtgattgccctgaccccagagctgaaggtgttctaccagagcgacatccccaccggccggcccggccccacctgcttccagatcctgggctttgacatcctgctgatgaagaacctgaagcccatcctgctggaggtgaatgccaaccccagcatgagaattgaacatgaacatgagctgagccctggggtgtttgaaaatgtgcccagcctggtggatgaggaggtgaaggtggccgtcatccgggacaccctgcggctgatggaccccctgaagaagaagcgggagaaccagagccagcagctggagaagccctttgctgggaaggaggatgccctggatggagagctgaccagcgccccagactgcaatgccaaccctgaggcccacctgcccagcatctgcctgaagcaggtgttccccaagtatgccaagcagttcaactacctgcggctggtggacaggatggccaacctcttcatccgcttcctgggcatcaagggcaccatgaagctgggccccaccggcttccgcaccttcatccgcagctgcaagctgagcagcagcagcctgtccatggctgctgtggacatcctgtacatcgacatcacccggcgctggaacagcatgaccctggaccagagggacagcggcatgtgcctgcaggcctttgtggaggccttcttcttcctggcccagaggaagttcaagatgctgcccctgcacgagcaggtggccagcctgattgacctgtgtgagtaccacctgagcctgctggatgagaagaggctggtgtgtggccggggcgtgcccagcggcggccggcccccccaccggggccccccccaggagcccagccccagcgcccagcctgctggggacaaccccccacccaggaccagctgtgccaacaagctgagccaccccaggcacaccctgtcctag

SEQ ID NO: 19931 - DNA, 1644 bp, synthetic construct
  source 1..1644: mol_type = other DNA; note = Synthetic coding sequence
atgaaggtggtgaagtctgctgagcactacacagaaacagccctggatgagatccggctgctgaagtctgtgaggaacagcgaccccaatgaccccaaccgggagatggtggtgcagctgctggatgacttcaagatctctggagtgaatggcacccacatctgcatggtgtttgaggtgctgggccaccacctgctgaagtggatcatcaagagcaactaccagggcctgcccctgccctgtgtgaagaagatcatccagcaggtgctgcagggcctggactacctgcacaccaagtgccgcatcatccacacagacatcaagccagagaacatcctgctgtctgtgaatgagcagtacatccggcggctggccgctgaggccacagagtggcagaggtctggggcccccccacccagcggcagcgctgtgtccacagccccccagcccaagccagctgacaagatgagcaagaacaagaagaagaagctgaagaagaagcagaagaggcaggccgagctgctggagaagaggatgcaggagattgaggagatggagaaggagagcggccctggccagaagaggcccaacaagcaggaggagagcgagagccctgtggagcggcccctgaaggagaacccccccaacaagatgacccaggagaagctggaggagagcagcaccatcggccaggaccagaccctgatggagcgggacacagagggcggcgctgctgagatcaactgcaatggagtgattgaagtcatcaactacacccagaacagcaacaatgagaccctgcggcacaaggaggacctgcacaatgccaatgactgtgatgtgcagaacctgaaccaggagagcagcttcctgagcagccagaatggagacagcagcaccagccaggagacagacagctgcacccccatcaccagcgaggtgtctgacaccatggtgtgccagagcagcagcacagtgggccagagcttcagcgagcagcacatcagccagctgcaggagagcatccgggcagagatcccctgtgaagatgagcaggagcaggagcacaacggccccctggacaacaagggcaagagcacagctggcaacttcctggtgaaccccctggagcccaagaatgctgagaagctgaaggtgaagattgctgacctgggcaatgcctgctggcacaagcacttcacagaggacatccagacccggcagtaccgcagcctggaggtgctgattggcagcggctacaacaccccagctgacatctggagcacagcctgcatggcctttgagctggccaccggggactacctgtttgagccccacagcggggaggagtacaccagagatgaggaccacatcgtgcacatcatcgagctgattggccgcatcccccggcgcttcagcctgagcggcaagtacagccaggacttcttcagccacagaggagacctgaagcacatcaccaagctgaagccctggggcctgtttgaggtgctggtggagaagtatgagtggagccaggaggaggccgccggcttcacagacttcctgctgcccatgctggagctgatccctgagaagagggccacagctgctgagtgcctgcggcacccctggctgaacagctag

SEQ ID NO: 19932 - DNA, 1968 bp, synthetic construct
  source 1..1968: mol_type = other DNA; note = Synthetic coding sequence
atggagaggaaggtgctggccctgcaggccaggaagaagaggaccaaggccaagaaggacaaggcccagaggaagtctgagacccagcaccggggcagcgccccccacagcgagagtgacctgcctgagcaggaggaggagatcctgggcagtgatgatgatgagcaggaggaccccaatgactactgcaagggcggctaccacctggtgaagatcggggacctcttcaacggccgctaccacgtgatcaggaagctgggctggggccacttcagcacagtgtggctgtcctgggacatccagggcaagaagtttgtggccatgaaggtggtgaagtctgctgagcactacacagaaacagccctggatgagatccggctgctgaagtctgtgaggaacagcgaccccaatgaccccaaccgggagatggtggtgcagctgctggatgacttcaagatcagcggcgtgaatggcacccacatctgcatggtgtttgaggtgctgggccaccacctgctgaagtggatcatcaagagcaactaccagggcctgcccctgccctgtgtgaagaagatcatccagcaggtgctgcagggcctggactacctgcacaccaagtgccgcatcatccacacagacatcaagccagagaacatcctgctgtctgtgaatgagcagtacatccggcggctggccgctgaggccacagagtggcagaggtctggggcccctcctccttctggcagcgctgtgtccacagccccccagcccaagccagctgacaagatgagcaagaacaagaagaagaagctgaagaagaagcagaagaggcaggccgagctgctggagaagaggatgcaggagattgaggagatggagaaggagagcggccctggccagaagaggcccaacaagcaggaggagagcgagagccctgtggagcggcccctgaaggaaaatccacccaacaagatgacccaggagaagctggaggagagcagcaccatcggccaggaccagaccctgatggagcgggacacagaaggaggagctgctgagatcaactgcaatggagtcatcgaggtgatcaactacacccagaacagcaacaatgagaccctgcggcacaaggaggacctgcacaatgccaatgactgtgatgtgcagaacctgaaccaggagagcagcttcctgagcagccagaatggagacagcagcaccagccaggagacagacagctgcacccccatcaccagcgaggtgtctgacaccatggtgtgccagagcagcagcacagtgggccagagcttcagcgagcagcacatcagccagctgcaggagagcatccgggcagagatcccctgtgaagatgagcaggagcaggagcacaacggccccctggacaacaagggcaagagcacagctggcaacttcctggtgaaccccctggagcccaagaatgctgagaagctgaaggtgaagattgctgacctgggcaatgcctgctgggtgcacaagcacttcacagaggacatccagacccggcagtaccgcagcctggaggtgctgattggcagcggctacaacaccccagctgacatctggagcacagcctgcatggcctttgagctggccaccggggactacctgtttgagccccacagcggggaggagtacaccagagatgaggaccacatcgccctgatcatcgagctgctgggcaaggtgcccaggaagctgattgtggccggcaagtacagcaaggagttcttcaccaagaagggggacctgaagcacatcaccaagctgaagccctggggcctgtttgaggtgctggtggagaagtatgagtggagccaggaggaggccgccggcttcacagacttcctgctgcccatgctggagctgatccctgagaagagggccacagctgctgagtgcctgcggcacccctggctgaacagctag

SEQ ID NO: 19933 - DNA, 864 bp, synthetic construct
  source 1..864: mol_type = other DNA; note = Synthetic coding sequence
atggccgccagcctgtggatgggagacctggagccctacatggatgagaacttcatcagccgggcctttgccaccatgggagaaacagtgatgtctgtgaagatcatccggaaccggctgaccggcatcccagctggctactgctttgtggagtttgctgacctggccacagctgagaagtgcctgcacaagatcaacgggaagcccctgcccggggccaccccagccaagcgcttcaagctgaactatgccacctacggcaagcagcctgacaacagccctgagtacagcctgtttgtgggggacctgaccccagatgtggatgatggcatgctgtatgagttctttgtgaaggtgtaccccagctgccggggcggcaaggtggtgctggaccagacaggagtgtccaagggctacggctttgtgaagttcacagatgagctggagcagaagagggccctgacagagtgccagggcgctgtgggcctgggcagcaagcctgtgcggctgtctgtggccatccccaaggccagccgggtgaagcctgtggagtacagccagatgtacagctacagctacaaccagtactaccagcagtaccagaactactatgcccagtggggctatgaccagaacacaggcagctacagctacagctacccccagtatggctacacccagagcaccatgcagacctatgaggaggtgggagatgatgccctggaggaccccatgccccagctggatgtgacagaggccaacaaggagttcatggagcagagcgaggagctgtatgatgccctgatggactgccactggcagcccctggacacagtgtcctctgagatcccagccatgatgtag

SEQ ID NO: 19934 - DNA, 438 bp, synthetic construct
  source 1..438: mol_type = other DNA; note = Synthetic coding sequence
atggccgagagaaatgaagaccaccacctgcaggtgctgaaggagagcgaggtgctgctgcaggccaagagagctgagctggagaagctgaagagccaggtgaccagccagcagcaggagatggctgtgctggaccggcagctgggccacaagaaggaggagctgcacctgctgcagggctccatggtgcaggccaaggctgacctgcaggaggccctgcggctgggggagacagaggtgacagagaagtgcaaccacatccgggaggtgaagagcctgctggaggagctgtccttccagaagggggagctgaatgtgcagatcagcgagaggaagacccagctgaccctcatcaagcaggagattgagaaggaggaggagaacctgcaggtggtgctgcggcagatgagcaagcacaagacagccttcctgcagtag

SEQ ID NO: 19935 - DNA, 3024 bp, synthetic construct
  source 1..3024: mol_type = other DNA; note = Synthetic coding sequence
atgcagcacctgaagagcaagaagcgggaggagcgctggatgagggccagcaagaggcagagcgagaaggagatggaggagctgcaccacaacattgatgacctgctgcaggagaagaagagcctggagtgtgaggtggaggagctgcacaggacagtgcagaagaggcagcagcagaaggacttcattgatggaaatgtggagagcctgatgacagagctggagattgagaagagcctgaagcaccacgaggacatcgtggatgaaattgaatgtattgagaagaccctgctgaagagaagaagtgagctgcgggaggccgaccggctgctggccgaggccgagagcgagctgagctgcaccaaggagaaggtgtgcctgctggtggtgtggggcgtgtcctctgtgtggaccaagaatgctgtggagaagttcacagatgccaagaggagcctgctgcagacagaaagtgatgctgaggagctggagcggcgggcccaggagacagctgtgaacctggtgaaggctgaccagcagctgcggagcctgcaggctgatgccaaggacctggagcagcacaagatcaagcaggaggagatcctgaaggagatcaacaagatcgtggccgccaaggacagcgacttccagtgcctgagcaagaagaaggagaagctgacagaggagctgcagaagctgcagaaggacatcgagatggccgagagaaatgaagaccaccacctgcaggtgctgaaggagagcgaggtgctgctgcaggccaagagagctgagctggagaagctgaagagccaggtgaccagccagcagcaggagatggctgtgctggaccggcagctgggccacaagaaggaggagctgcacctgctgcagggctccatggtgcaggccaaggctgacctgcaggaggccctgcggctgggggagacagaggtgacagagaagtgcaaccacatccgggaggtgaagagcctgctggaggagctgtccttccagaagggggagctgaatgtgcagatcagcgagaggaagacccagctgaccctcatcaagcaggagattgagaaggaggaggagaacctgcaggtggtgctgcggcagatgagcaagcacaagacagagctgaagaacatcctggacatgctgcagctggagaaccacgagctgcagggcctgaagctgcagcacgaccagagggtgtctgagctggagaagacccaggtggccgtgctggaggagaagctggagctggagaacctgcagcagatcagccagcagcagaagggggagattgagtggcagaagcagctgctggagcgggacaagcgggagattgaaagaatgacagctgagagccgggccctgcagagctgtgtggagtgcctgagcaaggagaaggaggacctgcaggagaagtgtgacatctgggagaagaagctggcccagaccaagagggtgctggccgctgctgaggagaacagcaagatggagcagagcaacctggagaagctggagctgaatgtgaggaagctgcagcaggagctggaccagctgaacagagacaagctgagcctgcacaatgacatcagcgccatgcagcagcagctgcaggagaagcgggaggccgtgaacagcctgcaggaggagctggccaacgtgcaggaccacctgaacctggccaagcaggacctgctgcacaccaccaagcaccaggatgtgctgctgtctgagcagacccggctgcagaaggacatcagcgagtgggccaacagatttgaggactgccagaaggaggaggagaccaagcagcagcagctgcaggtgctgcagaatgaaattgaggagaacaagctgaagctggtgcagcaggagatgatgttccagaggctgcagaaggagcgggagagcgaggagagcaagctggagaccagcaaggtgaccctgaaggagcagcagcaccagctggagaaggagctgacagaccagaagagcaagctggaccaggtgctgagcaaggtgctggccgctgaggagcgggtgaggaccctgcaggaggaggagcgctggtgtgagagcctggagaagaccctgagccagaccaagaggcagctgtctgagcgggagcagcagctggtggagaagagcggggagctgctggccctgcagaaggaggccgacagcatgagagctgacttcagcctgctgaggaaccagttcctgacagagaggaagaaggccgagaagcaggtggccagcctgaaggaggccctgaagatccagaggagccagctggagaagaacctgctggagcagaagcaggagaacagctgcatccagaaggagatggccaccatcgagctggtggcccaggacaaccacgagcgggcccggcggctgatgaaggagctgaaccagatgcagtatgagtacacagagctgaagaagcagatggccaaccagaaggacctggagcggcggcagatggagatcagtgatgccatgaggaccctgaagtctgaggtgaaggatgagatccgcaccagcctgaagaacctgaaccagttcctgcctgagctgcctgctgacctggaggccatcctggagagaaatgaaaacctggagggggagctggagagcctgaaggagaacctgcccttcaccatgaatgaaggcccctttgaggagaagctgaacttcagccaggtgcacatcatggatgagcactggagaggagaggccctgcgggagaagctgcggcacagagaagatcggctgaaggcccagctgcggcactgcatgagcaagcaggccgaggtgctgatcaagggcaagaggcagacagagggcaccctgcacagcctgcggcggcaggtggatgccctgggggagctggtgaccagcaccagcgctgacagcgccagcagccccagcctgagccagctggagagcagcctgacagaggacagccagctgggccagaaccaggagaagaatgccagcgccaggtag

SEQ ID NO: 19936 - DNA, 2985 bp, synthetic construct
  source 1..2985: mol_type = other DNA; note = Synthetic coding sequence
atgaaggcccagaagagcggcaaggagcagcagctggacatcatgaacaagcagtaccagcagctggagagccggctggatgagatcctgagcagaattgccaaggagacagaggagatcaaggacctggaggagcagctgacagagggccagattgctgccaatgaggccctgaagaaggacctggagggcgtcatcagcggcctgcaggagtacctgggcaccatcaagggccaggccacccaggcccagaatgaatgtaggaagctgagagatgagaaggagaccctgctgcagaggctgacagaggtggagcaggagcgggaccagctggagatcgtggccatggatgctgagaacatgaggaaggagctggccgagctggagagcgccctgcaggagcagcacgaggtgaatgccagcctgcagcagacccagggcgacctgagcgcctatgaggccgagctggaggcccggctgaacctgagagatgctgaggccaaccagctgaaggaggagctggagaaggtgacccggctgacccagctggagcagagcgccctgcaggccgagctggagaaggagcggcaggccctgaagaatgccctgggcaaggcccagttcagcgaggagaaggagcaggagaacagcgagctgcacgccaagctgaagcacctgcaggatgacaacaacctgctgaagcagcagctgaaggacttccagaaccacctgaaccacgtggtggatggcctggtgcggcctgaggaggtggccgcccgggtggatgagctgcggaggaagctgaagctgggcaccggggagatgaacatccacagccccagtgatgtgctgggcaagagcctggccgacctgcagaagcagttcagcgagatcctggcccggagcaagtgggagagagatgaggcccaggtgcgggagaggaagctgcaggaggagatggccctgcagcaggagaagctggccaccggccaggaggagttccggcaggcctgtgagcgggccctggaggccaggatgaactttgacaagaggcagcacgaggcccgcatccagcagatggagaatgagatccactacctgcaggagaacctgaagtccatggaggagatccagggcctgacagacctgcagctgcaggaggctgatgaggagaaggagcgcatcctggcccagctgcgggagctggagaagaagaagaagctggaggatgccaagagccaggagcaggtgtttggcctggacaaggagctgaagaagctgaagaaggctgtggccaccagtgacaagctggccacagctgagctgaccatcgccaaggaccagctgaagagcctgcatggaacagtgatgaagatcaaccaggagcgggcagaggagctgcaggaggccgagcgcttcagcaggaaggccgcccaggccgcccgggacctgaccagggctgaggccgagattgagctgctgcagaacctgctgcggcagaagggggagcagttccggctggagatggagaagacaggagtgggcaccggggccaacagccaggtgctggagattgagaagctgaatgagaccatggagcggcagaggacagaaattgcccggctgcagaatgtgctggacctgactggaagtgacaacaagggcggctttgaaaatgtgctggaggagattgctgagctgcggcgggaggtgtcctaccagaatgactacatcagctccatggctgaccccttcaagagaagaggctactggtacttcatgcctcctccacccagcagcaaggtgagcagccacagcagccaggccaccaaggacagcggcgtgggcctgaagtacagcgccagcacccctgtgaggaagccccggcccggccagcaggacggcaaggagggcagccagcccccaccagccagcggctactgggtgtacagccccatccgcagcggcctgcacaagctgttccccagcagagatgctgacagcggcggggacagccaggaggagagcgagctggatgaccaggaggagcccccatttgtgcccccacctggctacatgatgtacacagtgctgcctgatggcagccctgtgccccagggcatggccctgtatgcccctcctccacccctgcccaacaacagccggcccctgaccccaggcaccgtggtgtatggccccccacctgctggggcccccatggtgtatggccccccaccacccaacttcagcatccccttcatccccatgggcgtgctgcactgcaatgtgcctgagcaccacaacctggagaatgaggtgtcccggctggaggacatcatgcagcacctgaagagcaagaagcgggaggagcgctggatgagggccagcaagaggcagagcgagaaggagatggaggagctgcaccacaacattgatgacctgctgcaggagaagaagagcctggagtgtgaggtggaggagctgcacaggacagtgcagaagaggcagcagcagaaggacttcattgatggaaatgtggagagcctgatgacagagctggagattgagaagagcctgaagcaccatgaagatattgtggatgaaattgagtgcatcgagaagaccctgctgaagagaagaagtgagctgcgggaggccgaccggctgctggccgaggccgagagcgagctgagctgcaccaaggagaagaccaagaatgctgtggagaagttcacagatgccaagaggagcctgctgcagacagaaagtgatgctgaggagctggagcggcgggcccaggagacagctgtgaacctggtgaaggctgaccagcagctgcggagcctgcaggctgatgccaaggacctggagcagcacaagatcaagcaggaggagatcctgaaggagatcaacaagatcgtggccgccaaggacagcgacttccagtgcctgagcaagaagaaggagaagctgacagaggagtag

SEQ ID NO: 19937 - DNA, 5322 bp, synthetic construct
  source 1..5322: mol_type = other DNA; note = Synthetic coding sequence
atgaaggcccagaagagcggcaaggagcagcagctggacatcatgaacaagcagtaccagcagctggagagccggctggatgagatcctgagcagaattgccaaggagacagaggagatcaaggacctggaggagcagctgacagagggccagattgctgccaatgaggccctgaagaaggacctggagggcgtcatcagcggcctgcaggagtacctgggcaccatcaagggccaggccacccaggcccagaatgaatgtaggaagctgagagatgagaaggagaccctgctgcagaggctgacagaggtggagcaggagcgggaccagctggagatcgtggccatggatgctgagaacatgaggaaggagctggccgagctggagagcgccctgcaggagcagcacgaggtgaatgccagcctgcagcagacccagggcgacctgagcgcctatgaggccgagctggaggcccggctgaacctgagagatgctgaggccaaccagctgaaggaggagctggagaaggtgacccggctgacccagctggagcagagcgccctgcaggccgagctggagaaggagcggcaggccctgaagaatgccctgggcaaggcccagttcagcgaggagaaggagcaggagaacagcgagctgcacgccaagctgaagcacctgcaggatgacaacaacctgctgaagcagcagctgaaggacttccagaaccacctgaaccacgtggtggatggcctggtgcggcctgaggaggtggccgcccgggtggatgagctgcggaggaagctgaagctgggcaccggggagatgaacatccacagccccagtgatgtgctgggcaagagcctggccgacctgcagaagcagttcagcgagatcctggcccggagcaagtgggagagagatgaggcccaggtgcgggagaggaagctgcaggaggagatggccctgcagcaggagaagctggccaccggccaggaggagttccggcaggcctgtgagcgggccctggaggccaggatgaactttgacaagaggcagcacgaggcccgcatccagcagatggagaatgagatccactacctgcaggagaacctgaagtccatggaggagatccagggcctgacagacctgcagctgcaggaggctgatgaggagaaggagcgcatcctggcccagctgcgggagctggagaagaagaagaagctggaggatgccaagagccaggagcaggtgtttggcctggacaaggagctgaagaagctgaagaaggctgtggccaccagtgacaagctggccacagctgagctgaccatcgccaaggaccagctgaagagcctgcatggaacagtgatgaagatcaaccaggagcgggcagaggagctgcaggaggccgagcgcttcagcaggaaggccgcccaggccgcccgggacctgaccagggctgaggccgagattgagctgctgcagaacctgctgcggcagaagggggagcagttccggctggagatggagaagacaggagtgggcaccggggccaacagccaggtgctggagattgagaagctgaatgagaccatggagcggcagaggacagaaattgcccggctgcagaatgtgctggacctgactggaagtgacaacaagggcggctttgaaaatgtgctggaggagattgctgagctgcggcgggaggtgtcctaccagaatgactacatcagctccatggctgaccccttcaagagaagaggctactggtacttcatgcctcctccacccagcagcaaggtgagcagccacagcagccaggccaccaaggacagcggcgtgggcctgaagtacagcgccagcacccctgtgaggaagccccggcccggccagcaggacggcaaggagggcagccagcccccaccagccagcggctactgggtgtacagccccatccgcagcggcctgcacaagctgttccccagcagagatgctgacagcggcggggacagccaggaggagagcgagctggatgaccaggaggagcccccatttgtgcccccacctggctacatgatgtacacagtgctgcctgatggcagccctgtgccccagggcatggccctgtatgcccctcctccacccctgcccaacaacagccggcccctgaccccaggcaccgtggtgtatggccccccacctgctggggcccccatggtgtatggccccccaccacccaacttcagcatccccttcatccccatgggcgtgctgcactgcaatgtgcctgagcaccacaacctggagaatgaggtgtcccggctggaggacatcatgcagcacctgaagagcaagaagcgggaggagcgctggatgagggccagcaagaggcagagcgagaaggagatggaggagctgcaccacaacattgatgacctgctgcaggagaagaagagcctggagtgtgaggtggaggagctgcacaggacagtgcagaagaggcagcagcagaaggacttcattgatggaaatgtggagagcctgatgacagagctggagattgagaagagcctgaagcaccatgaagatattgtggatgaaattgagtgcatcgagaagaccctgctgaagagaagaagtgagctgcgggaggccgaccggctgctggccgaggccgagagcgagctgagctgcaccaaggagaagaccaagaatgctgtggagaagttcacagatgccaagaggagcctgctgcagacagaaagtgatgctgaggagctggagcggcgggcccaggagacagctgtgaacctggtgaaggctgaccagcagctgcggagcctgcaggctgatgccaaggacctggagcagcacaagatcaagcaggaggagatcctgaaggagatcaacaagatcgtggccgccaaggacagcgacttccagtgcctgagcaagaagaaggagaagctgacagaggagctgcagaagctgcagaaggacatcgagatggccgagagaaatgaagaccaccacctgcaggtgctgaaggagagcgaggtgctgctgcaggccaagagagctgagctggagaagctgaagagccaggtgaccagccagcagcaggagatggctgtgctggaccggcagctgggccacaagaaggaggagctgcacctgctgcagggctccatggtgcaggccaaggctgacctgcaggaggccctgcggctgggggagacagaggtgacagagaagtgcaaccacatccgggaggtgaagagcctgctggaggagctgtccttccagaagggggagctgaatgtgcagatcagcgagaggaagacccagctgaccctcatcaagcaggagattgagaaggaggaggagaacctgcaggtggtgctgcggcagatgagcaagcacaagacagagctgaagaacatcctggacatgctgcagctggagaaccacgagctgcagggcctgaagctgcagcacgaccagagggtgtctgagctggagaagacccaggtggccgtgctggaggagaagctggagctggagaacctgcagcagatcagccagcagcagaagggggagattgagtggcagaagcagctgctggagcgggacaagcgggagattgaaagaatgacagctgagagccgggccctgcagagctgtgtggagtgcctgagcaaggagaaggaggacctgcaggagaagtgtgacatctgggagaagaagctggcccagaccaagagggtgctggccgctgctgaggagaacagcaagatggagcagagcaacctggagaagctggagctgaatgtgaggaagctgcagcaggagctggaccagctgaacagagacaagctgagcctgcacaatgacatcagcgccatgcagcagcagctgcaggagaagcgggaggccgtgaacagcctgcaggaggagctggccaacgtgcaggaccacctgaacctggccaagcaggacctgctgcacaccaccaagcaccaggatgtgctgctgtctgagcagacccggctgcagaaggacatcagcgagtgggccaacagatttgaggactgccagaaggaggaggagaccaagcagcagcagctgcaggtgctgcagaatgaaattgaggagaacaagctgaagctggtgcagcaggagatgatgttccagaggctgcagaaggagcgggagagcgaggagagcaagctggagaccagcaaggtgaccctgaaggagcagcagcaccagctggagaaggagctgacagaccagaagagcaagctggaccaggtgctgagcaaggtgctggccgctgaggagcgggtgaggaccctgcaggaggaggagcgctggtgtgagagcctggagaagaccctgagccagaccaagaggcagctgtctgagcgggagcagcagctggtggagaagagcggggagctgctggccctgcagaaggaggccgacagcatgagagctgacttcagcctgctgaggaaccagttcctgacagagaggaagaaggccgagaagcaggtggccagcctgaaggaggccctgaagatccagaggagccagctggagaagaacctgctggagcagaagcaggagaacagctgcatccagaaggagatggccaccatcgagctggtggcccaggacaaccacgagcgggcccggcggctgatgaaggagctgaaccagatgcagtatgagtacacagagctgaagaagcagatggccaaccagaaggacctggagcggcggcagatggagatcagtgatgccatgaggaccctgaagtctgaggtgaaggatgagatccgcaccagcctgaagaacctgaaccagttcctgcctgagctgcctgctgacctggaggccatcctggagagaaatgaaaacctggagggggagctggagagcctgaaggagaacctgcccttcaccatgaatgaaggcccctttgaggagaagctgaacttcagccaggtgcacatcatggatgagcactggagaggagaggccctgcgggagaagctgcggcacagagaagatcggctgaaggcccagctgcggcactgcatgagcaagcaggccgaggtgctgatcaagggcaagaggcagacagagggcaccctgcacagcctgcggcggcaggtggatgccctgggggagctggtgaccagcaccagcgctgacagcgccagcagccccagcctgagccagctggagagcagcctgacagaggacagccagctgggccagaaccaggagaagaatgccagcgccaggtag

SEQ ID NO: 19938 - DNA, 2487 bp, synthetic construct
  source 1..2487: mol_type = other DNA; note = Synthetic coding sequence
atggagaagcagaagcaggagattgctgggaagcagaaggagatcaaggacctgcagatcgccatcgacagcctggacagcaaggaccccaagcacagccacatgaaggcccagaagagcggcaaggagcagcagctggacatcatgaacaagcagtaccagcagctggagagccggctggatgagatcctgagcagaattgccaaggagacagaggagatcaaggacctggaggagcagctgacagagggccagattgctgccaatgaggccctgaagaaggacctggagggcgtcatcagcggcctgcaggagtacctgggcaccatcaagggccaggccacccaggcccagaatgaatgtaggaagctgagagatgagaaggagaccctgctgcagaggctgacagaggtggagcaggagcgggaccagctggagatcgtggccatggatgctgagaacatgaggaaggagctggccgagctggagagcgccctgcaggagcagcacgaggtgaatgccagcctgcagcagacccagggcgacctgagcgcctatgaggccgagctggaggcccggctgaacctgagagatgctgaggccaaccagctgaaggaggagctggagaaggtgacccggctgacccagctggagcagagcgccctgcaggccgagctggagaaggagcggcaggccctgaagaatgccctgggcaaggcccagttcagcgaggagaaggagcaggagaacagcgagctgcacgccaagctgaagcacctgcaggatgacaacaacctgctgaagcagcagctgaaggacttccagaaccacctgaaccacgtggtggatggcctggtgcggcctgaggaggtggccgcccgggtggatgagctgcggaggaagctgaagctgggcaccggggagatgaacatccacagccccagtgatgtgctgggcaagagcctggccgacctgcagaagcagttcagcgagatcctggcccggagcaagtgggagagagatgaggcccaggtgcgggagaggaagctgcaggaggagatggccctgcagcaggagaagctggccaccggccaggaggagttccggcaggcctgtgagcgggccctggaggccaggatgaactttgacaagaggcagcacgaggcccgcatccagcagatggagaatgagatccactacctgcaggagaacctgaagtccatggaggagatccagggcctgacagacctgcagctgcaggaggctgatgaggagaaggagcgcatcctggcccagctgcgggagctggagaagaagaagaagctggaggatgccaagagccaggagcaggtgtttggcctggacaaggagctgaagaagctgaagaaggctgtggccaccagtgacaagctggccacagctgagctgaccatcgccaaggaccagctgaagagcctgcatggaacagtgatgaagatcaaccaggagcgggcagaggagctgcaggaggccgagcgcttcagcaggaaggccgcccaggccgcccgggacctgaccagggctgaggccgagattgagctgctgcagaacctgctgcggcagaagggggagcagttccggctggagatggagaagacaggagtgggcaccggggccaacagccaggtgctggagattgagaagctgaatgagaccatggagcggcagaggacagaaattgcccggctgcagaatgtgctggacctgactggaagtgacaacaagggcggctttgaaaatgtgctggaggagattgctgagctgcggcgggaggtgtcctaccagaatgactacatcagctccatggctgaccccttcaagagaagaggctactggtacttcatgcctcctccacccagcagcaaggtgagcagccacagcagccaggccaccaaggacagcggcgtgggcctgaagtacagcgccagcacccctgtgaggaagccccggcccggccagcaggacggcaaggagggcagccagcccccaccagccagcggctactgggtgtacagccccatccgcagcggcctgcacaagctgttccccagcagagatgctgacagcggcggggacagccaggaggagagcgagctggatgaccaggaggagcccccatttgtgcccccacctggctacatgatgtacacagtgctgcctgatggcagccctgtgccccagggcatggccctgtatgcccctcctccacccctgcccaacaacagccggcccctgaccccaggcaccgtggtgtatggccccccacctgctggggcccccatggtgtatggccccccaccacccaacttcagcatccccttcatccccatgggcgtgctgcactgcaatgtgcctgagcaccacaacctggtgtctgggaagacctacaacagcctgagcaccctgctgccctgggtgacagacaaggtgatctacctgatgtcctag

SEQ ID NO: 19939 - DNA, 6978 bp, synthetic construct; identical to SEQ ID NO: 18318
  source 1..6978: mol_type = other DNA; note = Synthetic coding sequence

SEQ ID NO: 19940 - DNA, 1359 bp, synthetic construct
  source 1..1359: mol_type = other DNA; note = Synthetic coding sequence
atgaagaagggcagccagcagaagatcttcagcaaggccaagatccccagcagcagccacagccccatccccagctccatgagcaacatgaggagccgcagcctgagccccctgattggcagcgagaccctgcccttccacagcggcggccagtggtgtgagcaggtggagattgctgatgagaacaacatgctgctggactaccaggaccacaagggagctgacagccacgccggcgtgcgctacatcacagaggccctgatcaagaagctgaccaagcaggacaacctggccctgatcaagagcctgaacctgagcctgagcaaggatggcggcaagaagttcaagtacatcgagaacctggagaagtgtgtgaagctggaggtgctgaacctgagctacaacctgattggcaagattgagaagctggacaagctgctgaagctgcgggagctgaacctgagctacaacaagatcagcaagattgagggcatcgagaacatgtgcaacctgcagaagctgaacctggccggaaatgaaattgagcacatccctgtgtggctgggcaagaagctgaagagcctgcgggtgctgaacctgaagggcaacaagatcagcagcctgcaggacatcagcaagctgaagcccctgcaggacctgatcagcctcatcctggtggagaaccctgtggtgaccctgccccactacctgcagttcaccatcttccacctgcggagcctggagagcctggagggccagcctgtgaccacccaggaccggcaggaggcctttgagcgcttcagcctggaggaggtggagcggctggagcgggacctggagaagaagatgattgaaacagaggagctgaagagcaagcagacccgcttcctggaggagatcaagaaccaggacaagctgaacaagagcctgaaggaggaggccatgctgcagaagcagagctgtgaggagctgaagagtgacctgaacaccaagaatgagctgctgaagcagaagaccatcgagctgacccgggcctgccagaagcagtatgagctggagcaggagctggccttctacaagattgatgccaagtttgagcccctgaactactaccccagtgaatatgcagaaattgacaaggccccagatgagagcccctacatcggcaagagccgctacaagaggaacatgtttgccacagagagctacatcattgattctgcccaggccgtgcagatcaagaagatggagccagatgagcagctgagaaatgaccacatgaacctgcggggccacacccccctggacacccagctggaggaccacaagctggactaccagaactgcatgatgaagtag

SEQ ID NO: 19941 - DNA, 1053 bp, synthetic construct
  source 1..1053: mol_type = other DNA; note = Synthetic coding sequence
atgtgctgtgacagcgactttgtggccaggaacaagagccaggacagcggcattgctgagatggaggagctgcctgtgccccacaacatcaagatcagcaacatcacctgtgacagcttcaagatctcctgggagatggacagcaagagcaaggaccgcatcacccactacttcatcgacctgaacaagaaggagaacaagaacagcaacaagttcaagcacaaggatgtgcccaccaagctggtggccaaggctgtgcccctgcccatgacagtgcggggccactggttcctgagccccaggacagagtacacagtggccgtgcagacagccagcaagcaggtggatggagactatgtggtgtctgagtggagcgagatcatcgagttctgcacagctgactacagcaaggtgcacctgacccagctgctggagaaggccgaggtgattgctggccgcatgctgaagttcagcgtcttctacagaaaccagcacaaggagtactttgattatgtgcgggagcaccacggcaatgccatgcagcccagcgtgaaggacaacagcggcagccacggcagccccatcagcggcaagctggagggcatcttcttcagctgcagcacagagttcaacacaggcaagccaccccaggacagcccctacggccgctacagatttgaaattgctgctgagaagctgttcaaccccaacaccaacctgtactttggagacttctactgcatgtacacagcctaccactacgtgatcctggtgattgcccctgtgggcagccctggagatgagttctgcaagcagaggctgccccagctgaacagcaaggacaacaagttcctgacctgcacagaggaggatggagtgctggtgtaccaccacgcccaggatgtgatcctggaggtgatctacacagatcctgtggacctgtctgtgggcaccgtggccgagatcaccggccaccagctgatgagcctgagcacagccaatgccaagaaggaccccagctgcaagacctgcaacatctctgtgggccgctag

SEQ ID NO: 19942 - DNA, 1131 bp, synthetic construct
  source 1..1131: mol_type = other DNA; note = Synthetic coding sequence
atggaggtgccccggctggaccacgccctgaacagccccaccagcccctgtgaggaggtgatcaagaacctgagcctggaggccatccagctgtgtgacagagatggcaacaagagccaggacagcggcattgctgagatggaggagctgcctgtgccccacaacatcaagatcagcaacatcacctgtgacagcttcaagatctcctgggagatggacagcaagagcaaggaccgcatcacccactacttcatcgacctgaacaagaaggagaacaagaacagcaacaagttcaagcacaaggatgtgcccaccaagctggtggccaaggctgtgcccctgcccatgacagtgcggggccactggttcctgagccccaggacagagtacacagtggccgtgcagacagccagcaagcaggtggatggagactatgtggtgtctgagtggagcgagatcatcgagttctgcacagctgactacagcaaggtgcacctgacccagctgctggagaaggccgaggtgattgctggccgcatgctgaagttcagcgtcttctacagaaaccagcacaaggagtactttgattatgtgcgggagcaccacggcaatgccatgcagcccagcgtgaaggacaacagcggcagccacggcagccccatcagcggcaagctggagggcatcttcttcagctgcagcacagagttcaacacaggcaagccaccccaggacagcccctacggccgctacagatttgaaattgctgctgagaagctgttcaaccccaacaccaacctgtactttggagacttctactgcatgtacacagcctaccactacgtgatcctggtgattgcccctgtgggcagccctggagatgagttctgcaagcagaggctgccccagctgaacagcaaggacaacaagttcctgacctgcacagaggaggatggagtgctggtgtaccaccacgcccaggatgtgatcctggaggtgatctacacagatcctgtggacctgtctgtgggcaccgtggccgagatcaccggccaccagctgatgagcctgagcacagccaatgccaagaaggaccccagctgcaagacctgcaacatctctgtgggccgctag

SEQ ID NO: 19943 - DNA, 1263 bp, synthetic construct; identical to SEQ ID NO: 18898
  source 1..1263: mol_type = other DNA; note = Synthetic coding sequence

SEQ ID NO: 19944 - DNA, 411 bp, synthetic construct
  source 1..411: mol_type = other DNA; note = Synthetic coding sequence
gaccccctgtcctggctgagcggcccctggggccaggtgcctgctggcatctgccccccaagacaccggggctggtaccacttccgggaccagatcctggccggcagccctgaggccttctttgtgctgaatgctgatgtgtgcagcgacttccccctgagcgccatgctggaggcccaccggcggcagaggcaccccttcctgctgctgggcaccacagccaacagaacccagagcctgaactacggctgcatcgtggagaacccccagacccatgaggtgctgcactacgtggagaagcccagcaccttcatcagtgacatcatcaactgtggcatctacctgttcagccctgaggccctgaagcccctgagagatgtgttccagaggaaccagcaggacggccagtag

SEQ ID NO: 19945 - DNA, 1365 bp, synthetic construct
  source 1..1365: mol_type = other DNA; note = Synthetic coding sequence
atggagaggaaggactttgagacctggctggacaacatctctgtgaccttcctgagcctgacagacctgcagaagaatgagaccctggaccacctgatcagcctgagcggggctgtgcagctgcggcacctgagcaacaacctggagaccctgctgaagagggacttcctgaagctgctgcccctggagctgtccttctacctgctgaagtggctggacccccagaccctgctgacctgctgcctggtgtccaagcagtggaacaaggtgatcagcgcctgcacagaggtgtggcagacagcctgcaagaacctgggctggcagattgatgacagcgtgcaggatgccctgcactggaagaaggtgtacctgaaggccatcctgaggatgaagcagctggaggaccacgaggcctttgagaccagcagcctgattggccacagcgcccgggtgtatgccctgtactacaaggatggcctgctgtgcaccggcagtgatgacctgagcgccaagctgtgggatgtgtccacaggccagtgtgtgtatggcatccagacccacacctgtgccgctgtgaagtttgatgagcagaagctggtgacaggcagctttgacaacacagtggcctgctgggagtggagcagcggggcccggacccagcacttccggggccacactggagctgtgttttctgtggactacaatgatgagctggacatcctggtgtctggcagcgctgacttcaccgtgaaggtgtgggccctgtctgctggcacctgcctgaacaccctgaccggccacacagagtgggtgaccaaggtggtgctgcagaagtgcaaggtgaagagcctgctgcacagccctggggactacatcctgctgtctgctgacaagtatgagatcaagatctggcccatcggccgggagatcaactgcaagtgcctgaagaccctgtctgtgtctgaggacaggagcatctgcctgcagccccggctgcactttgatggcaagtacatcgtgtgcagcagcgccctgggcctgtaccagtgggactttgccagctatgacatcctgcgggtcatcaagaccccagagatcgccaacctggccctgctgggctttggagacatctttgccctgctgtttgacaaccgctacctgtacatcatggacctgaggacagagagcctcatcagccgctggcccctgcctgagtacaggaagagcaagaggggcagcagcttcctggccggggaggcctcctggctgaatggcctggatggccacaatgacaccggcctggtgtttgccacctccatgccagaccacagcatccacctggtgctgtggaaggagcacggctag

SEQ ID NO: 19946 - DNA, 372 bp, synthetic construct
  source 1..372: mol_type = other DNA; note = Synthetic coding sequence
atggaggccgctgagacagaggccgaggccgccgccctggaggtgctggccgaggtggccggcatcctggagcctgtgggcctgcaggaggaggccgagctgcctgccaagatcctggtggagtttgtggtggacagccagaagaaggacaagctgctgtgcagccagctgcaggtggccgacttcctgcagaacatcctggcccaggagcggccctggtgtgtgctgcagggctgctggagcaccacctgctggcgctgcaagtttgccatgacctcctggaggacagctgcctggaggaagatcctggagaaggccagtgacttcccccacctgcccaccatcatcaccgggaagacagtgaacagctag

SEQ ID NO: 19947 - DNA, 834 bp, synthetic construct
  source 1..834: mol_type = other DNA; note = Synthetic coding sequence
atggaggccgctgagacagaggccgaggccgccgccctggaggtgctggccgaggtggccggcatcctggagcctgtgggcctgcaggaggaggccgagctgcctgccaagatcctggtggagtttgtggtggacagccagaagaaggacaagctgctgtgcagccagctgcaggtggccgacttcctgcagaacatcctggcccaggaggacacagccaagggcctggaccccctggccagcgaggacaccagccggcagaaggccatcgccgccaaggagcagtggaaggagctgaaggccacctaccgggagcacgtggaggccatcaagattggcctgaccaaggccctgacccagatggaggaggcccagaggaagaggacccagctgcgggaggcctttgagcagctgcaggccaagaagcagatggccatggagaagagaagagctgtgcagaaccagtggcagctgcagcaggagaagcacctgcagcacctggccgaggtgtctgctgaggtgcgggagaggaagacaggcacccagcaggagctggacagagtcttccagaagctgggcaacctgaagcagcaggccgagcaggagcgggacaagctgcagcgctaccagaccttcctgcagctgctgtacaccctgcagggcaagctgctcttccctgaggccgaggccgaggccgagaacctgcctgatgacaagccccagcagcccacccggccccaggagcagagcactggagacaccatgggccgggaccccggggtgtccttcaaggctgtgggcctgcagcctgctggagatgtgaacctgccctag

SEQ ID NO: 19948 - DNA, 1713 bp, synthetic construct
  source 1..1713: mol_type = other DNA; note = Synthetic coding sequence
atgagcagcatcggggagggcatcgacttcagccaggagcggcagaagatcagcggcctgcggaccctggagcagagcgtgggggagtggctggagagcatcggcctgcagcagtatgagagcaagctgctgctgaatggatttgatgatgtgcacttcctgggcagcaatgtgatggaggagcaggacctgcgggacatcggcatcagtgacccccagcacaggaggaagctgctgcaggccgcccggagcctgcccaaggtgaaggccctgggctatgatggcaacagcccccccagcgtgcccagctggctggacagcctgggcctgcaggactatgtgcacagcttcctgagcagcggctacagcagcattgacacagtgaagaacctgtgggagctggagctggtgaatgtgctgaaggtgcagctgctgggccacaggaagaggatcatcgccagcctggccgaccggccctatgaggagcccccccagaagcccccacgcttcagccagctgcgctgccaggacctgctgagccagaccagcagccccctgagccagaatgacagctgcaccggccgctctgctgacctgctgctgcccccaggggacaccggcagaagaagacatgacagcctgcatgaccctgctgcccccagcagagctgagcgcttccgcatccaggaggagcaccgggaggccaagctgaccctgcggccccccagcctggccgccccctatgcccctgtgcagagctggcagcaccagcctgagaagctgatctttgagagctgtggctatgaggccaactacctgggctccatgctgatcaaggacctgcggggcacagagagcacccaggatgcctgtgccaagatgaggaagagcacagagcacatgaagaagatccccaccatcatcctgagcatcacctacaagggcgtgaagttcattgatgccagcaacaagaatgtgattgctgagcacgagatccggaacatcagctgtgccgcccaggaccctgaggacctgtgcacctttgcctacatcaccaaggacctgcagaccagccaccactactgccacgtgttcagcacagtggatgtgaacctgacctatgagatcatcctgaccctgggccaggcctttgaggtggcctaccagctggccctgcaggcccagaagagccgggccaccggggccagcgctgctgagatgattgagaccaagagcagcaagcctgtgcccaagccccgggtgggcgtgaggaagtctgctgtgcccctgcccccagacagccgctgctgctactgccacacctgcaccacccaccggcccagctacctgcccctgcccagcgtgtccccaggagtgaagctggagcccccagacatggaccaggatgcccagagccacgcctctgtgtcctgggtggtggaccccaagccagacagcaagaggagcctgagcaccaaccacacccggctggagctggtgtgctgcagccagccagaaaatgagctggtgtccaccatcagcggggacaagcccaagagcttcctggagcccctgctgtttgtgatgcccaccacagcctacaaccacaactgcccagagtggaggagccagaaggatggcggctgcagcaccagtgaatgtccccaccacctgtgcctggagaagccaggagtgctgagcctggagatgtag

SEQ ID NO: 19949 - DNA, 1785 bp, synthetic construct; identical to SEQ ID NO: 18616
  source 1..1785: mol_type = other DNA; note = Synthetic coding sequence

SEQ ID NO: 19950 - DNA, 1785 bp, synthetic construct
  source 1..1785: mol_type = other DNA; note = Synthetic coding sequence
atggaggccgtgtgcctgggcacctgcccagagcctgaggcctccatgagcacagccatccctggcctgaagaagggcaacaatgccctgcagagcatcatcctgcagaccctgctggagaaggaaaatggccagaggaaatatggaggccccccacctggctgggatgctgcccctcctgagcggggctgtgagatcttcatcggcaagctgccccgggacctgtttgaagatgagctgatccccctgtgtgagaagattggcaagatctatgagatgaggatgatgatggacttcaacggcaacaacagaggctacgcctttgtgaccttcagcaacaaggtggaggccaagaatgccatcaagcagctgaacaactatgagatcagaaatggccgcctgctgggcgtgtgtgcctctgtggacaactgccgcctgtttgtgggcggcatccccaagaccaagaagcgggaggagatcctgtctgagatgaagaaggtgacagagggcgtggtggatgtgattgtgtaccccagcgctgctgacaagaccaagaacagaggatttgcctttgtggagtatgagagccacagagctgctgccatggcccggaggaagctgctgcccggccgcatccagctgtggggccatggaattgctgtggactgggccgagcctgaggtggaggtggatgaggacaccatgagctctgtgaagatcctgtatgtgaggaacctgatgctgagcaccagcgaggagatgattgagaaggagttcaacaacatcaagccaggagctgtggagcgggtgaagaagatccgggactatgcctttgtgcacttcagcaacagagaagatgctgtggaggccatgaaggccctgaatggcaaggtgctggatggcagccccatcgaggtgaccctggccaagcctgtggacaaggacagctatgtgcgctacacccggggcaccggcggccggggcaccatgctgcagggcgagtacacctacagcctgggccaggtgtatgaccccaccaccacctacctgggcgcccctgtgttctacgccccccagacctacgccgccatccccagcctgcacttccctgccaccaagggccacctgagcaacagagccatcatccgggcccccagcgtgagaggagctgctggggtgcggggcctgggcggccggggctacctggcctacacaggcctgggccggggctaccaggtgaagggggacaagcgggaggacaagctgtatgacatcctgcccggcatggagctgacccccatgaaccctgtgaccctgaagccccagggcatcaagctggccccccagatcctggaggagatctgccagaagaacaactggggccagcctgtgtaccagctgcacagcgccatcggccaggaccagaggcagctgttcctgtacaagatcaccatcccagccctggccagccagaacccagccatccaccccttcaccccacccaagctgagcgcctttgtggatgaggccaagacctacgccgctgagtacaccctgcagaccctgggcatccccacagatggaggagatggcaccatggccacagctgctgctgctgccacagccttccctggctatgctgtgcccaatgccacagcccctgtgtctgctgcccagctgaagcaggccgtgaccctgggccaggacctggccgcctacaccacctatgaggtgtaccccacctttgctgtgacagcccggggagatggctacggcaccttctag

SEQ ID NO: 19951 - DNA, 1761 bp, synthetic construct
  source 1..1761: mol_type = other DNA; note = Synthetic coding sequence
atggagagcaaccacaagtctggagatggcctgagcggcacccagaaggaggccgccctgcgggccctggtgcagaggacaggctacagcctggtgcaggagaatggccagaggaaatatggaggccccccacctggctgggatgctgcccctcctgagcggggctgtgagatcttcatcggcaagctgccccgggacctgtttgaagatgagctgatccccctgtgtgagaagattggcaagatctatgagatgaggatgatgatggacttcaacggcaacaacagaggctacgcctttgtgaccttcagcaacaaggtggaggccaagaatgccatcaagcagctgaacaactatgagatcagaaatggccgcctgctgggcgtgtgtgcctctgtggacaactgccgcctgtttgtgggcggcatccccaagaccaagaagcgggaggagatcctgtctgagatgaagaaggtgacagagggcgtggtggatgtgattgtgtaccccagcgctgctgacaagaccaagaacagaggatttgcctttgtggagtatgagagccacagagctgctgccatggcccggaggaagctgctgcccggccgcatccagctgtggggccatggaattgctgtggactgggccgagcctgaggtggaggtggatgaggacaccatgagctctgtgaagatcctgtatgtgaggaacctgatgctgagcaccagcgaggagatgattgagaaggagttcaacaacatcaagccaggagctgtggagcgggtgaagaagatccgggactatgcctttgtgcacttcagcaacagagaagatgctgtggaggccatgaaggccctgaatggcaaggtgctggatggcagccccatcgaggtgaccctggccaagcctgtggacaaggacagctatgtgcgctacacccggggcaccggcggccggggcaccatgctgcagggcgagtacacctacagcctgggccaggtgtatgaccccaccaccacctacctgggcgcccctgtgttctacgccccccagacctacgccgccatccccagcctgcacttccctgccaccaagggccacctgagcaacagagccatcatccgggcccccagcgtgagaggagctgctggggtgcggggcctgggcggccggggctacctggcctacacaggcctgggccggggctaccaggtgaagggggacaagcgggaggacaagctgtatgacatcctgcccggcatggagctgacccccatgaaccctgtgaccctgaagccccagggcatcaagctggccccccagatcctggaggagatctgccagaagaacaactggggccagcctgtgtaccagctgcacagcgccatcggccaggaccagaggcagctgttcctgtacaagatcaccatcccagccctggccagccagaacccagccatccaccccttcaccccacccaagctgagcgcctttgtggatgaggccaagacctacgccgctgagtacaccctgcagaccctgggcatccccacagatggaggagatggcaccatggccacagctgctgctgctgccacagccttccctggctatgctgtgcccaatgccacagcccctgtgtctgctgcccagctgaagcaggccgtgaccctgggccaggacctggccgcctacaccacctatgaggtgtaccccacctttgctgtgacagcccggggagatggctacggcaccttctag

SEQ ID NO: 19952 - DNA, 1761 bp, synthetic construct; identical to SEQ ID NO: 19951
  source 1..1761: mol_type = other DNA; note = Synthetic coding sequence

SEQ ID NO: 19953 - DNA, 1542 bp, synthetic construct
  source 1..1542: mol_type = other DNA; note = Synthetic coding sequence
atgcagaggacctttgcctggctgctggacagagtgcagcacctgggcgcccctgtgaccctgcgggccagctacctggagatctacaatgagcaggtgcgggacctgctgagcctgggcagcccccggcccctgcctgtgcgctggaacaagacccggggcttctacgtggagcagctgcgggtggtggagtttggcagcctggaggccctgatggagctgctgcagacaggcctgagcagaagaagaaattctgcccacaccctgaaccaggccagcagccgcagccacgccctgctgaccctgtacatcagccggcagacagcccagcagatgcccagcgtggaccctggagagccccctgtgggcggcaagctgtgctttgtggacctggccggcagcgagaaggtggccgccaccggcagcagaggagagctgatgctggaggccaacagcatcaacagaagcctgctggccctgggccactgcatcagcctgctgctggacccccagaggaagcagagccacatccccttccgggacagcaagctgaccaagctgctggccgacagcctgggcggccggggcgtgaccctgatggtggcctgtgtgagccccagcgcccagtgcctgcctgagaccctgagcaccctgcgctatgccagccgggcccagagggtgaccacccggccccaggcccccaagagccctgtggccaagcagccccagaggctggagacagagatgctgcagctgcaggaggagaacagaaggctgcagttccagctggaccagatggactgcaaggccagcggcctgagcggggcccgggtggcctgggcccagaggaacctgtatggcatgctgcaggagttcatgctggagaatgaaaggctgaggaaggagaagagccagctgcagaacagccgggacctggcccagaatgagcagaggatcctggcccagcaggtgcacgccctggagcggcggctgctgagcgcctgctaccaccaccagcagggccctggcctgaccccaccctgcccctgcctgatggccccagccccaccctgccacgccctgccccccctgtacagctgcccctgctgccacatctgccccctgtgccgggtgcccctggcccactgggcctgcctgcctggagagcaccacctgccccaggtgctggaccctgaggccagcggcggccggcccccatctgcccggcccccaccctgggccccaccctgcagccctggcagcgccaagtgcccccgggagaggagccacagcgactggacccagaccagggtgctggccgagatgctgacagaggaggaggtggtgcccagcgccccacccctgcctgtgcggccccccaagaccagccctggcctgcggggcggggccggcgtgcccaacctggcccagaggctggaggccctgcgggaccagatcggcagcagcctgcggcggggccgcagccagcccccctgcagcgagggcgcccggagccctggccaggtgctgcccccccactag

SEQ ID NO: 19954 - DNA, 786 bp, synthetic construct
  source 1..786: mol_type = other DNA; note = Synthetic coding sequence
atggtgaagggggagaagggccccaagggcaagaagatcaccctgaaggtggccaggaactgcatcaagatcacctttgatggcaagaagaggctggacctgagcaagatgggcatcaccaccttccccaagtgcatcctgcggctgagtgacatggatgagctggacctgagcaggaacctgatcaggaagatcccagacagcatcagcaagttccagaacctgcgctggctggacctgcacagcaactacatcgacaagctgcctgagagcatcggccagatgaccagcctgctgtacctgaatgtgagcaacaaccggctgaccagcaatggcctgcctgtggagctgaagcagctgaagaacatccgggctgtgaacctgggcctgaaccacctggacagcgtgcccaccaccctgggcgccctgaaggagctgcacgaggtgggcctgcatgacaacctgctgaacaacatccctgtgtccatcagcaagctgcccaagctgaagaagctgaacatcaagaggaaccccttccccaagccaggagagagcgagatcttcatcgacagcatccggcggctggagaacctgtatgtggtggaggagaaggacctgtgtgccgcctgcctgaggaagtgccagaatgcccgggacaacctgaaccgcatcaagaacatggccaccaccacccccaggaagaccatcttccccaacctgatcagccccaacagcatggccaaggacagctgggaggactggaggatccggctgaccagcagctag

SEQ ID NO: 19955 - DNA, 1770 bp, synthetic construct
  source 1..1770: mol_type = other DNA; note = Synthetic coding sequence
atggccagcagccagagggacatggaggactgggtgcaggccatccggcgggtcatctgggcccccctgggcggcggcacagcccggcgcagccacgcccaccccctggagcccctgcccccaggcatcttcggccagaggctggaggagaccgtgcaccacgagaggaaatatggcccccggctggcccccctgctggtggagcagtgtgtggacttcatccgggagcggggcctgacagaggagggcctcttcaggatgcctggccaggccaacctggtgcgggacctgcaggacagctttgactgtggggagaagcccctgtttgacagcaccacagatgtgcacacagtggccagcctgctgaagctgtacctgcgggagctgcctgagcctgtggtgccctttgcccgctatgaggacttcctgagctgtgcccagctgctgaccaaggatgaaggagagggcaccctggagctggccaagcaggtgagcaacctgccccaggccaactacaacctgctgcgctacatctgcaagttcctggatgaggtgcaggcctacagcaatgtgaacaagatgtctgtgcagaacctggccaccgtgtttggccccaacatcctgcggccccaggtggaggaccctgtgaccatcatggagggcaccagcctggtgcagcacctgatgacagtgctgatcaggaagcacagccagctgttcaccgcccctgtgcctgagggccccaccagcccccggggcggcctgcagtgtgctgtgggctggggcagcgaggaggtgacccgggacagccagggcgagcccggcggccctggcctgcctgcccacaggaccagcagcctggatggagctgctgtggccgtgctgagcaggacagcccccactggacctggcagccgctgcagccctgggaagaaggtgcagaccctgcccagctggaagagcagcttccggcagcccaggagcctgagcggcagccccaagggcggcggcagcagcctggaggtgcccatcatcagcagcggcggcaactggctgatgaatggcctgagcagcctgcggggccacagaagagccagcagcggggaccggctgaaggacagcggctctgtgcagaggctgagcacctatgacaacgtgcctgcccctggcctggtgcccggcatccccagcgtggcctccatggcctggagcggggccagcagcagcgagagctctgtgggcggcagcctgagcagctgcacagcctgccgggccagtgacagcagcgcccggagcagcctgcacacagactgggccctggagcccagccccctgcccagcagcagcgaggaccccaagagcctggacctggaccacagcatggatgaggccggggccggggccagcaacagcgagcccagcgagccagacagccccacccgggagcacgccaggagaagtgaggccctgcagggcctggtgacagagctgcgggcagagctgtgccggcagaggacagaatatgaaagatctgtgaagagaattgaggagggcagcgctgacctgaggaagaggatgagccggctggaggaggagctggaccaggagaagaagaagtacatcatgctggagatcaagctgaggaacagcgagcgggccagagaagatgctgagaggaggaaccagctgctgcagcgggagatggaggagttcttcagcaccctgggcagcctgactgtgggcgccaagggggcccgggcccccaagtag

SEQ ID NO: 19956 - DNA, 1209 bp, synthetic construct
  source 1..1209: mol_type = other DNA; note = Synthetic coding sequence
atgtctgctgagggcgctgagcccggccctggcagcggcagcggccctggccctggccccctgtgcccagagcacggccaggccctgtcctggttctgtggcagcgagaggaggcctgtgtgtgccgcctgtgccggcctgggcggccgctgccggggccaccgcatcagaagagctgaggagagagctgaggagctgaggaacaagatcgtggaccagtgtgagcggctgcagctgcagagcgctgccatcaccaagtatgtggctgatgtgctgcccgggaagaaccagagagctgtgtccatggccagcgctgcccgggagctggtgatccagaggctgagcctggtgcgcagcctgtgtgagagcgaggagcagaggctgctggagcaggtgcatggagaggaggagcgggcccaccagagcatcctgacccagagggtgcactgggccgaggccctgcagaagctggacaccatcagaacaggcctggtgggcatgctgacccacctggatgacctgcagctgatccagaaggagcaggagatctttgagaggacagaggaggccgagggcatcctggacccccaggagagcgagatgctgaacttcaatgagaagtgcaccaggagccccctgctgacccagctgtgggccacagctgtgctgggcagcctgtctggaacagaggacatcagaattgatgagaggacagtgagccccttcctgcagctgagtgatgacaggaagaccctgaccttcagcaccaagaagagcaaggcctgtgctgatggccctgagagatttgaccactggcccaatgccctggccgccaccagcttccagaatggcctgcacgcctggatggtgaatgtgcagaacagctgtgcctacaaggtgggcgtggccagcggccacctgcccaggaagggcagcggcagtgactgccgcctgggccacaatgccttctcctgggtgttcagccgctatgaccaggagttccgcttcagccacaacggccagcacgagcccctgggcctgctgcggggccctgcccagctgggcgtggtgctggacctgcaggtgcaggagctgctcttctatgagcccgccagcggcaccgtgctgtgtgcccaccacgtgtccttccctggccccctcttccctgtgtttgctgtggccgaccagaccatcagcatcgtgaggtag

SEQ ID NO: 19957 - DNA, 258 bp, synthetic construct
  source 1..258: mol_type = other DNA; note = Synthetic coding sequence
atgctgcggaggaagcccacccggctggagctgaagctggatgacatcgaggagtttgagaacatcaggaaggacctggagaccaggaagaagcagaaggaggatgtggaggtggtgggcggcagtgatggagagggcgccatcggcctgagcagtgaccccaagagccgggagcagatgatcaatgacagaattggctacaagccccagcccaagcccaacaacagaagcagccagtttggcagcctggagttctag

SEQ ID NO: 19958 - DNA, 744 bp, synthetic construct
  source 1..744: mol_type = other DNA; note = Synthetic coding sequence
atgctgagtgatggctgcggcagcgaggagaagatctctgtgcccagctgctacggcggcattggagcccctgtgtcccggcaggtgcctgccagccatgattctgagctgatggccttcatgaccaggaagctgtgggacctggagcagcaggtgaaggcccagacagatgagatcctgagcaaggaccagaagattgctgccctggaggacctggtgcagaccctgcggccccaccctgctgaggccaccctgcagaggcaggaggagctggagaccatgtgtgtgcagctgcagaggcaggtgcgggagatggagcgcttcctgagtgactatggcctgcagtgggtgggggagcccatggaccaggaggacagcgagagcaagacagtgtctgagcacggggagcgggactggatgacagccaagaagttctggaagccaggggacagcctggcccctcctgaggtggactttgaccggctgctggccagcctgcaggacctgtctgagctggtggtggagggggacacccaggtgacccctgtgcctgggggcgcccggctgcggaccctggagcccatccccctgaagctgtacagaaatggcatcatgatgtttgatggccccttccagcccttctatgaccccagcacccagcgctgcctgcgggacatcctggatggcttcttccccagcgagctgcagaggctgtacccaaatggagtgcccttcaaggtgtag

SEQ ID NO: 19959 - DNA, 1464 bp, synthetic construct; identical to SEQ ID NO: 19464
  source 1..1464: mol_type = other DNA; note = Synthetic coding sequence

SEQ ID NO: 19960 - DNA, 1020 bp, synthetic construct; identical to SEQ ID NO: 19098
  source 1..1020: mol_type = other DNA; note = Synthetic coding sequence

SEQ ID NO: 19961 - DNA, 1563 bp, synthetic construct
  source 1..1563: mol_type = other DNA; note = Synthetic coding sequence
atgagcagccccctggccagcctgagcaagaccaggaaggtgcccctgcccagcgagcccatgaaccctggaagaagaggcatccgcatctatggagatgaagatgaggtggacatgctgagtgatggctgcggcagcgaggagaagatctctgtgcccagctgctacggcggcattggagcccctgtgtcccggcaggtgcctgccagccatgattctgagctgatggccttcatgaccaggaagctgtgggacctggagcagcaggtgaaggcccagacagatgagatcctgagcaaggaccagaagattgctgccctggaggacctggtgcagaccctgcggccccaccctgctgaggccaccctgcagaggcaggaggagctggagaccatgtgtgtgcagctgcagaggcaggtgcgggagatggagcgcttcctgagtgactatggcctgcagtgggtgggggagcccatggaccaggaggacagcgagagcaagacagtgtctgagcacggggagcgggactggatgacagccaagaagttctggaagccaggggacagcctggcccctcctgaggtggactttgaccggctgctggccagcctgcaggacctgtctgagctggtggtggagggggacacccaggtgacccctgtgcctgggggcgcccggctgcggaccctggagcccatccccctgaagctgtacagaaatggcatcatgatgtttgatggccccttccagcccttctatgaccccagcacccagcgctgcctgcgggacatcctggatggcttcttccccagcgagctgcagaggctgtacccaaatggagtgcccttcaaggtgtctgacctgaggaaccaggtgtacctggaggatggcctggaccccttccctggagagggccgggtggtgggccggcagctgatgcacaaggccctggacagagtggaggagcaccctggcagcaggatgacagctgagaagttcctgaaccggctgcccaagtttgtgatccggcagggcgaggtgattgacatccggggccccatccgggacaccctgcagaactgctgccccctgcctgcccgcatccaggagatcgtggtggagacccccaccctggccgctgagcgggagaggagccaggagagccccaacaccccagccccacccctgtccatgctgcgcatcaagtcagaaaatggagagcaggccttcctgctgatgatgcagcctgacaacaccatcggagatgtgcgggccctgctggcccaggcccgggtgatggatgccagcgcctttgagatcttcagcaccttcccccccaccctgtaccaggatgacaccctgaccctgcaggccgccggcctggtgcccaaggccgccctgctgctgcgggcccggcgggcccccaagagcagcctgaagttcagccctggcccctgccccggccctggccctggccccagccctggccctggccctggccccagccctggccctggccctggccccagcccctgccccggccccagccccagcccccagtag

SEQ ID NO: 19962 - DNA, 1563 bp, synthetic construct; identical to SEQ ID NO: 19961
  source 1..1563: mol_type = other DNA; note = Synthetic coding sequence

SEQ ID NO: 19963 - DNA, 834 bp, synthetic construct
  source 1..834: mol_type = other DNA; note = Synthetic coding sequence
atgtttgatggccccttccagcccttctatgaccccagcacccagcgctgcctgcgggacatcctggatggcttcttccccagcgagctgcagaggctgtaccccaacggggtgcccttcaaggtgtctgacctgaggaaccaggtgtacctggaggatggcctggaccccttccctggagagggccgggtggtgggccggcagctgatgcacaaggccctggacagagtggaggagcaccctggcagcaggatgacagctgagaagttcctgaaccggctgcccaagtttgtgatccggcagggcgaggtgattgacatccggggccccatccgggacaccctgcagaactgctgccccctgcctgcccgcatccaggagatcgtggtggagacccccaccctggccgctgagcgggagaggagccaggagagccccaacaccccagccccacccctgtccatgctgcgcatcaagtcagaaaatggagagcaggccttcctgctgatgatgcagcctgacaacaccatcggagatgtgcgggccctgctggcccaggcccgggtgatggatgccagcgcctttgagatcttcagcaccttcccccccaccctgtaccaggatgacaccctgaccctgcaggccgccggcctggtgcccaaggccgccctgctgctgcgggcccggcgggcccccaagagcagcctgaagttcagccctggcccctgccccggccctggccctggccccagccctggccctggccctggccccagccctggccctggccctggccccagcccctgccccggccccagccccagcccccagtag

SEQ ID NO: 19964 - DNA, 1314 bp, synthetic construct
  source 1..1314: mol_type = other DNA; note = Synthetic coding sequence
atggccggcggcccccccaaggccctgcccagcacaggcccccacagcctgcgggacatgccccaccccctggccggcagcagcagcgaggaggccgtgggcggggacagcacccccagcccagacctgctgatggcccggagctttggagacaaggacctgatcctgcccaacggcggcaccccagctggcaccagcagccctgccagcagcagcagcctgctgaaccggctgcagctggatgatgacattgatggagagacccgggacctcttcgtcatcgtggatgaccccaagaagcacgtgtgcaccatggagacctacatcacctaccgcatcaccaccaagagcaccagggtggagtttgacctgcctgagtacagcgtgagaagacgctaccaggactttgactggctgcggagcaagctggaggagagccagcccacccacctgatcccccccctgcctgagaagtttgtggtgaagggcgtggtggaccgcttcagcgaggagtttgtggagaccaggaggaaggccctggacaagttcctgaagaggatcacagaccaccctgtgctgtccttcaatgagcacttcaacatcttcctgacagccaaggacctgaatgcctacaagaagcagggcatcgccctgctgaccaggatgggagagagcgtgaagcacgtgactggaggctacaagctgcggacccggcccctggagtttgctgccatcggggactacctggacacctttgccctgaagctgggcaccatcgaccgcatcgcccagaggatcatcaaggaggagattgagtacctggtggagctgcgggagtatggccctgtgtacagcacctggagcgccctggagggggagctggccgagcccctggagggcgtgtctgcctgcatcggcaactgcagcacagccctggaggagctgacagatgacatgacagaggacttcctgcctgtgctgcgggagtacatcctgtacagcgacagcatgaagtctgtgctgaagaagagggaccaggtgcaggccgagtatgaggccaagctggaggccgtggccctgaggaaagaagatcggcccaaggtgcctgcagatgtggagaagtgccaggacaggatggagtgcttcaatgctgacctgaaggctgacatggagcgctggcagaacaacaagaggcaggacttccggcagctgctgatgggcatggctgacaagaacatccagtactatgagaagtgcctgatggcctgggagagcatcatccccctgctgcaggagaagcaggaggccaagtag

SEQ ID NO: 19965 - DNA, 1263 bp, synthetic construct
  source 1..1263: mol_type = other DNA; note = Synthetic coding sequence
atgagcagcccccgggacttccgggcagagcctgtgaatgactatgagggcaatgacagcgaggccgaggacctgaacttccgggagaccctgcccagcagcagccaggagaacacccccaggagcaaggtgtttgagaacaaggtgaacagcgagaaggtgaagctgagcctgaggaacttcccccacaatgactatgaagatgtgtttgaggagcccagcgagagcggcagtgaccccagcatgtggacagcccggggccccttccggcgggaccgctggagcagtgaagatgaggaggccgccggccccagccaggccctgagccccctgctgagtgacaccaggaagatcgtgtctgagggggagctggaccagctggcccagatccggcccctcatcttcaacttccacgagcagacagccatcaaggactgcctgaagatcctggaggagaagacagctgcctatgacatcatgcaggagttcatggccctggagctgaagaacctgcccggggagttcaacagcggcaaccagcccagcaaccgggagaagaaccgctacagagacatcctgccctatgacagcaccagggtgcccctgggcaagagcaaggactacatcaatgccagctacatccgcatcgtgaactgtggggaggagtacttctacatcgccacccagggccccctgctgagcaccattgatgacttctggcagatggtgctggagaacaacagcaatgtgattgccatgatcacccgggagattgagggcggcatcatcaagtgctaccactactggcccatcagcctgaagaagcccctggagctgaagcacttccgggtcttcctggagaactaccagatcctgcagtacttcatcatccgcatgttccaggtggtggagaagagcacaggcaccagccacagcgtgaagcagctgcagttcaccaagtggccagaccacggcaccccagccagcgctgacagcttcatcaagtacatccgctatgccaggaagagccacctgaccggccccatggtggtgcactgcagcgctggcattggaagaactggagtcttcctgtgtgtggatgtggtgttctgtgccatcgtgaagaactgcagcttcaacatcatggacatcgtggcccagatgagggagcagaggagcggcatggtgcagaccaaggagcagtaccacttctgctatgacatcgtgctggaggtgctgaggaagctgctgaccctggactag

SEQ ID NO: 19966 - DNA, 837 bp, synthetic construct
  source 1..837: mol_type = other DNA; note = Synthetic coding sequence
atgagcagcccccgggacttccgggcagagcctgtgaatgactatgagggcaatgacagcgaggccgaggacctgaacttccgggagaccctgcccagcagcagccaggagaacacccccaggagcaaggtgtttgagaacaaggtgaacagcgagaaggtgaagctgagcctgaggaacttcccccacaatgactatgaagatgtgtttgaggagcccagcgagagcggcagtgaccccagcatgtggacagcccggggccccttccggcgggaccgctggagcagtgaagatgaggaggccgccggccccagccaggccctgagccccctgctgagtgacaccaggaagatcgtgtctgagggggagctggaccagctggcccagatccggcccctcatcttcaacttccacgagcagacagccatcaaggactgcctgaagatcctggaggagaagacagctgcctatgacatcatgcaggagttcatgacaggcaccagccacagcgtgaagcagctgcagttcaccaagtggccagaccacggcaccccagccagcgctgacagcttcatcaagtacatccgctatgccaggaagagccacctgaccggccccatggtggtgcactgcagcgctggcattggaagaactggagtcttcctgtgtgtggatgtggtgttctgtgccatcgtgaagaactgcagcttcaacatcatggacatcgtggcccagatgagggagcagaggagcggcatggtgcagaccaaggagcagtaccacttctgctatgacatcgtgctggaggtgctgaggaagctgctgaccctggactag

SEQ ID NO: 19967 - DNA, 681 bp, synthetic construct
  source 1..681: mol_type = other DNA; note = Synthetic coding sequence
atgagcagcccccgggacttccgggcagagcctgtgaatgactatgagggcaatgacagcgaggccgaggacctgaacttccgggagaccctgcccagcagcagccaggagaacacccccaggagcaaggtgtttgagaacaaggtgaacagcgagaaggtgaagctgagcctgaggaacttcccccacaatgactatgaagatgtgtttgaggagcccagcgagagcggcagtgaccccagcatgtggacagcccggggccccttccggcgggaccgctggagcagtgaagatgaggaggccgccggccccagccaggccctgagccccctgctgagtgacaccaggaagatcgtgtctgagggggagctggaccagctggcccagatccggcccctcatcttcaacttccacgagcagacagccatcaaggactgcctgaagatcctggaggagaagacagctgcctatgacatcatgcaggagttcatggccctggagctgaagaacctgcccggggagttcaacagcggcaaccagcccagcaaccgggagaagaaccgctacagagacatcctgcccttccagcaccacggctacagcggccccaatgaaagaaccaccttctggcacggcagcaatgaaggagctgtgtccctgctgctgcgctactgtgcctag

SEQ ID NO: 19968 - DNA, 681 bp, synthetic construct
  source 1..681: mol_type = other DNA; note = Synthetic coding sequence
atgcaccagacctgtgtgcggctggagcgggaggccagcgcccggcccagccctggccctgtgctgcccccccggcccctgcccagccacacagagctgcagatccgggagggccccaagaggaccatccgggctgctgctgagggcgccccctgtgtgggccgggtgcgctgtgcccctggcaacagaggaggccgggagggcgccagcggcgtgcggggcggcgtggcccaggtgcccccccggctgcctgccccacccatcggccctgagagagatgacctggccggcggggccggcaggaagcccctgcccagcacagctgctgccagcagccctggcagcgctgctgctgccacagctgccctgtgccccccagcccggctgagcacccccagcatgagcggcctgcgggtgtacagcacctctgtgacaggcagccgggagatcaagagccagcagagcgaggtgacccgcatcctggatggcaagaggatccagtaccagctggtggacatcagccaggacaatgccctgagagatgagatgagggccctggccggcaaccccaaggccaccccaccccagatcgtgaatggagaccagtactgtggggactatgagctgtttgtggaggccgtggagcagaacaccctgcaggagttcctgaagctggcctag

SEQ ID NO: 19969 - DNA, 1518 bp, synthetic construct
  source 1..1518: mol_type = other DNA; note = Synthetic coding sequence
atggaccctggaaatgaaaacagcgccacagaggccgccgccatcatcgacctggaccctgactttgagccccagagccggcccaggagctgcacctggcccctgcccaggcctgagatcgccaaccagcccagcgagcccccagaggtggagccagacctgggggagaaggtgcacacagagggccgctctgagcccatcctgctgcccagccggctgcctgagcctgctgggggcccccagcccggcatcctgggcgctgtgacaggccccaggaaaggaggcagcagaagaaatgcctggggcaaccagagctatgcagagctgatcagccaggccatcgagagcgcccctgagaagaggctgaccctggcccagatctatgagtggatggtgaggacagtgccctacttcaaggacaagggggacagcaacagcagcgctggctggaagaacagcatccgccacaacctgagcctgcacagcaagttcatcaaggtgcacaatgaggccaccgggaagagctcctggtggatgctgaaccctgagggcggcaagagcggcaaggcccccaggagaagagctgcctccatggacagcagcagcaagctgctgcggggccgcagcaaggcccccaagaagaagcccagcgtgctgcctgcccctcctgagggcgccacccccaccagccctgtgggccactttgccaagtggagcggcagcccctgcagcaggaaccgggaggaggccgacatgtggaccaccttccggcccaggagcagcagcaatgccagctctgtgtccacccggctgagccccctgcggcctgagagcgaggtgctggccgaggagatcccagcctctgtgtcctcctatgctgggggcgtgccccccaccctgaatgaaggcctggagctgctggatggcctgaacctgaccagcagccacagcctgctgagccgcagcggcctgagcggcttcagcctgcagcaccctggggtgacaggccccctgcacacctacagcagcagcctcttcagccctgctgagggccccctgtctgctggggagggctgcttcagcagcagccaggccctggaggccctgctgaccagtgacaccccacctcctccagcagatgtgctgatgacccaggtggaccccatcctgagccaggcccccaccctgctgctgctgggcggcctgcccagcagcagcaagctggccaccggggtgggcctgtgccccaagcccctggaggcccctggccccagcagcctggtgcccaccctgtccatgattgcccctcctcctgtgatggccagcgcccccatccccaaggccctgggcacccctgtgctgaccccacccacagaggccgccagccaggacaggatgccccaggacctggacctggacatgtacatggagaacctggagtgtgacatggacaacatcatcagtgacctgatggatgaaggagagggcctggacttcaactttgagccagacccctag

SEQ ID NO: 19970 - DNA, 1062 bp, synthetic construct
  source 1..1062: mol_type = other DNA; note = Synthetic coding sequence
atggactacaagagcagcctcatccaggacggcaaccccatggagaacctggagaagcagctgatctgccccatctgcctggagatgttcaccaagcctgtggtgatcctgccctgccagcacaacctgtgcaggaaatgtgccaatgacatcttccaggccgccaacccctactggaccagccggggcagctctgtgtccatgtctgggggccgcttccgctgccccacctgcagacatgaggtgatcatggacagacatggagtgtatggcctgcagaggaacctgctggtggagaacatcatcgacatctacaagcaggagtgcagcagccggcccctgcagaagggcagccaccccatgtgcaaggagcatgaagatgagaagatcaacatctactgcctgacctgtgaggtgcccacctgcagcatgtgcaaggtgtttggcatccacaaggcctgtgaggtggcccccctgcagagcgtcttccagggccagaagacagagctgaacaactgcatctccatgctggtggccggaaatgacagagtgcagaccatcatcacccagctggaggacagcagaagagtgaccaaggagaacagccaccaggtgaaggaggagctgagccagaagtttgacaccctgtatgccatcctggatgagaagaagtctgagctgctgcagaggatcacccaggagcaggagaagaagctgtccttcatcgaggccctgatccagcagtaccaggagcagctggacaagagcaccaagctggtggagacagccatccagagcctggatgagcccggcggggccaccttcctgctgacagccaagcagctgatcaagagcatcgtggaggccagcaagggctgccagctgggcaagacagagcagggctttgagaacatggacttcttcaccctggacctggagcacatcgcagatgccctgcgggccatcgactttggaacagatgaggaggaggaggagttcatcgaggaggaggaccaggaggaggaggagagcacagagggcaaggaggagggccaccagtag

SEQ ID NO: 19971 - DNA, 1179 bp, synthetic construct
  source 1..1179: mol_type = other DNA; note = Synthetic coding sequence
atgggcgtgaaccagagcgtgggcttcccccctgtgacaggcccccacctggtgggctgtggagatgtgatggagggccagaacctgcagggcagcttcttccgcctcttctacccctgccagaaggccgaggagaccatggagcagcccctgtggatccccaggtatgagtactgcaccggcctggccgagtacctgcagttcaacaagagatgtggcggcctgctcttcaacctggccgtgggcagctgccgcctgcctgtgtcctggaatggccccttcaagaccaaggacagcggctaccccctcatcatcttcagccacggcctgggcgccttccgcaccctgtacagcgccttctgcatggagctggccagccggggctttgtggtggccgtgcctgagcaccgggacagatctgctgccaccacctacttctgcaagcaggcccctgaggagaaccagcccaccaatgaaagcctgcaggaggagtggatccccttcagaagagtggaggagggggagaaggagttccacgtgaggaacccccaggtgcaccagagggtgtctgaatgtctgcgggtgctgaagatcctgcaggaggtgacagctggccagacagtgttcaacatcctgcccggcggcctggacctgatgaccctgaagggcaacatcgacatgagccgggtggccgtgatgggccacagctttggaggagccacagccatcctggccctggccaaggagacccagttccgctgtgctgtggccctggatgcctggatgttccccctggagcgggacttctaccccaaggcccggggccctgtgttcttcatcaacacagagaagttccagaccatggagagcgtgaacctgatgaagaagatctgtgcccagcacgagcagagccgcatcatcaccgtgctgggctctgtgcacaggagccagacagactttgcctttgtgacaggcaacctgattggcaagttcttcagcacagagacccggggcagcctggacccctatgagggccaggaggtgatggtgcgggccatgctggccttcctgcagaagcacctggacctgaaggaggactacaaccagtggaacaacctgattgagggcatcggccccagcctgacccctggggccccccaccacctgagcagcctgtag

SEQ ID NO: 19972 - DNA, 1179 bp, synthetic construct; identical to SEQ ID NO: 19971
  source 1..1179: mol_type = other DNA; note = Synthetic coding sequence

SEQ ID NO: 19973 - DNA, 213 bp, synthetic construct
  source 1..213: mol_type = other DNA; note = Synthetic coding sequence
atggtgaggaccaagacctggaccctgaagaagcactttgtgggctaccccaccaacagcgactttgagctgaagacagctgagctgccccccctgaagaatggagaggtgctgctggaggccctcttcctgactgtggacccctacatgagggtggccgccaagaggctgaaggagggggacaccatgatgggccagcaggtggccaagtag

SEQ ID NO: 19974 - DNA, 213 bp, synthetic construct; identical to SEQ ID NO: 19973
  source 1..213: mol_type = other DNA; note = Synthetic coding sequence

SEQ ID NO: 19975 - DNA, 534 bp, synthetic construct; identical to SEQ ID NO: 18316
  source 1..534: mol_type = other DNA; note = Synthetic coding sequence

SEQ ID NO: 19976 - DNA, 1263 bp, synthetic construct; identical to SEQ ID NO: 19965
  source 1..1263: mol_type = other DNA; note = Synthetic coding sequence

SEQ ID NO: 19977 - DNA, 837 bp, synthetic construct; identical to SEQ ID NO: 19966
  source 1..837: mol_type = other DNA; note = Synthetic coding sequence

SEQ ID NO: 19978 - DNA, 681 bp, synthetic construct; identical to SEQ ID NO: 19967
  source 1..681: mol_type = other DNA; note = Synthetic coding sequence

SEQ ID NO: 19979 - DNA, 789 bp, synthetic construct
  source 1..789: mol_type = other DNA; note = Synthetic coding sequence
atgagccgctacctgcggccccccaacaccagcctgtttgtgagaaatgtggctgatgacaccaggtctgaggacctgcggcgggagtttggccgctatggccccatcgtggatgtgtatgtgcccctggacttctacacccggcggccccggggctttgcctacgtgcagtttgaagatgtgagagatgctgaagatgccctgcacaacctggacaggaagtggatctgtggccggcagatcgagatccagtttgcccagggcgacaggaagacccccaaccagatgaaggccaaggagggcagaaatgtgtacagcagcagccgctatgatgattatgaccgctacagaagaagccgcagccgctcctatgaaagaagaagaagccgcagccgcagctttgactacaactacagaagaagctacagccccaggaacagccggcccaccggccggccccggcgcagccgcagccacagcgacaatgaccgcttcaagcacaggaacagaagcttcagccgcagcaagagcaacagccgcagccgcagcaagagccagcccaagaaggagatgaaggccaagagccgcagccgcagcgccagccacaccaagacccggggcaccagcaagacagacagcaagacccactacaagagcggcagccgctatgagaaggagagcaggaagaaggagccccccaggagcaagagccagagccgcagccagagccgcagccgcagcaagagccgcagccgctcctggaccagccccaagagcagcggccactag

SEQ ID NO: 19980 - DNA, 522 bp, synthetic construct
  source 1..522: mol_type = other DNA; note = Synthetic coding sequence
atgagccgctacctgcggccccccaacaccagcctgtttgtgagaaatgtggctgatgacaccaggtctgaggacctgcggcgggagtttggccgctatggccccatcgtggatgtgtatgtgcccctggacttctacacccggcggccccggggctttgcctacgtgcagtttgaagatgtgagagatgctgaagatgccctgcacaacctggacaggaagtggatctgtggccggcagatcgagatccagtttgcccagggcgacaggaagacccccaaccagatgaaggccaaggagggcagaaatgtgtacagcagcagccgctatgatgattatgaccgctacagaagaagccgcagccgctcctatgaaagaagaagaagccgcagccgcagctttgactacaactacagaagaagctacagccccaggaacagccggcccaccggccggccccggcgcagccgcagccacagcgacaatgacagccaggtgtccaagaagaagaatgaaagatag

SEQ ID NO: 19981 - DNA, 669 bp, synthetic construct
  source 1..669: mol_type = other DNA; note = Synthetic coding sequence
atgtctgccttcggccatgatgaggcctggatggaggccggcggcttcggcctggaggccgctgagaggacagagtaccagagcctgtgcaagagcaagctgctcttcctgggggagcagagcgtgggcaagaccagcatcatcagccgcttcatgtacaacagctttggctgtgcctgccaggccaccgtgggcatcgacttcctgagcaagaccatgtacctggaggaccagatcgtgcagctgcagctgtgggacacagctggccaggagcgcttccacagcctcatccccagctacatccgggacagcaccatcgctgtggtggtgtatgacatcaccaacatcaacagcttcaaggagacagacaagtgggtggagcacgtgcgggcagagagaggagatgatgtggtgatcatgctgctgggcaacaagattgacctggacaacaagaggcaggtgacagctgagcagggcgaggagaagagcaggaacctgaatgtgatgtttattgagaccagcgccaagacaggctacaacgtgaagaagctgttccggcgggtggccagcgccctgctgagcaccaggaccagccccccacccaaggagggcaccgtggagattgagctggagagctttgaggagagcggcaacagaagctactgctag

SEQ ID NO: 19982 - DNA, 348 bp, synthetic construct
  source 1..348: mol_type = other DNA; note = Synthetic coding sequence
atggtgcagatcatcaaggacaccaatgagttcaagaccttcctgacagctgctggccacaagctggccgtggtgcagttcagcagcaagagatgtggcccctgcaagaggatgtttcctgtgttccacgccatgtctgtgaagtaccagaatgtgttctttgccaacgtggatgtgaacaacagccctgagctggccgagacctgccacatcaagaccatccccaccttccagatgttcaagaagagccagaaggtgaccctcttcagccgcatcaagaggatcatctgctgctacagaagtggcttcatgagcaacctgtgcctggctgatgatggaaatgaatag

SEQ ID NO: 19983 - DNA, 384 bp, synthetic construct
  source 1..384: mol_type = other DNA; note = Synthetic coding sequence
atggtgcagatcatcaaggacaccaatgagttcaagaccttcctgacagctgctggccacaagctggccgtggtgcagttcagcagcaagagatgtggcccctgcaagaggatgtttcctgtgttccacgccatgtctgtgaagtaccagaatgtgttctttgccaacgtggatgtgaacaacagccctgagctggccgagacctgccacatcaagaccatccccaccttccagatgttcaagaagagccagaaggtgaccctcttcagccgcatcaagaggatcatctgctgctacagaagtggcttcatgagcaacctgatctttgagttctgtggggctgatgccaagaagctggaggccaagacccaggagctgatgtag

SEQ ID NO: 19984 - DNA, 1767 bp, synthetic construct
  source 1..1767: mol_type = other DNA; note = Synthetic coding sequence
atgcacaggtctgcccccagccagaccaccaagaggagccgcagccccttcagcaccaccaggaggtcctgggatgattctgagagcagcggcaccaacctgaacatcgacaatgaagactacagccgctacccaccccgggagtaccgggccagcggcagcagaagaggcatggcctacggccacatcgacagctatggagcagatgattctgaggaggagggcgccggccctgtggagcggccccctgtgcggggcaagacaggcaagttcaaggatgacaagctgtatgaccctgagaagggggcccggagcctggccggccccccaccccacttcagcagcttcagcagagatgtgcgggaggagcgggacaagctggaccctgtgcctgctgcccgctgcagcgccagcagagctgacttcctgccccagagctctgtggccagccagagcagcagcgagggcaagctggccaccaagggggacagcagcgagcgggagcggcgggagcagaacctgcctgcccggcccagccgggcccctgtgtccatctgtggcggcggggagaacaccagcaagtctgctgaggagcctgtggtgcggcccaagatccggaacctggccagccccaactgtgtgaagcccaagatcttctttgacacagatgatgatgatgacatgccccacagcaccagccgctggagggacacagccaatgacaatgaaggccacagtgatggcctggcccggcggggccgcggggagagcagcagcggctacccagagcccaagtacccagaggacaagcgggaggcccggagtgaccaggtgaagccagagaaggtgcccaggagaagaaggaccatggctgaccctgacttctggacccacagtgatgactactacaagtactgtgatgaggacagcgacagcgacaaggagtggattgctgccctgcggaggaagtaccgcagccgggagcagaccctgagcagcagcggggagagctgggagaccctgcccgggaaggaggagcgggagcccccccaggccaaggtgtctgccagcacaggcaccagccctggccctggggccagcgccagcgctggggccggggccggggccagcgctggcagcaatggcagcaactacctggaggaggtgcgggagcccagcctgcaggaggagcaggccagcctggaggagggggagatcccctggctgcagtaccatgaaaatgacagcagcagcgagggggacaatgacagcggccacgagctgatgcagcccggggtcttcatgctggatggcaacaacaacctggaggatgacagctctgtgtctgaggacctggaggtggactggagcctgtttgatggctttgctgatggcctgggcgtggccgaggccatctcctatgtggacccccagttcctgacctacatggccctggaggagcggctggcccaggccatggagacagccctggcccacctggagagcctggccgtggatgtggaggtggccaaccccccagccagcaaggagagcattgatgccctgcctgagatcctggtgacagaagatcatggagctgtgggccaggagatgtgctgccccatctgctgcagtgaatatgtgaagggggaggtggccacagagctgccctgccaccactacttccacaagccctgtgtgtccatctggctgcagaagagcggcacctgccctgtgtgccgctgcatgtttcctccacccctgtag

SEQ ID NO: 19985 - DNA, 612 bp, synthetic construct
  source 1..612: mol_type = other DNA; note = Synthetic coding sequence
atgcctgagcagttctctgtggccgagttcctggccgtgacagctgaggacctgagcagccctgctggagctgctgcctttgctgccaagatgccccgctacagaggagctgccctggcccgggaggagatcctggagggggaccaggccatcctgcagaggatcaagaaggctgtgcgggccatccacagcagcggcctgggccacgtggagaatgaggagcagtaccgggaggccgtggagagcctgggcaacagccacctgagccagaacagccatgagctgagcacaggcttcctgaacctggccgtgttcacccgggaggtggccgccctcttcaagaacctgatccagaacctgaacaacatcgtgtccttccccctggacagcctgatgaagggccagctgagagatggccggcaggacagcaagaagcagctggagaaggcctggaaggactatgaggccaagatggccaagctggagaaggagcgggaccgggcccgggtgactggaggcatcccagcctggaacctgggcatcccagccaagccccaccccaccctgaagagggccagcgagagcccccaggcccccccagaccctgcctag

SEQ ID NO: 19986 - DNA, 1932 bp, synthetic construct; identical to SEQ ID NO: 19595
  source 1..1932: mol_type = other DNA; note = Synthetic coding sequence

SEQ ID NO: 19987 - DNA, 1368 bp, synthetic construct
  source 1..1368: mol_type = other DNA; note = Synthetic coding sequence
atgggccaggagagcagcaagcctgtgtggcccaaccccaccggcggctaccagagcaacacaggaagaagatatggaagaagacatgcctacgtgtccttccggccccccaccagccagcgggagcgcatcgccagccagaggaagaccaacagcgaggtgcccatgcacaggtctgcccccagccagaccaccaagaggagccgcagccccttcagcaccacccggcgctcctgggatgacagcgagagcagcggcaccaacctgaacatcgacaatgaagactacagcagcaccagccgctggagggacacagccaatgacaatgaaggccacagtgatggcctggcccggcggggccgcggggagagcagcagcggctacccagagcccaagtacccagaggacaagcgggaggcccggagtgaccaggtgaagccagagaaggtgcccaggagaagaaggaccatggctgaccctgacttctggacccacagtgatgactactacaagtactgtgatgaagattctgacagcgacaaggagtggattgctgccctgcggaggaagtaccgcagccgggagcagaccctgagcagcagtggagagagctgggagaccctgcccgggaaggaggagcgggagcccccccaggccaaggtgtctgccagcacaggcaccagccctggccctggggccagcgccagcgctggagctggagctggggccagcgctggcagcaatggcagcaactacctggaggaggtgcgggagcccagcctgcaggaggagcaggccagcctggaggagggggagatcccctggctgcagtaccatgaaaatgacagcagcagcgagggggacaatgattctggccacgagctgatgcagcccggggtcttcatgctggatggcaacaacaacctggaggatgacagctctgtgtctgaggacctggaggtggactggagcctgtttgatggctttgctgatggcctgggcgtggccgaggccatctcctatgtggacccccagttcctgacctacatggccctggaggagcggctggcccaggccatggagacagccctggcccacctggagagcctggccgtggatgtggaggtggccaaccccccagccagcaaggagagcattgatgccctgcctgagatcctggtgacagaggaccacggggctgtgggccaggagatgtgctgccccatctgctgcagtgaatatgtgaagggggaggtggccacagagctgccctgccaccactacttccacaagccctgtgtgtccatctggctgcagaagagcggcacctgccctgtgtgccgctgcatgttccccccacccctgtag

SEQ ID NO: 19988 - DNA, 390 bp, synthetic construct
  source 1..390: mol_type = other DNA; note = Synthetic coding sequence
atggccgagctgatccagaagaagctgcagggcgaggtggagaagtaccagcagctgcagaaggacctgagcaagtccatgagcggccggcagaagctggaggcccagctgacagagaacaacatcgtgaaggaggagctggccctgctggatggcagcaatgtggtgttcaagctgctgggccctgtgctggtgaagcaggagctgggggaggcccgggccaccgtgggcaagaggctggactacatcacagctgagatcaagagatatgagagccagctgcgggacctggagcggcagagcgagcagcagcgggagaccctggcccagctgcagcaggagttccagagggcccaggccgccaaggccggggcccctgggaaggcctag

SEQ ID NO: 19989 - DNA, 390 bp, synthetic construct; identical to SEQ ID NO: 19988
  source 1..390: mol_type = other DNA; note = Synthetic coding sequence

SEQ ID NO: 19990 - DNA, 390 bp, synthetic construct; identical to SEQ ID NO: 19988
  source 1..390: mol_type = other DNA; note = Synthetic coding sequence

SEQ ID NO: 19991 - DNA, 1512 bp, synthetic construct
  source 1..1512: mol_type = other DNA; note = Synthetic coding sequence
atgaagtgtgagcactgcaccaggaaggagtgcagcaagaagaccaagacagatgaccaggagaatgtgtctgcagatgcccccagccctgcccaggagaatggagagaagggggagttccacaagctggctgatgccaagatcttcctgagtgactgcctggcctgtgacagctgcatgacagctgaggagggcgtgcagctgagccagcagaatgccaaggacttcttccgggtgctgaacctgaacaagaagtgtgacaccagcaagcacaaggtgctggtggtgtctgtgtgcccccagagcctgccctactttgctgccaagttcaacctgtctgtgacagatgccagccggcggctgtgtggcttcctgaagagcctgggcgtgcactacgtgtttgacaccaccatcgctgctgacttcagcatcctggagagccagaaggagtttgtgcggcgctaccggcagcacagcgaggaggagaggaccctgcccatgctgaccagcgcctgccccggctgggtgcgctatgcagagcgggtgctgggccggcccatcacagcccacctgtgcacagccaagagcccccagcaggtgatgggcagcctggtgaaggactactttgcccggcagcagaacctgagccctgagaagatcttccacgtgattgtggccccctgctatgacaagaagctggaggccctgcaggagagcctgcccccagccctgcacggcagcagaggagctgactgtgtgctgaccagcggcaaggtgctgatctcctggtggtgcacccctgtgatcacagccacccaggaggccgccgcccgggagagcctggagcccggccggcagaggctgcagagggacaagatcgcccccctggacagcagcctgggcggcggcggggagatcgcccagatcatggagcagggcgacctgtctgtgagagatgctgctgtggacaccctgtttggagacctgaaggaggacaaggtgaccaggcatgatggagccagcagtgatggccacctggcccacatcttcagacatgctgccaaggagctgttcaatgaagatgtggaggaggtgacctaccgggccctgaggaacaaggacttccaggaggtgaccctggagaagaatggagaggtggtgctgcgctttgctgctgcctacggcttcaggaacatccagaacatgatcctgaagctgaagaagggcaagttccccttccactttgtggaggtgctggcctgtgccggcggctgcctgaatggccggggccaggcccagaccccagatggccatgctgacaaggccctgctgcggcagatggagggcatctatgctgacatccctgtgagaagacctgagagcagcgcccacgtgcaggagctgtaccaggagtggctggagggcatcaacagccccaaggcccgggaggtgctgcacaccacctaccagagccaggagcggggcacccacagcctggacatcaagtggtag

SEQ ID NO: 19992 - DNA, 348 bp, synthetic construct
  source 1..348: mol_type = other DNA; note = Synthetic coding sequence
atggccacagagcctgaggccgctgagcctgtggtgcccagcctggtggaccgctacttcacccgctggtacaagccagatgtgaagggcaagttctgtgaggaccactgcatcctgcagcacagcaaccgcatctgtgtgatcaccctggccgagagccaccctgtgctgcagagcggcaagaccatcaagagcatctcctaccagatcagcaccaactgcagccggctgcagaacaaggtgtctgggaagttcaagaggcgcatcatctacctggagaaggtggaggatgtgatcaagaggaagatgatgcccctgagcctgggcctgcacctgccccacagctag

SEQ ID NO: 19993 - DNA, 1566 bp, synthetic construct
  source 1..1566: mol_type = other DNA; note = Synthetic coding sequence
atgaatgtgtccctgagccagaagacagtgaagatccacaggctcttccccatgctggccttcagcgagccctatgaatttgtgtccctggagtggctgcagaagtggctggatgagagcacccccaccaagcccatcgacaaccacgcctgcctgtgcagccatgacaagctgcacccagacaagatcagcatcatgaagaggatcagtgaatatgctgctgacatcttctacagccgctatggaggcggcccccggctgactgtgaaggccctgtgcaaggaatgtgtggtggagcgctgccgcatcctgcggctgaagaaccagctgaatgaagactacaagacagtgaacaacctgctgaaggctgctgtgaagggagatggcttctgggtgggcaagagcagcctgcgctcctggaggcagctggccctggagcagctggatgagcaggatggagatgctgagcagagcaatggcaagatgaatggcagcaccctgaacaaggatgagagcaaggaggagaggaaggaggaggaggagctgaacttcaatgaagacatcctgtgcccccacggggagctgtgcatcagtgaaaatgaaagaaggctggtgtccaaggaggcctggagcaagctgcagcagtacttccccaaggcccctgagttccccagctacaaggagtgctgcagccagtgcaagatcctggagcgggagggggaggagaatgaggccctgcacaagatgattgccaatgagcagaagaccagcctgcccaacctcttccaggacaagaaccggccctgcctgagcaactggccagaggacacagatgtgctgtacatcgtgtcccagttctttgtggaggagtggaggaagtttgtgaggaagcccacccgctgcagccctgtgtcctctgtgggcaacagcgccctgctgtgcccccacggcggcctgatgttcacctttgcctccatgaccaaggaggacagcaagctgattgccctgatctggcccagcgagtggcagatgatccagaagctgtttgtggtggaccacgtgatcaagatcacccgcatcgaggtgggagatgtgaaccccagcgagacccagtacatcagcgagcccaagctgtgcccagaatgtcgggagggcctgctgtgccagcagcagagggacctgcgggagtacacccaggccaccatctacgtgcacaaggtggtggacaacaagaaggtgatgaaggacagcgcccctgagctgaatgtgagcagcagcgagacagaggaggacaaggaggaggccaagccagatggagagaaggaccctgacttcaaccagatcatgcacgccttctctgtggccccctttgaccagaacctgagcattgatggcaagatcctgagtgatgactgtgccaccctgggcaccctgggcgtcatccctgagagcgtcatcctgctgaaggcagatgagcccatcgctgactatgctgccatggatgatgtgatgcaggtgtgcatgcctgaggagggcttcaagggcaccggcctgctgggccactag

SEQ ID NO: 19994 - DNA, 984 bp, synthetic construct
  source 1..984: mol_type = other DNA; note = Synthetic coding sequence
atgacagctgtgggcgctgagcggctgacctctgtgcgggcctggctgagctgctgcggggcctgtgtgtgtgtgttcctgttcctgtgcctgtgtgtgttccccctgcgggtgcacgtgcacgtgtggggcggggagtgccgggtggacattgctgtgtttgtgtccaagcacatgattgtggccctgatgcacgtgactggagctgctggcctgctgcggctgtgtgtgcgggcctgtgtgtgcatgagggtgtgtgccacagcccacatgtacagagtggacaagagcttcaccagcagaagatctgtgtggaggagtgatggccagaaccagcacttcccccaggccctggacctgagccgggtgaacctggtgcccagctacacccccagcctgtaccccaagaacacagacctgtttgagatgattgagaagatgcagggcagcaggatggatgagcagcgctgcagcttccccccacccctgaagacagaggaggactacatcccctaccccagcgtgcatgaggtgctgggccgggagggccccttccccctcatcctgctgccccagtttggaggctactggattgagggcaccaaccacgagatcaccagcatccctgagacagagcccctgcagagccccaccaccaaggtgaagctggagtgcaaccccacagcccgcatctacaggaagcacttcctgggcaaggagcacttcaactactacagcctggatgctgccctgggccacctggtgttcagcctgaagtatgatgtgattggagaccaggagcacctgcggctgctgctgcggaccaagtgcaggacctaccatgatgtgatccccatcagctgcctgacagagttccccaacgtggtgcagatggccaagctggtgtgtgaagatgtgaatgtggaccgcttctaccctgtgctgtaccccaaggtgtggctggacctgggcacagcccactag

SEQ ID NO: 19995 - DNA, 2079 bp, synthetic construct
  source 1..2079: mol_type = other DNA; note = Synthetic coding sequence
atgattgagaagatgcagggcagcaggatggatgagcagcgctgcagcttccccccacccctgaagacagaggaggactacatcccctaccccagcgtgcatgaggtgctgggccgggagggccccttccccctcatcctgctgccccagtttggaggctactggattgagggcaccaaccacgagatcaccagcatccctgagacagagcccctgcagagccccaccaccaaggtgaagctggagtgcaaccccacagcccgcatctacaggaagcacttcctgggcaaggagcacttcaactactacagcctggatgctgccctgggccacctggtgttcagcctgaagtatgatgtgattggagaccaggagcacctgcggctgctgctgcggaccaagtgcaggacctaccatgatgtgatccccatcagctgcctgacagagttccccaacgtggtgcagatggccaagctggtgtgtgaagatgtgaatgtggaccgcttctaccctgtgctgtaccccaaggccagccggctgattgtgacctttgatgaacatgtgatcagcaacaacttcaagtttggagtcatctaccagaagctgggccagaccagcgaggaggagctgttcagcaccaatgaggagagccctgcctttgtggagttcctggagttcctgggccagaaggtgaagctgcaggacttcaagggcttccggggcggcctggatgtgacccacggccagacaggaacagagagcgtgtactgcaacttcaggaacaaggagatcatgtttcatgtgtccaccaagctgccctacacagaaggagatgcccagcagctgcagaggaagaggcacatcggaaatgacatcgtggccgtggtgttccaggatgagaacaccccatttgtgcctgacatgattgccagcaacttcctgcacgcctacgtggtggtgcaggccgagggcggcggcccagatggccccctgtacaaggtgtctgtgacagccagagatgatgtgcccttctttggaccacccctgcctgaccctgctgtgttcagaaaaggacctgagttccaggagttcctgctgaccaagctgatcaatgcagaatatgcctgctacaaggccgagaagtttgccaagctggaggagaggaccagggctgccctgctggagaccctgtatgaggagctgcacatccacagccagagcatgatgggcctgggcggagatgaggacaagatggagaatggcagcggcggcggcggcttctttgagagcttcaagagggtcatccgcagccgcagccagagcatggatgccatgggcctgagcaacaagaagcccaacacagtgtccaccagccacagcggcagctttgcccccaacaacccagacctggccaaggccgccggcatcagcctgctgatccctgggaagagcgccagccgcttcggccggcggggcagcgccatcggcattggaacagtggaggaggtggtggtgagaggagctgctggcagcggcggctgcctgcacgccctcttcagcgcccggagccaggacggcggccacatcggagatgtggcccccctgcccccaggccaggcccctggccgggccggctggagcggcggcagcagtgatggcacccagcacctgctgtggggcctgagcctcatcgtgcctgggaagagccccaccaggaagaagagcggccccttcggcagcagaagaagcagcgccatcggcatcgagaacatccaggaggtgcaggagaagcgggagagccccccagctggccagaagaccccagacagcggccacgtgtcccaggagcccaagtctgagaacagcagcacccagagcagccctgagatgcccaccaccaagaacagagctgagacagctgcccagagagctgaggccctgaagctgcccctgctggtgcagtgccagcagctgcggcagaggggcggcggagatggcggctgcggccggcggggccacaggcctggagagagggtcatcctgaggaacaccccccaggccggcctgctgcacctgtag

SEQ ID NO: 19996 - DNA, 2085 bp, synthetic construct
  source 1..2085: mol_type = other DNA; note = Synthetic coding sequence
atggcccagctgcggcctgctgtgcccccaggccggccccggcggggcagcctgcctgctggggcctcctggcagaacacagacctgtttgagatgattgagaagatgcagggcagcaggatggatgagcagcgctgcagcttccccccacccctgaagacagaggaggactacatcccctaccccagcgtgcatgaggtgctgggccgggagggccccttccccctcatcctgctgccccagtttggaggctactggattgagggcaccaaccacgagatcaccagcatccctgagacagagcccctgcagagccccaccaccaaggtgaagctggagtgcaaccccacagcccgcatctacaggaagcacttcctgggcaaggagcacttcaactactacagcctggatgctgccctgggccacctggtgttcagcctgaagtatgatgtgattggagaccaggagcacctgcggctgctgctgcggaccaagtgcaggacctaccatgatgtgatccccatcagctgcctgacagagttccccaacgtggtgcagatggccaagctggtgtgtgaagatgtgaatgtggaccgcttctaccctgtgctgtaccccaaggccagccgcctcatcgtgacctttgatgagcacgtgatcagcaacaacttcaagtttggagtcatctaccagaagctgggccagaccagcgaggaggagctgttcagcaccaatgaggagagccctgcctttgtggagttcctggagttcctgggccagaaggtgaagctgcaggacttcaagggcttccggggcggcctggatgtgacccacggccagacaggaacagaatctgtgtactgcaacttcaggaacaaggagatcatgttccacgtgtccaccaagctgccctacacagaaggagatgcccagcagctgcagaggaagaggcacatcggaaatgacatcgtggccgtggtgttccaggatgagaacaccccatttgtgcctgacatgattgccagcaacttcctgcacgcctacgtggtggtgcaggccgagggcggcggcccagatggccccctgtacaaggtgtctgtgacagccagagatgatgtgcccttcttcggcccccccctgcctgaccctgctgtgttcaggaagggccctgagttccaggagttcctgctgaccaagctgatcaatgcagaatatgcctgctacaaggccgagaagtttgccaagctggaggagaggacccgggccgccctgctggagaccctgtatgaggagctgcacatccacagccagagcatgatgggcctgggcggagatgaggacaagatggagaatggaagtggcggcggcggcttctttgagagcttcaagagggtcatccgcagccgcagccagagcatggatgccatgggcctgagcaacaagaagcccaacacagtgtccaccagccacagcggcagctttgcccccaacaacccagacctggccaaggctgctggcatcagcctcatcgtgcctgggaagagccccaccaggaagaagagcggccccttcggcagcagaagaagcagcgccatcggcatcgagaacatccaggaggtgcaggagaagcgggagagccccccagctggccagaagaccccagacagcggccacgtgtcccaggagcccaagtctgagaacagcagcacccagagcagccctgagatgcccaccaccaagaacagagctgagacagctgcccagagagctgaggccctgaaggacttcagccgcagcagcagcagcgccagcagctttgcctctgtggtggaggagacagaaggagtggatggagaggacaccggcctggagagcgtgagcagcagcggcaccccccacaagagggacagcttcatctacagcacctggctggaggacagcgtgtccaccaccagcggcggcagcagccctggccccagccgcagcccccacccagatgctgggaagctgggggaccctgcctgcccagagatcaagatccagctggaggccagcgagcagcacatgccccagctgggctgctag

SEQ ID NO: 19997 - DNA, 2082 bp, synthetic construct
  source 1..2082: mol_type = other DNA; note = Synthetic coding sequence
atggcccagctgcggcctgctgtgcccccaggccggccccggcggggcagcctgcctgctggggcctcctggcagaacacagacctgtttgagatgattgagaagatgcagggcagcaggatggatgagcagcgctgcagcttccccccacccctgaagacagaggaggactacatcccctaccccagcgtgcatgaggtgctgggccgggagggccccttccccctcatcctgctgccccagtttggaggctactggattgagggcaccaaccacgagatcaccagcatccctgagacagagcccctgcagagccccaccaccaaggtgaagctggagtgcaaccccacagcccgcatctacaggaagcacttcctgggcaaggagcacttcaactactacagcctggatgctgccctgggccacctggtgttcagcctgaagtatgatgtgattggagaccaggagcacctgcggctgctgctgcggaccaagtgcaggacctaccatgatgtgatccccatcagctgcctgacagagttccccaacgtggtgcagatggccaagctggtgtgtgaagatgtgaatgtggaccgcttctaccctgtgctgtaccccaaggccagccgcctcatcgtgacctttgatgagcacgtgatcagcaacaacttcaagtttggagtcatctaccagaagctgggccagaccagcgaggaggagctgttcagcaccaatgaggagagccctgcctttgtggagttcctggagttcctgggccagaaggtgaagctgcaggacttcaagggcttccggggcggcctggatgtgacccacggccagacaggaacagaatctgtgtactgcaacttcaggaacaaggagatcatgttccacgtgtccaccaagctgccctacacagaaggagatgcccagctgcagaggaagaggcacatcggaaatgacatcgtggccgtggtgttccaggatgagaacaccccatttgtgcctgacatgattgccagcaacttcctgcacgcctacgtggtggtgcaggccgagggcggcggcccagatggccccctgtacaaggtgtctgtgacagccagagatgatgtgcccttctttggaccacccctgcctgaccctgctgtgttcagaaaaggacctgagttccaggagttcctgctgaccaagctgatcaatgcagaatatgcctgctacaaggccgagaagtttgccaagctggaggagaggaccagggctgccctgctggagaccctgtatgaggagctgcacatccacagccagagcatgatgggcctgggcggagatgaggacaagatggagaatggcagcggcggcggcggcttctttgagagcttcaagagggtcatccgcagccgcagccagagcatggatgccatgggcctgagcaacaagaagcccaacacagtgtccaccagccacagcggcagctttgcccccaacaacccagacctggccaaggccgccggcatcagcctgattgtgcctgggaagagccccaccaggaagaagagcggccccttcggcagccgccgcagcagcgccatcggcatcgagaacatccaggaggtgcaggagaagcgggagagccccccagctggccagaagaccccagattctggccacgtgtcccaggagcccaagtctgagaacagcagcacccagagcagccctgagatgcccaccaccaagaacagagctgagacagctgcccagagagctgaggccctgaaggacttcagccgcagcagcagcagcgccagcagctttgcctctgtggtggaggagacagagggcgtggatggagaggacaccggcctggagagcgtgagcagcagcggcaccccccacaagagggacagcttcatctacagcacctggctggaggacagcgtgtccaccaccagcggcggcagcagccctggccccagccgcagcccccacccagatgctgggaagctgggggaccctgcctgcccagagatcaagatccagctggaggccagcgagcagcacatgccccagctgggctgctag

SEQ ID NO: 19998 - DNA, 1992 bp, synthetic construct
  source 1..1992: mol_type = other DNA; note = Synthetic coding sequence
atgattgagaagatgcagggcagcaggatggatgagcagcgctgcagcttccccccacccctgaagacagaggaggactacatcccctaccccagcgtgcatgaggtgctgggccgggagggccccttccccctcatcctgctgccccagtttggaggctactggattgagggcaccaaccacgagatcaccagcatccctgagacagagcccctgcagagccccaccaccaaggtgaagctggagtgcaaccccacagcccgcatctacaggaagcacttcctgggcaaggagcacttcaactactacagcctggatgctgccctgggccacctggtgttcagcctgaagtatgatgtgattggagaccaggagcacctgcggctgctgctgcggaccaagtgcaggacctaccatgatgtgatccccatcagctgcctgacagagttccccaacgtggtgcagatggccaagctggtgtgtgaagatgtgaatgtggaccgcttctaccctgtgctgtaccccaaggccagccggctgattgtgacctttgatgaacatgtgatcagcaacaacttcaagtttggagtcatctaccagaagctgggccagaccagcgaggaggagctgttcagcaccaatgaggagagccctgcctttgtggagttcctggagttcctgggccagaaggtgaagctgcaggacttcaagggcttccggggcggcctggatgtgacccacggccagacaggaacagagagcgtgtactgcaacttcaggaacaaggagatcatgtttcatgtgtccaccaagctgccctacacagaaggagatgcccagcagctgcagaggaagaggcacatcggaaatgacatcgtggccgtggtgttccaggatgagaacaccccatttgtgcctgacatgattgccagcaacttcctgcacgcctacgtggtggtgcaggccgagggcggcggcccagatggccccctgtacaaggtgtctgtgacagccagagatgatgtgcccttctttggaccacccctgcctgaccctgctgtgttcagaaaaggacctgagttccaggagttcctgctgaccaagctgatcaatgcagaatatgcctgctacaaggccgagaagtttgccaagctggaggagaggaccagggctgccctgctggagaccctgtatgaggagctgcacatccacagccagagcatgatgggcctgggcggagatgaggacaagatggagaatggcagcggcggcggcggcttctttgagagcttcaagagggtcatccgcagccgcagccagagcatggatgccatgggcctgagcaacaagaagcccaacacagtgtccaccagccacagcggcagctttgcccccaacaacccagacctggccaaggccgccggcatcagcctgattgtgcctgggaagagccccaccaggaagaagagcggccccttcggcagccgccgcagcagcgccatcggcatcgagaacatccaggaggtgcaggagaagcgggagagccccccagctggccagaagaccccagattctggccacgtgtcccaggagcccaagtctgagaacagcagcacccagagcagccctgagatgcccaccaccaagaacagagctgagacagctgcccagagagctgaggccctgaaggacttcagccgcagcagcagcagcgccagcagctttgcctctgtggtggaggagacagagggcgtggatggagaggacaccggcctggagagcgtgagcagcagcggcaccccccacaagagggacagcttcatctacagcacctggctggaggacagcgtgtccaccaccagcggcggcagcagccctggccccagccgcagcccccacccagatgctgggaagctgggggaccctgcctgcccagagatcaagatccagctggaggccagcgagcagcacatgccccagctgggctgctag

SEQ ID NO: 19999 - DNA, 744 bp, synthetic construct
  source 1..744: mol_type = other DNA; note = Synthetic coding sequence
atgctggtgctgcggagcgccctgacccgggccctggccagcaggaccctggccccccagatgtgcagcagctttgccaccggcccccggcagtatgatggcatcttctatgagttccgcagctactacctgaagcccagcaagatgaatgagttcctggagaactttgagaagaatgcccacctgaggacagcccacagcgagctggtgggctactggagcgtggagtttggaggccgcatgaacacagtgttccacatctggaagtatgacaactttgcccacaggacagaggtgaggaaggccctggccaaggacaaggagtggcaggagcagttcctgatccccaacctggccctgattgacaagcaggagagcgagatcacctacctggtgccctggtgcaagctggagaagccacccaaggagggcgtgtatgagctggccaccttccagatgaagccaggcggccctgccctgtggggagatgccttcaagagagctgtgcacgcccacgtgaacctgggctacaccaagctggtgggcgtcttccacacagaatatggagccctgaacagagtgcacgtgctgtggtggaatgaatctgctgacagcagagctgctggccgccacaagagccatgaggacccccgggtggtggccgctgtgcgggagagcgtgaactacctggtgtcccagcagaacatgctgctgatccccaccagcttcagccccctgaagtag

SEQ ID NO: 20000 - DNA, 3594 bp, synthetic construct; identical to SEQ ID NO: 18647
  source 1..3594: mol_type = other DNA; note = Synthetic coding sequence

SEQ ID NO: 20001 - DNA, 3594 bp, synthetic construct; identical to SEQ ID NO: 18647
  source 1..3594: mol_type = other DNA; note = Synthetic coding sequence

SEQ ID NO: 20002 - DNA, 1047 bp, synthetic construct
  source 1..1047: mol_type = other DNA; note = Synthetic coding sequence
atgagcctgccccgcttccagagggtgaactttggcccctatgacaactacatccctgtgtctgagctgagcaagaagtcctggaaccagcagcactttgccctgctcttccccaagccccagaggcctggcaccaagagaagaagcaagcccagccagatccgggacaacacagtgtccatcattgatgaggagcagctgcggggggaccggcggcagcccctgtggatgtaccgcagcctgatgaggatcagcgagcggcccagcgtgtacctggccgcccggcggcagcccctgaagcccaccaggacagtggaggtggacagcaaggctgctgagatcggcaagaagggggaggacaagaccacccagaaggacaccacagacagcgagagcgagctgaagcagggcaagaaggacagcaagaagggcaaggacatcgagaagggcaaggaggagaagctggatgccaagaaggacagcaagaagggcaagaaggatgctgagaagggcaaggacagcgccacagaaagtgaagatgagaagggcggggccaagaaggacaacaagaaggacaagaaggacagcaacaagggcaaggacagcgccacagagagcgagggggagaagggcggcacagagaaggacagcaagaagggcaagaaggacagcaagaagggcaaggacagcgccatcgagctgcaggccgtgaaggcagatgagaagaaggatgaagatggcaagaaggatgccaacaagggagatgagagcaaggatgccaagaaggatgccaaggagatcaagaagggcaagaaggacaagaagaagcccagcagcacagacagcgacagcaaggatgatgtgaagaaggagagcaagaaggatgccaccaaggatgccaagaaggtggccaagaaggacacagagaaggagagcgctgacagcaagaaggatgccaagaagaatgccaagaaggatgccaagaaggatgccaagaagaatgccaagaaggatgagaagaaggatgccaagaagaagggcaagtag

SEQ ID NO: 20003 - DNA, 1515 bp, synthetic construct
  source 1..1515: mol_type = other DNA; note = Synthetic coding sequence
atgaacagccagccccagaccaggagccccttcttccagaggccccagatccagcccccccgggccaccatccccaacagcagccccagcatccggcctggggcccagacccccacagctgtgtaccaggccaaccagcacatcatgatggtgaaccacctgcccatgccctaccctgtgccccagggcccccagtactgcatcccccagtaccgccacagcggccccccctacgtgggccccccccagcagtaccctgtgcagcccccaggccctggccccttctacccaggccctggccctggggacttccccaatgcctacggcacccccttctaccccagccagcctgtgtaccagagcgcccccatcatcgtgcccacccagcagcagcccccaccagccaagcgggagaagaagaccatccgcatccgggaccccaaccagggcggcaaggacatcacagaggagatcatgtctgggggcggcagcaggaaccccaccccacccatcggccggcccaccagcacccccaccccaccccagcagctgcccagccaggtgcctgagcacagccctgtggtgtatggcaccgtggagagcgcccacctggccgccagcacccctgtgacagctgccagtgaccagaagcaggaggagaagcccaagccagaccctgtgctgaagagccccagccctgtgctgcggctggtgctgagcggggagaagaaggagcaggagggccagaccagcgagaccacagccatcgtgtccattgctgagctgcccctgccccccagccccaccaccgtgtcctctgtggcccggagcaccatcgccgcccccaccagcagcgccctgagcagccagcccatcttcaccacagccattgatgacagatgtgagctgagcagcccccgggaggacaccatccccatccccagcctgaccagctgcacagagaccagtgaccccctgcccaccaatgaaaatgatgatgacatctgcaagaagccctgcagcgtggccccaaatgacatccccctggtgagcagcaccaacctgatcaatgagatcaacggggtgtctgagaagctgagcgccacagagagcatcgtggagatcgtgaagcaggaggtgctgcccctgaccctggagctggagatcctggagaaccccccagaggagatgaagctggagtgcatcccagcccccatcacccccagcacagtgcccagcttcccccccaccccacccaccccaccagccagccccccccacacccctgtgattgtgcctgctgctgccaccaccgtgagcagccccagcgctgccatcaccgtgcagagggtgctggaggaggatgagagcatccgcacctgcctgtctgaagatgccaaggagatccagaacaagattgaggtggaggctgatggccagacagaggagatcctggacagccagaacctgaacagcagaagaagccctgtgcctgagaccagcaatgaatgttag

SEQ ID NO: 20004 - DNA, 744 bp, synthetic construct
  source 1..744: mol_type = other DNA; note = Synthetic coding sequence
atgctgaagttcctggtgtggttcctgcagtggtgtgtgtgtgtgctggtgcagcctgccaaggagctgctgcactgcctgaagatgcagatgaggatcagcaagtacaccaagtgcctgcaggcccagatcgccatcaccgtgcccaagacctggaagaagcccaaggacaggaccaggaccacagaggagatgctggaggccgagctggagctgaaggccgaggaggagctgagcattgacaaggtgctggagagcgagcaggacaagatgagccagggcttccaccctgagcgggaccccagcgacctgaagaaggtgaaggctgtggaggagaatggagaggaggccgagcctgtgagaaatggagctgagagcgtgtctgagggggagggcattgatgccaacagcggcagcacagacagcagtggagatggagtgaccttccccttcaagccagagagctggaagcccacagacacagagggcaagaagcagtatgaccgggagttcctgctggacttccagttcatgcctgcctgcatccagaagccagagggcctgccccccatcagtgatgtggtgctggacaagatcaaccagcccaagctgcccatgaggaccctggacccccgcatcctgccccggggccctgacttcaccccagcctttgctgactttggccggcagacccctgggggccggggcgtgcctgtgtctgccagcagcctgcagctgacctag

SEQ ID NO: 20005 - DNA, 3918 bp, synthetic construct
  source 1..3918: mol_type = other DNA; note = Synthetic coding sequence
atgaacagccagccccagaccaggagccccttcttccagaggccccagatccagcccccccgggccaccatccccaacagcagccccagcatccggcctggggcccagacccccacagctgtgtaccaggccaaccagcacatcatgatggtgaaccacctgcccatgccctaccctgtgccccagggcccccagtactgcatcccccagtaccgccacagcggccccccctacgtgggccccccccagcagtaccctgtgcagcccccaggccctggccccttctacccaggccctggccctggggacttccccaatgcctacggcacccccttctaccccagccagcctgtgtaccagagcgcccccatcatcgtgcccacccagcagcagcccccaccagccaagcgggagaagaagaccatccgcatccgggaccccaaccagggcggcaaggacatcacagaggagatcatgtctgggggcggcagcaggaaccccaccccacccatcggccggcccaccagcacccccaccccaccccagcagctgcccagccaggtgcctgagcacagccctgtggtgtatggcaccgtggagagcgcccacctggccgccagcacccctgtgacagctgccagtgaccagaagcaggcccagatcgccatcaccgtgcccaagacctggaagaagcccaaggacaggaccaggaccacagaggagatgctggaggccgagctggagctgaaggccgaggaggagctgagcattgacaaggtgctggagagcgagcaggacaagatgagccagggcttccaccctgagcgggaccccagcgacctgaagaaggtgaaggctgtggaggagaatggagaggaggccgagcctgtgagaaatggagctgagagcgtgtctgagggggagggcattgatgccaacagcggcagcacagacagcagtggagatggagtgaccttccccttcaagccagagagctggaagcccacagacacagagggcaagaagcagtatgaccgggagttcctgctggacttccagttcatgcctgcctgcatccagaagccagagggcctgccccccatcagtgatgtggtgctggacaagatcaaccagcccaagctgcccatgaggaccctggacccccgcatcctgccccggggccctgacttcaccccagcctttgctgactttggccggcagaccccaggcggccggggcgtgcccctgctgaatgtgggcagccgccgcagccagcccggccagaggcgggagcccaggaagatcatcaccgtgtctgtgaaggaggatgtgcacctgaagaaggccgagaatgcctggaagcccagccagaagagggacagccaggctgatgatcctgagaacatcaagacccaggagctgttcaggaaggtgcgcagcatcctgaacaagctgaccccccagatgttcaaccagctgatgaagcaggtgtctggcctgactgtggacacagaggagcggctgaagggcgtcatcgacctggtgtttgagaaggccattgatgagcccagcttctctgtggcctatgccaacatgtgccgctgcctggtgaccctgaaggtgcccatggctgacaagccaggcaacacagtgaacttcaggaagctgctgctgaaccgctgccagaaggagtttgagaaggacaaggcagatgatgatgtgtttgagaagaagcagaaggagctggaggccgccagcgcccctgaggagaggacccggctgcatgatgagctggaggaggccaaggacaaggccaggagaagaagcatcggcaacatcaagttcatcggggagctgttcaagctgaagatgctgacagaggccatcatgcatgactgtgtggtgaagctgctgaagaaccatgatgaggagagcctggagtgcctgtgccgcctgctgaccaccatcggcaaggacctggactttgagaaggccaagcccaggatggaccagtacttcaaccagatggagaagatcgtgaaggagaggaagaccagcagccgcatccgcttcatgctgcaggatgtgattgacctgcggctgtgcaactgggtgtccagaagagctgaccagggccccaagaccatcgagcagatccacaaggaggccaagattgaggagcaggaggagcagaggaaggtgcagcagctgatgaccaaggagaagagaagacctggggtgcagagggtggatgaaggaggctggaacacagtgcagggcgccaagaacagccgggtgctggaccccagcaagttcctgaagatcaccaagcccaccattgatgagaagatccagctggtgcccaaggcccagctgggctcctggggcaagggcagcagcggcggggccaaggccagcgagacagatgccctgcggagcagcgccagcagcctgaaccgcttcagcgccctgcagcccccagcccccagcggcagcacccccagcacccctgtggagtttgacagcaggaggaccctgaccagccggggctccatgggccgggagaagaatgacaagcccctgcccagcgccacagcccggcccaacaccttcatgaggggcggcagcagcaaggacctgctggacaaccagagccaggaggagcagaggcgggagatgctggagaccgtgaagcagctgactggaggagtggatgtggagaggaacagcacagaagctgagaggaacaagacccgggagagcgccaagccagagatcagcgccatgtctgcccatgacaaggccgccctgtctgaggaggagctggagaggaagagcaagagcatcattgatgagttcctgcacatcaatgacttcaaggaggccatgcagtgtgtggaggagctgaatgcccagggcctgctgcacgtgtttgtgcgggtgggcgtggagagcaccctggagaggagccagatcacccgggaccacatgggccagctgctgtaccagctggtgcagagcgagaagctgagcaagcaggacttcttcaagggcttcagcgagaccctggagctggctgatgacatggccatcgacatcccccacatctggctgtacctggccgagctggtgacccccatgctgaaggagggcggcatctccatgagggagctgaccatcgagttcagcaagcccctgctgcctgtgggccgggccggcgtgctgctgtctgagatcctgcacctgctgtgcaagcagatgagccacaagaaggtgggcgccctgtggagggaggccgacctgtcctggaaggacttcctgcctgaaggagaagatgtgcacaacttcctgctggagcagaagctggacttcattgaaagtgacagcccctgcagcagcgaggccctgagcaagaaggagctgtctgctgaggagctgtacaagaggctggagaagctgatcatcgaggacaaggccaatgatgagcagatctttgactgggtggaggccaacctggatgagatccagatgagcagccccaccttcctgcgggccctgatgacagctgtgtgcaaggccgccatcatcgctgacagcagcaccttccgggtggacacagctgtgatcaagcagagggtgcccatcctgctgaagtacctggacagcgacacagagaaggagctgcaggccctgtatgccctgcaggccagcatcgtgaagctggaccagcctgccaacctgctgaggatgttctttgactgcctgtatgatgaggaggtgatcagtgaagatgccttctacaagtgggagagcagcaaggaccctgctgagcagaatggaaaaggagtggccctgaagtctgtgacagccttcttcacctggctgcgggaggccgaggaggagagcgaggacaactag

SEQ ID NO: 20006 - DNA, 4776 bp, synthetic construct
  source 1..4776: mol_type = other DNA; note = Synthetic coding sequence
atgaacagccagccccagaccaggagccctgggggcttccggcccatccagttcttccagaggccccagatccagcccccccgggccaccatccccaacagcagccccagcatccggcctggggcccagacccccacagctgtgtaccaggccaaccagcacatcatgatggtgaaccacctgcccatgccctaccctgtgccccagggcccccagtactgcatcccccagtaccgccacagcggccccccctacgtgggccccccccagcagtaccctgtgcagcccccaggccctggccccttctacccaggccctggccctggggacttccccaatgcctacggcacccccttctaccccagccagcctgtgtaccagagcgcccccatcatcgtgcccacccagcagcagcccccaccagccaagcgggagaagaagaccatccgcatccgggaccccaaccagggcggcaaggacatcacagaggagatcatgtctgggggcggcagcaggaaccccaccccacccatcggccggcccaccagcacccccaccccaccccagctgcccagccaggtgcctgagcacagccctgtggtgtatggcaccgtggagagcgcccacctggccgccagcacccctgtgacagctgccagtgaccagaagcaggaggagaagcccaagccagaccctgtgctgaagagccccagccctgtgctgcggctggtgctgagcggggagaagaaggagcaggagggccagaccagcgagaccacagccatcgtgtccattgctgagctgcccctgccccccagccccaccaccgtgtcctctgtggcccggagcaccatcgccgcccccaccagcagcgccctgagcagccagcccatcttcaccacagccattgatgacagatgtgagctgagcagcccccgggaggacaccatccccatccccagcctgaccagctgcacagagaccagtgaccccctgcccaccaatgaaaatgatgatgacatctgcaagaagccctgcagcgtggccccaaatgacatccccctggtgagcagcaccaacctgatcaatgagatcaacggggtgtctgagaagctgagcgccacagagagcatcgtggagatcgtgaagcaggaggtgctgcccctgaccctggagctggagatcctggagaaccccccagaggagatgaagctggagtgcatcccagcccccatcacccccagcacagtgcccagcttcccccccaccccacccaccccaccagccagccccccccacacccctgtgattgtgcctgctgctgccaccaccgtgagcagccccagcgctgccatcaccgtgcagagggtgctggaggaggatgagagcatccgcacctgcctgtctgaagatgccaaggagatccagaacaagattgaggtggaggctgatggccagacagaggagatcctggacagccagaacctgaacagcagaagaagccctgtgcctgcccagatcgccatcaccgtgcccaagacctggaagaagcccaaggacaggaccaggaccacagaggagatgctggaggccgagctggagctgaaggccgaggaggagctgagcattgacaaggtgctggagagcgagcaggacaagatgagccagggcttccaccctgagcgggaccccagcgacctgaagaaggtgaaggctgtggaggagaatggagaggaggccgagcctgtgagaaatggagctgagagcgtgtctgagggggagggcattgatgccaacagcggcagcacagacagcagtggagatggagtgaccttccccttcaagccagagagctggaagcccacagacacagagggcaagaagcagtatgaccgggagttcctgctggacttccagttcatgcctgcctgcatccagaagccagagggcctgccccccatcagtgatgtggtgctggacaagatcaaccagcccaagctgcccatgaggaccctggacccccgcatcctgccccggggccctgacttcaccccagcctttgctgactttggccggcagaccccaggcggccggggcgtgcccctgctgaatgtgggcagccgccgcagccagcccggccagaggcgggagcccaggaagatcatcaccgtgtctgtgaaggaggatgtgcacctgaagaaggccgagaatgcctggaagcccagccagaagagggacagccaggctgatgatcctgagaacatcaagacccaggagctgttcaggaaggtgcgcagcatcctgaacaagctgaccccccagatgttcaaccagctgatgaagcaggtgtctggcctgactgtggacacagaggagcggctgaagggcgtcatcgacctggtgtttgagaaggccattgatgagcccagcttctctgtggcctatgccaacatgtgccgctgcctggtgaccctgaaggtgcccatggctgacaagccaggcaacacagtgaacttcaggaagctgctgctgaaccgctgccagaaggagtttgagaaggacaaggcagatgatgatgtgtttgagaagaagcagaaggagctggaggccgccagcgcccctgaggagaggacccggctgcatgatgagctggaggaggccaaggacaaggccaggagaagaagcatcggcaacatcaagttcatcggggagctgttcaagctgaagatgctgacagaggccatcatgcatgactgtgtggtgaagctgctgaagaaccatgatgaggagagcctggagtgcctgtgccgcctgctgaccaccatcggcaaggacctggactttgagaaggccaagcccaggatggaccagtacttcaaccagatggagaagatcgtgaaggagaggaagaccagcagccgcatccgcttcatgctgcaggatgtgattgacctgcggctgtgcaactgggtgtccagaagagctgaccagggccccaagaccatcgagcagatccacaaggaggccaagattgaggagcaggaggagcagaggaaggtgcagcagctgatgaccaaggagaagagaagacctggggtgcagagggtggatgaaggaggctggaacacagtgcagggcgccaagaacagccgggtgctggaccccagcaagttcctgaagatcaccaagcccaccattgatgagaagatccagctggtgcccaaggcccagctgggctcctggggcaagggcagcagcggcggggccaaggccagcgagacagatgccctgcggagcagcgccagcagcctgaaccgcttcagcgccctgcagcccccagcccccagcggcagcacccccagcacccctgtggagtttgacagcaggaggaccctgaccagccggggctccatgggccgggagaagaatgacaagcccctgcccagcgccacagcccggcccaacaccttcatgaggggcggcagcagcaaggacctgctggacaaccagagccaggaggagcagaggcgggagatgctggagaccgtgaagcagctgactggaggagtggatgtggagaggaacagcacagaagctgagaggaacaagacccgggagagcgccaagccagagatcagcgccatgtctgcccatgacaaggccgccctgtctgaggaggagctggagaggaagagcaagagcatcattgatgagttcctgcacatcaatgacttcaaggaggccatgcagtgtgtggaggagctgaatgcccagggcctgctgcacgtgtttgtgcgggtgggcgtggagagcaccctggagaggagccagatcacccgggaccacatgggccagctgctgtaccagctggtgcagagcgagaagctgagcaagcaggacttcttcaagggcttcagcgagaccctggagctggctgatgacatggccatcgacatcccccacatctggctgtacctggccgagctggtgacccccatgctgaaggagggcggcatctccatgagggagctgaccatcgagttcagcaagcccctgctgcctgtgggccgggccggcgtgctgctgtctgagatcctgcacctgctgtgcaagcagatgagccacaagaaggtgggcgccctgtggagggaggccgacctgtcctggaaggacttcctgcctgaaggagaagatgtgcacaacttcctgctggagcagaagctggacttcattgaaagtgacagcccctgcagcagcgaggccctgagcaagaaggagctgtctgctgaggagctgtacaagaggctggagaagctgatcatcgaggacaaggccaatgatgagcagatctttgactgggtggaggccaacctggatgagatccagatgagcagccccaccttcctgcgggccctgatgacagctgtgtgcaaggccgccatcatcgctgacagcagcaccttccgggtggacacagctgtgatcaagcagagggtgcccatcctgctgaagtacctggacagcgacacagagaaggagctgcaggccctgtatgccctgcaggccagcatcgtgaagctggaccagcctgccaacctgctgaggatgttctttgactgcctgtatgatgaggaggtgatcagtgaagatgccttctacaagtgggagagcagcaaggaccctgctgagcagaatggaaaaggagtggccctgaagtctgtgacagccttcttcacctggctgcgggaggccgaggaggagagcgaggacaactag

SEQ ID NO: 20007 - DNA, 1002 bp, synthetic construct
  source 1..1002: mol_type = other DNA; note = Synthetic coding sequence
atgtctggagatgagatgatctttgaccccaccatgagcaagaagaagaagaagaagaagaagcccttcatgctggatgaggagggggacacccagacagaggagacccagcccagcgagaccaaggaggtggagcctgagcccacagaggacaaggacctggaggctgatgaggaggacaccaggaagaaggatgccagtgatgacctggatgacctgaacttcttcaaccagaagaagaagaagaagaagaccaagaagatctttgatattgatgaggccgaggagggcgtgaaggacctgaagattgaaagtgatgtgcaggagcccacagagccagaagatgacctggacatcatgctgggcaacaagaagaagaagaagaagaatgtgaagttcccagatgaagatgagatcctggagaaggatgaggccctggaggatgaggacaacaagaaggatgatggcatctccttcagcaaccagacaggccctgcctgggccggcagcgagcgggactacacctatgaggagctgctgaacagagtcttcaacatcatgagggagaagaacccagacatggtggccggggagaagaggaagtttgtgatgaagccaccccaggtggtgcgggtgggcaccaagaagaccagctttgtgaacttcacagacatctgcaagctgctgcaccggcagcccaagcacctgctggccttcctgctggccgagctgggcaccagcggcagcattgatggcaacaaccagctggtgatcaagggccgcttccagcagaagcagattgaaaatgtgctgcggcgctacatcaaggagtatgtgacctgccacacctgccgcagcccagacaccatcctgcagaaggacacccggctgtacttcctgcagtgtgagacctgccacagccgctgcagcgtggccagcatcaagacaggcttccaggccgtgacaggcaagagggcccagctgcgggccaaggccaactag

SEQ ID NO: 20008 - DNA, 2619 bp, synthetic construct
  source 1..2619: mol_type = other DNA; note = Synthetic coding sequence
atgggagagggcggcctgcccccagccttccagctgctgctgcgggcctgtgaccagggcgacacagaaacagcccggcggctgctggagcctggagctgctgagcctgctgagagaggagctgagcctgaggccggggctgagcctgctggagctgaggtggccggccctggagctgctgctgctggagctgtgggcgcccctgtgcctgtggactgcagtgatgaagctggcaacacagccctgcagtttgctgctgctgggggccacgagcccctggtgcgcttcctgctgcggcggggggcctctgtgaacagcaggaaccactacggctggagcgccctgatgcaggccgccaggtttggacatgtgtctgtggcccacctgctgctggaccatggagcagatgtgaatgcccagaaccggctgggcgcctctgtgctgactgtggccagccggggcggccacctgggcgtggtgaagctgctgctggaggccggggcctttgtggaccaccaccaccccagcggggagcagctgggcctgggcggcagcagagatgagcccctggacatcacagccctgatggccgccatccagcacggccatgaagctgtggtgcggctgctgatggagtggggcgctgaccccaaccacgccgccaggacagtgggctggagccccctgatgctggccgccctgaccggccgcctgggcgtggcccagcagctggtggagaagggggccaacccagaccacctgtctgtgctggagaagacagcctttgaggtggccctggactgcaagcaccgggacctggtggactacctggaccccctgaccaccgtgcggcccaagacagatgaggagaagaggaggccagacatcttccacgccctgaagatgggcaacttccagctggtgaaggagattgctgatgaggaccccagccacgtgaacctggtgaatggagatggagccacccccctgatgctggccgctgtgacaggccagctggccctggtgcagctgctggtggagagacatgctgatgtggacaagcaggacagcgtgcacggctggacagccctgatgcaggccacctaccacggcaacaaggagatcgtgaagtacctgctgaaccagggcgcagatgtgaccctgcgggccaagaatggctacacagcctttgacctggtgatgctgctgaatgaccctgacacagagctggtgcggctgctggcctctgtgtgcatgcaggtgaacaaggacaagggccggcccagccaccagccccccctgccccacagcaaggtgcggcagccctggagcatccctgtgctgcctgatgacaagggcggcctgaagtcctggtggaacaggatgagcaaccgcttcaggaagctgaagctgatgcagaccctgccccggggcctgagcagcaaccagcccctgcccttcagtgatgagcctgagcccgccctggacagcaccatgagagctgccccccaggacaagaccagccgcagcgccctgcctgatgctgcccctgtgaccaaggacaatggacctggcagcaccagaggagagaaggaggacaccctgctgaccaccatgctgagaaatggagcccccctgacccggctgcccagcgacaagctgaaggccgtcatcccccccttcctgccccccagcagctttgagctgtggagcagtgacaggagcaggaccaggcacaacgggaaggctgaccccatgaagacagccctgccccagagggccagccggggccaccctgtgggcggcggcggcacagacaccacccctgtgcggcctgtgaagttccccagcctgcccaggagccctgccagcagcgccaacagcggcaacttcaaccacagcccccacagcagcggcggcagcagcggcgtgggcgtgtccagacatggaggagagctgctgaacagaagtggcggcagcattgacaacgtgctgagccagattgctgcccagaggaagaaggccgccggcctgctggagcagaagcccagccacaggagcagccctgtgggccctgcccctggcagcagccccagcgagctgcctgccagccctgctgggggcagcgcccctgtgggcaagcagaagctggagaccagcaagaggcctccttctggcaccagcaccaccagcaagagcaccagccccaccctgacccccagccccagccccaagggccacacagctgagagctctgtgagcagcagcagcagccaccggcagagcaagagcagcggcggcagcagcagcggcaccatcacagatgaagatgagctgaccggcatcctgaagaagctgagcctggagaagtaccagcccatctttgaggagcaggaggtggacatggaggccttcctgaccctgacagatggagacctgaaggagctgggcatcaagacagatggcagccggcagcagatcctggccgccatcagcgagctgaatgctgggaagggccgggagcggcagatcctgcaggagaccatccacaacttccacagcagctttgagagcagcgccagcaacacccgggcccctggcaacagcccctgtgcctag

SEQ ID NO: 20009 - DNA, 483 bp, synthetic construct
  source 1..483: mol_type = other DNA; note = Synthetic coding sequence
atggaggccgagcggccccaggaggaggaggatggagagcagggccccccccaggatgaggagggctggcccccacccaacagcaccacccggccctggaggtctgccccacccagccccccacctcctggcaccaggcacacagccctgggccccaggtctgccagcctgctgagcctgcagacagagctgctgctggacctggtggccgaggcccagagccggcggctggaggagcagagggccaccttctacaccccccagaaccccagcagcctggccccagcccccctgcggcccctggaggaccgggagcagctgtacagcaccatcctgagccaccagtgccagaggatggaggcccagaggtctgagccccccctgcccccaggcggccaggagctgctggagctgctgctgcgggtgcagggcggcggccgcatggaggagcagaggagcaggcctcccacccacacctgctag

SEQ ID NO: 20010 - DNA, 483 bp, synthetic construct; identical to SEQ ID NO: 20009
  source 1..483: mol_type = other DNA; note = Synthetic coding sequence

SEQ ID NO: 20011 - DNA, 2790 bp, synthetic construct
  source 1..2790: mol_type = other DNA; note = Synthetic coding sequence
atgcagggcctgcctgacccccccagccagaggggcatcatcccccgggcctttgagcacgtgtttgagagcgtgcagtgtgccgagaacaccaagttcctggtgcgggccagctacctggagatctacaatgaagatgtgcgggacctgctgggcgctgacaccaagcagaagctggagctgaaggagcaccctgagaagggcgtgtatgtgaagggcctgtccatgcacacagtgcacagcgtggcccagtgtgagcacatcatggagaccggctggaagaacagatctgtgggctacaccctgatgaacaaggacagcagccgcagccacagcatcttcaccatcagcattgagatgtctgctgtggatgagcggggcaaggaccacctgcgggccggcaagctgaacctggtggacctggccggcagcgagcggcagagcaagacaggagccactggagagcggctgaaggaggccaccaagatcaacctgagcctgagcgccctgggcaatgtcatcagcgccctggtggatggccgctgcaagcacgtgccctacagagacagcaagctgacccggctgctgcaggacagcctgggcggcaacaccaagaccctgatggtggcctgcctgagccctgctgacaacaactatgatgagaccctgagcaccctgcgctatgccaacagagccaagaacatccggaacaagccccgcatcaatgaagaccccaaggatgccctgctgcgggagtaccaggaggagatcaagaagctgaaggccatcctgacccagcagatgagccccagcagcctgagcgccctgctgagccggcaggtgcccccagaccctgtgcaggtggaggagaagctgctgccccagcccgtcatccagcatgatgtggaggccgagaagcagctgatccgggaggagtatgaggagcggctggcccggctgaaggctgactacaaggccgagcaggagagccgggcccggctggaggaggacatcacagccatgaggaacagctatgatgtgcggctgagcaccctggaggagaacctgaggaaggagacagaggccgtgctgcaggtgggcgtgctgtacaaggccgaggtgatgagcagagctgagtttgccagcagcgctgagtaccccccagccttccagtatgagaccgtggtgaagcccaaggtgttcagcaccacagacaccctgcccagtgatgatgtgtccaagacccaggtgagcagcagatttgctgagctgcccaaggtggagcccagcaagtctgagatcagcctgggcagcagcgagagcagcagcctggaggagacctctgtgtctgaggccttccctggccctgaggagcccagcaatgtggaggtgtccatgcccacagaggagagccgcagccgctacttcctggatgaatgtctgggccaggaggccgccggccacctgctgggggagcagaactacctgccccaggaggagccccaggaggtgcccctgcagggcctgctgggcctgcaggacccctttgctgaggtggaggccaagctggcccggctgagcagcacagtggccaggacagatgccccccaggctgatgtgcccaaggtgcctgtgcaggtgcctgcccccacagacctgctggagcccagtgatgcccggcctgaggccgaggccgcagatgacttcccccccaggcctgaggtggacctggccagcgaggtggccctggaggtggtgaggacagctgagcccggggtgtggctggaggcccaggcccctgtggccctggtggcccagcctgagcccctgcctgccacagctggggtgaagcgggagagcgtgggcatggaggtggccgtgctgacagatgaccccctgcctgtggtggaccagcagcaggtgctggcccggctgcagctgctggagcagcaggtggtgggcggggagcaggccaagaacaaggacctgaaggagaagcacaagaggaggaagagatatgcagatgaaagaaggaagcagctggtggccgccctgcagaacagtgatgaggacagcggggactgggtgctgctgaatgtgtatgacagcatccaggaggaggtgcgggccaagagcaagctgctggagaagatgcagaggaagctgcgggctgctgaggtggagatcaaggacctgcagagcgagttccagctggagaagattgactacctggccaccatccggcggcaggagcgggacagcatgctgctgcagcagctgctggagcaggtgcagcccctcatcagaagagactgcaactacagcaacctggagaagatcctgcgggagagctgctgggatgaggacaatggcttctggaagatcccccaccctgtgatcaccaagaccagcctgcctgtggccgtgtccacaggcccccagaacaagccagccaggaagaccagcgctgctgacaacggggagcccaacatggaggatgaccgctaccgcctgatgctgagccgcagcaacagcgagaacatcgccagcaactacttccgcagcaagagggccagccagatcctgagcacagatgccaggaagagcctgacccaccacaacagccccccaggcctgagctgccccctgagcaacaacagcgccatcccccccacccaggcccctgagatgccccagccccggcccttccggctggagagcctggacatccccttcaccaaggccaagaggaagaagagcaagagcaactttggcagcgagcccctgtag

SEQ ID NO: 20012 - DNA, 426 bp, synthetic construct
  source 1..426: mol_type = other DNA; note = Synthetic coding sequence
atgaacaagcacgtgctgaagatccagaaggagctggaggaggccaaggagaagctggcccggcagcacaagagaagaagtgatgatgatgacaggagcagtgacaggaaggatggagtgctggaggagcagatcgagcggctgcaggagaaggtggagagcgcccagagcgagcagaagaacctcttcctggtgatcttccagcgcttcatcatgatcctgacagagcacctggtgcgctgtgaaacagatggcacctctgtgctgaccccctggtacaagaactgcatcgagcggctgcagcagatcttcctgcaggtgtgtggggagctgcggctgggcaacaacaccatcctgagccacaaggacttcagcctgaagaagatcctggtgaagtttgtgagaagactctacagcacctgctag

SEQ ID NO: 20013 - DNA, 2373 bp, synthetic construct
  source 1..2373: mol_type = other DNA; note = Synthetic coding sequence
atgagcagaagaagacacagtgatgaaaatgatggcggccagccccacaagaggaggaagaccagtgatgccaatgaaacagaggaccacctggagagcctcatctgcaaggtgggggagaagagcgcctgcagcctggagagcaacctggagggcctggccggcgtgctggaggccgacctgcccaactacaagagcaagatcctgcggctgctgtgcaccgtggcccggctgctgcctgagaagctgaccatctacaccaccctggtgggcctgctgaatgccaggaactacaactttggaggagaatttgtggaggccatgatccggcagctgaaggagagcctgaaggccaacaactacaatgaggccgtgtacctggtgcgcttcctgagtgacctggtgaactgccacgtgattgctgcccccagcatggtggccatgtttgagaactttgtgtctgtgacccaggaggaggatgtgccccaggtgagaagagactggtacgtgtatgccttcctgagcagcctgccctgggtgggcaaggagctgtatgagaagaaggatgctgagatggaccgcatctttgccaacacagagagctacctgaagaggcggcagaagacccacgtgcccatgctgcaggtgtggacagctgacaagccccacccccaggaggagtacctggactgcctgtgggcccagatccagaagctgaagaaggaccgctggcaggagcggcacatcctgcggccctacctggcctttgacagcatcctgtgtgaggccctgcagcacaacctgccccccttcaccccaccaccccacacagaggacagcgtgtaccccatgcccagggtcatcttcaggatgtttgactacacagatgatcctgagggccctgtgatgcctggcagccacagcgtggagcgcttcgtcatcgaggagaacctgcactgcatcatcaagagccactggaaggagaggaagacctgtgccgcccagctggtgtcctacccaggcaagaacaagatccccctgaactaccacatcgtggaggtgatctttgctgagctgttccagctgcctgccccaccccacattgatgtgatgtacaccaccctgctgattgagctgtgcaagctgcagcccggcagcctgccccaggtgctggcccaggccacagagatgctgtacatgaggctggacaccatgaacaccacctgtgtggaccgcttcatcaactggttcagccaccacctgagcaacttccagttccgctggagctgggaggactggagcgactgcctgagccaggaccctgagagccccaagcccaagtttgtgcgggaggtgctggagaagtgcatgaggctgagctaccaccagaggatcctggacatcgtgccccccaccttcagcgccctgtgcccagccaaccccacctgcatctacaagtatggagatgagagcagcaacagcctgcccggccacagcgtggccctgtgcctggccgtggccttcaagagcaaggccaccaatgatgagatcttcagcatcctgaaggatgtgcccaaccccaaccaggatgatgatgatgatgagggcttctccttcaaccccctgaagattgaggtgtttgtgcagaccctgctgcacctggccgccaagagcttcagccacagcttcagcgccctggccaagttccacgaggtgttcaagaccctggccgagagtgatgagggcaagctgcacgtgctgcgggtgatgtttgaggtgtggaggaaccacccccagatgattgctgtgctggtggacaagatgatccgcacccagatcgtggactgtgccgctgtggccaactggatcttcagcagcgagctgagccgggacttcacccggctgtttgtgtgggagatcctgcacagcaccatcaggaagatgaacaagcacgtgctgaagatccagaaggagctggaggaggccaaggagaagctggcccggcagcacaagagaagaagtgatgatgatgacaggagcagtgacaggaaggatggagtgctggaggagcagatcgagcggctgcaggagaaggtggagagcgcccagagcgagcagaagaacctcttcctggtgatcttccagcgcttcatcatgatcctgacagagcacctggtgcgctgtgaaacagatggcacctctgtgctgaccccctggtacaagaactgcatcgagcggctgcagcagatcttcctgcagcaccaccagatcatccagcagtacatggtgaccctggagaacctgctcttcaccgctgagctggacccccacatcctggccgtgttccagcagttctgtgccctgcaggcctag

SEQ ID NO: 20014 - DNA, 699 bp, synthetic construct
  source 1..699: mol_type = other DNA; note = Synthetic coding sequence
atgagccaggtgctgagcatcctgggcatgcacaccctgatgagcaaccagcagtactaccaggccctgagcagcagcagcatcatgaacaaggagggcctgaacagcgtcatcaagcccacccagtacaagcctgtgcctgatgaggagcccaacagcacagatgtggaggagaccctggagcgcatcaagaacaatgaccccaagctggaggaggtgaacctgaacaacatccggaacatccccatccccaccctgaaggcctatgcagaggccctgaaggaaaattcctatgtgaagaagttcagcatcgtgggcaccaggagcaatgaccctgtggcctatgccctggccgagatgctgaaggagaacaaggtgctgaagaccctgaatgtggagagcaacttcatcagcggggccggcatcctgcggctggtggaggccctgccctacaacaccagcctggtggagatgaagattgacaaccagagccagcccctgggcaacaaggtggagatggagatcgtgtccatgctggagaagaatgccaccctgctgaagtttggctaccacttcacccagcagggcccccggctgcgggccagcaatgccatgatgaacaacaatgacctggtgaggaagaggcggctggccgacctgaccggccccatcatccccaagtgccgcagcggcgtgtag

SEQ ID NO: 20015 - DNA, 2403 bp, synthetic construct
  source 1..2403: mol_type = other DNA; note = Synthetic coding sequence
atgagcagcctgggcgccagctttgtgcagatcaagtttgatgacctgcagttctttgagaactgtggcggcggcagctttggatctgtgtaccgggccaagtggatcagccaggacaaggaggtggccgtgaagaagctgctgaagattgagaaggaggccgagatcctgtctgtgctgagccacaggaacatcatccagttctatggagtcatcctggagccccccaactacggcatcgtgacagaatatgccagcctgggcagcctgtatgactacatcaacagcaacagaagtgaggagatggacatggaccacatcatgacctgggccacagatgtggccaagggcatgcactacctgcacatggaggcccctgtgaaggtgatccaccgggacctgaagagcagaaatgtggtgattgctgctgatggagtgctgaagatctgtgactttggagccagccgcttccacaaccacaccacccacatgagcctggtgggcaccttcccctggatggcccctgaggtgatccagagcctgcctgtgtctgagacctgtgacacctacagctatggagtggtgctgtgggagatgctgacccgggaggtgcccttcaagggcctggagggcctgcaggtggcctggctggtggtggagaagaatgaaaggctgaccatccccagcagctgccccaggagctttgctgagctgctgcaccagtgctgggaggctgatgccaagaagaggcccagcttcaagcagatcatcagcatcctggagagcatgagcaatgacaccagcctgcctgacaagtgcaacagcttcctgcacaacaaggccgagtggaggtgtgaaattgaggccaccctggagcggctgaagaagctggagcgggacctgtccttcaaggagcaggagctgaaggagcgggagcggcggctgaagatgtgggagcagaagctgacagagcagagcaacacccccctgctgcccagctttgagatcggggcctggacagaagatgatgtgtactgctgggtgcagcagctggtgaggaagggggacagcagcgctgagatgtctgtgtatgccagcctcttcaaggagaacaacatcaccgggaagaggctgctgctgctggaggaggaggacctgaaggacatgggcatcgtgtccaagggccacatcatccacttcaagagcgccatcgagaagctgacccatgactacatcaacctcttccacttccccccactcatcaaggacagcggcggggagcctgaggagaatgaggagaagatcgtgaacctggagctggtgtttggcttccacctgaagccaggcaccggcccccaggactgcaagtggaagatgtacatggagatggatggagatgagatcgccatcacctacatcaaggatgtgaccttcaacaccaacctgcctgatgctgagatcctgaagatgaccaagcccccatttgtgatggagaagtggatcgtgggcatcgccaagagccagacagtggagtgcaccgtgacctatgaaagtgatgtgaggacccccaagagcaccaagcacgtgcacagcatccagtggagcaggaccaagccccaggatgaggtgaaggctgtgcagctggccatccagaccctcttcaccaacagtgatggcaaccctggcagcagaagtgacagcagcgctgactgccagtggctggacaccctgaggatgaggcagatcgccagcaacaccagcctgcagaggagccagagcaaccccatcctgggcagccccttcttcagccactttgatggccaggacagctatgctgctgctgtgcggcggccccaggtgcccatcaagtaccagcagatcacccctgtgaaccagagccgcagcagcagccccacccagtatggcctgaccaagaacttcagcagcctgcacctgaacagccgggacagcggcttcagcagcggcaacacagacaccagcagcgagcggggccgctacagcgacaggagcaggaacaagtatggccggggcagcatcagcctgaacagcagcccccggggccgctacagcggcaagagccagcacagcacccccagccggggccgctacccaggcaagttctacagagtgtcccagagcgccctgaacccccaccagagcccagacttcaagaggagcccccgggacctgcaccagcccaacaccatccctggcatgcccctgcaccctgagacagacagccgggccagcgaggaggacagcaaggtgtctgagggcggctggaccaaggtggagtacaggaagaagccccaccggcccagccctgccaagaccaacaaggagcgggcccggggggaccaccggggctggaggaacttctag

SEQ ID NO: 20016 - DNA, 1071 bp, synthetic construct
  source 1..1071: mol_type = other DNA; note = Synthetic coding sequence
atgaggcgcttcctgcggcccggccatgaccctgtgcgggagcggctgaagagggacctcttccagttcaacaagacagtggagcacggcttcccccaccagcccagcgccctgggctacagccccagcctgcgcatcctggccatcggcaccaggtctggggccatcaagctgtatggagcccctggggtggagttcatgggcctgcaccaggagaacaatgctgtgacccagatccacctgctgcccggccagtgccagctggtgaccctgctggatgacaacagcctgcacctgtggagcctgaaggtgaagggcggggccagcgagctgcaggaggatgagagcttcaccctgcggggccccccaggagctgcccccagcgccacccagatcaccgtggtgctgccccacagcagctgtgagctgctgtacctgggcacagagagcggaaatgtgtttgtggtgcagctgcctgccttccgggccctggaggacaggaccatcagcagtgatgctgtgctgcagaggctgcctgaggaggcccggcacagaagagtgtttgagatggtggaggccctgcaggagcacccccgggaccccaaccagatcctgattggctacagccggggcctggtggtgatctgggacctgcagggcagccgggtgctgtaccacttcctgagcagccagcagctggagaacatctggtggcagagagatggccgcctgctggtgtcctgccacagtgatggcagctactgccagtggcctgtgtcctctgaggcccagcagcctgagcccctgcggagcctggtgccctacggccccttcccctgcaaggccatcacccgcatcctgtggctgaccacccggcagggcctgcccttcaccatcttccagggcggcatgccccgggccagctatggagacagacactgcatcagcgtcatccatgatggccagcagacagcctttgacttcaccagccgggtgattggcttcaccgtgctgacagaagctgaccctgctgccagcagaagagccagcggcgtgggcgcccagggctag

SEQ ID NO: 20017 - DNA, 2526 bp, synthetic construct
  source 1..2526: mol_type = other DNA; note = Synthetic coding sequence
atgggcgcccgggccgccggcaccagcagcggcggcggcccccggccctgcctggcccggggcctgagcgccagccccttccctgccaagcagcagcacccccaggccggggccagccctgctgagctgcagcagagggcctactaccgggcccggcaggatgctgccagccagcccggcctgggcttcctgatcagccccagcagctgcagctcctggggccctggcagcttcaccaggagctgtggctaccccaccctgtgcagctcctggatcagcaagcgggagcctggagagctgtctggagtgtggaccagcgcctggaggacccacgccgccttcaccggcagccaggacctgtgcctgtacaagggcctgggcagcatctatgaggacaagacagccctgagcctgctgggcctgggggaggagaccaatgaggaggatgaggaggagagtgacaaccagagcgtgcacagcagcagcgagcccctgaggaacctgcacctggacatcggggccctgggcggggactttgaatatgaggagagcctgcggaccagccagcctgaggagaagaaggatgtgtccctggacagtgatgctgctggcccccccaccccctgcaagcccagcagccctggagctgacagcagcctgagcagcgctgtgggcaagggccggcagggcagcggggcccggcccggcctgcctgagaaggaggagaatgagaagtctgagcccaagatctgcaggaacctggtgacccccaaggctgaccccaccggcagcgagcccgccaaggccagcgagaaggaggcccctgaggacacagtggatgctggggaggagggcagcagaagagaggaggccgccaaggagcccaagaagaaggccagcgccctggaggagggcagcagtgatgccagccaggagctggagatcagcgagcacatgaaggagccccagctgagtgacagcatcgccagtgaccccaagagcttccacggcctggactttggcttccgcagccgcatcagcgagcacctgctggatgtggatgtgctgagccctgtgctgggcggggcctgccggcaggcccagcagcccctgggcatcgaggacaaggatgacagccagagcagccaggatgagctgcagagcaagcagagcaagggcctggaggagcgctaccaccggctgagcccccccctgccccatgaggagcgggcccagagcccccccaggagcctggccacagaggaggagcccccccagggccctgagggccagcctgagtggaaggaggccgaggagctgggggaggacagcgctgccagcctgagcctgcagctgagcctgcagaggaggagcacagagcctgtggcccctcctgagcagctgtctgaggccgccctgaaggccatggaggaggccgtggcccaggtgctggagcaggaccagaggcacctgctggagagcaagcaggagaagatgcagcagctgcgggagaagctgtgccaggaggaggaggaggagatcctgcggctgcaccagcagaaggagcagagcctgagcagcctgcgggagcggctgcagaaggccatcgaggaggaggaggccaggatgagggaggaggagagccagaggctgtcctggctgcgggcccaggtgcagagcagcacccaggctgatgaggaccagatccgggcagagcaggaggccagcctgcagaagctgcgggaggagctggagagccagcagaaggccgagcgggccagcctggagcagaagaaccggcagatgctggagcagctgaaggaggagattgaggccagcgagaagtctgagcaggccgccctgaatgctgccaaggagaaggccctgcagcagctgcgggagcagctggagggggagaggaaggaggccgtggccaccctggagaaggagcacagcgctgagctggagcggctgtgcagcagcctggaggccaagcaccgggaggtggtgagcagcctgcagaagaagatccaggaggcccagcagaaggaggaggcccagctgcagaagtgcctgggccaggtggagcaccgggtgcaccagaagagctaccacgtggccggctatgaacatgagctgagcagcctgctgcgggagaagaggcaggaggtggagggggagcacgagcggcggctggacaagatgaaggaggagcaccagcaggtgatggccaaggcccgggagcagtatgaggccgaggagaggaagcagagagctgagctgctgggccacctgaccggggagctggagcggctgcagagggcccacgagcgggagctggagaccgtgcggcaggagcagcacaagaggctggaggacctgcggcggcggcaccgggagcaggagaggaagctgcaggacctggagctggacctggagacccgggccaaggatgtgaaggcccggctggccctgctggaggtgcaggtgcgggacctgcaggagagcctgaccagcgagagctag

SEQ ID NO: 20018 - DNA, 1053 bp, synthetic construct
  source 1..1053: mol_type = other DNA; note = Synthetic coding sequence
atgatccggggctttgaggcccccatggctgaaaatcctcctcctcctcctcctcctgtgatcttctgccacgacagccccaagagggtgctggtgtctgtcatccgcaccacccccatcaagcccacctgtggcggcggcggggagcctgagcccccaccacccctcatccccaccagccctggcttcagtgacttcatggtgtacccctggcgctggggagaaaatgcccacaacgtgaccctgagccctggagctgctggagctgctgccagcgctgccctgcctgctgctgctgctgctgagcacagcggcctgcggggccgcggggcccctcctcctgctgccagcgccagcgctgctgccagcggcggggaggatgaggaggaggccagcagcccagacagcggccacctgaaggatggcatccggcggggccggcccagggctgacacagtgcgggacctgatcaatgaaggagagcacagcagcagccgcatccgctgcaacatctgcaacagagtcttcccccgggagaagagcctgcaggcccacaagaggacccacactggagagcggccctacctgtgtgactacccagactgtgggaaggcctttgtgcagagcggccagctgaagacccaccagaggctgcacactggagagaagccctttgtgtgcagtgaaaatggctgcctgagccgcttcacccacgccaacagacactgccccaagcacccctatgcccggctgaagcgggaggagcccacagacaccctgagcaagcaccaggccgctgacaacaaggctgctgctgagtggctggcccgctactgggagatgagggagcagaggacccccaccctgaagggcaagctggtgcagaaggctgaccaggagcagcaggaccccctggagtacctgcagagtgatgaagaagatgatgagaagagaggagcccagaggcggctgcaggagcagcgggagcggctgcacggggccctggccctgattgagctggccaacctgaccggggcccccctgcggcagtag

SEQ ID NO: 20019 - DNA, 1137 bp, synthetic construct
  source 1..1137: mol_type = other DNA; note = Synthetic coding sequence
atgaacatgatctggaggaacagcatcagctgcctgcggctgggcaaggtgccccaccgctaccagagcggctaccaccctgtggcccccctgggcagccgcatcctgacagatcctgccaaggtgtttgagcacaacatgtgggaccacatgcagtggagcaaggaggaggaggccgccgccaggaagaaggtgaaggaaaattctgctgtgcgggtgctgctggaggagcaggtgaagtatgagcgggaggccagcaagtactgggacaccttctacaagatccacaagaacaagttcttcaaggacaggaactggctgctgcgggagttccctgagatcctgcctgtggaccagaagccagaggagaaggcccgggagagctcctgggaccacgtgaagaccagcgccaccaaccgcttcagcaggatgcactgccccaccgtgcctgatgagaagaaccactatgagaagagcagcggcagcagcgagggccagagcaagacagaaagtgacttcagcaacctggacagcgagaagcacaagaagggccccatggagaccggcctcttccctggcagcaatgccaccttccgcatcctggaggtgggctgtggggccggcaacagcgtcttccccatcctgaacaccctggagaacagccctgagagcttcctgtactgctgtgactttgccagcggggctgtggagctggtgaagagccacagcagctaccgggccacccagtgctttgcctttgtgcatgatgtgtgtgatgatggcctgccctaccccttcccagatggcatcctggatgtgatcctgctggtgtttgtgctgagcagcatccacccagacaggatgcagggcgtggtgaaccggctgagcaagctgctgaagccaggcggcatgctgctcttccgggactatggccgctatgacaagacccagctgcgcttcaagaagggccactgcctgtctgagaacttctacgtgagaggagatggcacccgggcctacttcttcaccaagggggaggtgcacagcatgttctgcaaggccagcctggatgagaagcagaacctggtggaccggcggctgcaggtgaacaggaagaagcaggtgaagatgcactag

SEQ ID NO: 20020 - DNA, 1797 bp, synthetic construct
  source 1..1797: mol_type = other DNA; note = Synthetic coding sequence
atgggcctgcgggccagccggcccagcaagctgacctggaagaagtgggccaccacagctgccagcaacagctgcagccgctctgtgagcagctgccgccgctgcaccggcggccgcctgatgaaggagccctggaggcggcccagcagcagcatctgctacaccagccgcagcagcaccatcaagttcagcagcaacaagttcaagaccctgtctgtgctgctgagccacctgcacctgttccggctgcacgtgaagatcagccagcccagcctgcccatcagcagcagaggagctgccagcagcagccagttccagggcctgcccagccgcagcgccatcttccagcagcagcctgagaactgcagcagccccccaaatgtggccctgacctgcctgggcatgcagcagcctgcccagagccagcaggtgaccatccaggtgcaggagcctgtggacatgctgagcaacatgcctggaacagctgctggcagcagcggccggggcatcagcatcagccccagcgctggccagatgcagatgcagcacaggaccaacctgatggccaccctgtcctatggccaccggcccctgagcaagcagctgtctgctgacagcgctgaggcccacagcgcccaccagcagcccccccactacaccaccagcgccctgcagcaggccctgctgagccccaccccaccagactacaccaggcaccagcaggtgccccacatcctgcagggcctgctgagccccaggcacagcctgaccggccacagcgacatccggctgcccccaacagaatttgcccagctgatcaagaggcagcagcagcagaggcagcagcagcagcagcagcagcagcagcaggagtaccaggagctgttccgccacatgaaccagggagatgctggcagcctggcccccagcctgggcggccagagcatgacagagcggcaggccctgagctaccagaatgctgacagctaccaccaccacaccagcccccagcacctgctgcagatccgggcccaggagtgtgtgtcccaggccagcagccccaccccaccccacggctacgcccaccagcctgccctgatgcacagcgagagcatggaggaggactgcagctgtgagggcgccaaggatggcttccaggacagcaagagcagcagcaccctgaccaagggctgccacgacagccccctgctgctgagcactggaggccctggggaccctgagagcctgctgggcaccgtgagccacgcccaggagctgggcatccacccctacggccaccagcccacagctgccttcagcaagaacaaggtgcccagccgggagcctgtgattggcaactgcatggacaggagcagccctggccaggccgtggagctgcctgaccacaacggcctgggctacccagcccggcccagcgtgcatgagcaccaccggccccgggccctgcagaggcaccacaccatccagaacagtgatgatgcctacgtgcagctggacaacctgcccggcatgagcctggtggccggcaaggccctgagcagcgccaggatgtctgatgctgtgctgagccagagcagcctgatgggcagccagcagttccaggatggagaaaatgaagaatgtggggccagcctgggcggccacgagcacccagacctgagtgatggcagccagcacctgaacagcagctgctaccccagcacctgcatcacagacatcctgctgagctacaagcaccctgaggtgtccttctccatggagcaggccggcgtgtag

SEQ ID NO: 20021 - DNA, 3966 bp, synthetic construct
  source 1..3966: mol_type = other DNA; note = Synthetic coding sequence
atggctgctgctgctgccagcggggccggcggcgctgctggagctggcactggaggagctggccctgctggccgcctgctgcccccaccagcccctggcagccctgctgccccagctgctgtgtccccagctgctggccagccccggcccccagccccagccagccggggccccatgcctgccagaattggctactatgaaattgacaggaccatcggcaagggcaactttgctgtggtgaagagggccacccacctggtgaccaaggccaaggtggccatcaagatcatcgacaagacccagctggatgaggagaacctgaagaagatcttccgggaggtgcagatcatgaagatgctgtgccacccccacatcatccggctgtaccaggtgatggagacagagaggatgatctacctggtgacagaatatgccagcggcggggagatctttgaccacctggtggcccacggccgcatggccgagaaggaggcccggaggaagttcaagcagatcgtgacagctgtgtacttctgccactgcaggaacatcgtgcaccgggacctgaaggccgagaacctgctgctggatgccaacctgaacatcaagattgctgactttggcttcagcaacctcttcaccccaggccagctgctgaagacctggtgtggcagccccccctatgctgcccctgagctgtttgagggcaaggagtatgatggccccaaggtggacatctggagcctgggcgtggtgctgtatgtgctggtgtgtggggccctgccctttgatggcagcaccctgcagaacctgcgggcccgggtgctgagcggcaagttccgcatccccttcttcatgagcacagaatgtgagcacctgatccgccacatgctggtgctggaccccaacaagaggctgtccatggagcagatctgcaagcacaagtggatgaagctgggagatgctgaccccaactttgaccggctgattgctgagtgccagcagctgaaggaggagcggcaggtggaccccctgaatgaagatgtgctgctggccatggaggacatgggcctggacaaggagcagaccctgcagagcctgcggagtgatgcctatgaccactacagcgccatctacagcctgctgtgtgacagacacaagaggcacaagaccctgcggctgggcgccctgcccagcatgccccgggccctggccttccaggcccctgtgaacatccaggccgagcaggccggcacagccatgaacatctctgtgccccaggtgcagctgatcaaccctgagaaccagatcgtggagccagatggcaccctgaacctggacagtgatgaaggagaggagcccagccctgaggccctggtgcgctacctgtccatgaggaggcacacagtgggcgtggccgaccccaggacagaggtgatggaggacctgcagaagctgctgcccggcttccctggggtgaacccccaggcccccttcctgcaggtggccccaaatgtgaacttcatgcacaacctgctgcccatgcagaacctgcagcccaccggccagctggagtacaaggagcagagcctgctgcagccccccaccctgcagctgctgaatggcatgggccccctgggccggcgggccagtgatggaggagccaacatccagctgcacgcccagcagctgctgaagaggccccggggccccagccccctggtgaccatgaccccagctgtgcctgctgtgacccctgtggatgaggagagcagtgatggagagccagaccaggaggccgtgcagagcagcacctacaaggacagcaacaccctgcacctgcccacagagcgcttcagccctgtgcggcgcttcagtgatggagctgccagcatccaggccttcaaggcccacctggagaagatgggcaacaacagcagcatcaagcagctgcagcaggagtgtgagcagctgcagaagatgtatggaggccagattgatgagaggaccctggagaagacccagcagcagcacatgctgtaccagcaggagcagcaccaccagatcctgcagcagcagatccaggacagcatctgccccccccagcccagcccccccctgcaggccgcctgtgagaaccagcctgccctgctgacccaccagctgcagaggctgcgcatccagcccagcagccccccacccaaccaccccaacaaccacctgttccggcagcccagcaacagccccccacccatgagcagcgccatgatccagccccacggggccgccagcagcagccagttccagggcctgcccagccgcagcgccatcttccagcagcagcctgagaactgcagcagcccccccaacgtggccctgacctgcctgggcatgcagcagcctgcccagagccagcaggtgaccatccaggtgcaggagcctgtggacatgctgagcaacatgcctggaacagctgctggcagcagcggccggggcatcagcatcagccccagcgctggccagatgcagatgcagcacaggaccaacctgatggccaccctgtcctatggccaccggcccctgagcaagcagctgtctgctgacagcgctgaggcccacagcctgaatgtgaaccgcttcagccctgccaactatgaccaggcccacctgcacccccacctgttcagtgaccagagccggggcagccccagcagctacagccccagcactggagtgggcttcagccccacccaggccctgaaggtgccccccctggaccagttccccaccttcccccccagcgcccaccagcagcccccccactacaccaccagcgccctgcagcaggccctgctgagccccaccccaccagactacaccaggcaccagcaggtgccccacatcctgcagggcctgctgagccccaggcacagcctgaccggccacagcgacatccggctgcccccaacagaatttgcccagctgatcaagaggcagcagcagcagaggcagcagcagcagcagcagcagcagcagcaggagtaccaggagctgttccgccacatgaaccagggagatgctggcagcctggcccccagcctgggcggccagagcatgacagagcggcaggccctgagctaccagaatgctgacagctaccaccaccacaccagcccccagcacctgctgcagatccgggcccaggagtgtgtgtcccaggccagcagccccaccccacctcatggctacgcccaccagcctgccctgatgcacagcgagagcatggaggaggactgcagctgtgagggcgccaaggatggcttccaggacagcaagagcagcagcaccctgaccaagggctgccacgacagccccctgctgctgagcactggaggccctggggaccctgagagcctgctgggcaccgtgtcccatgcccaggagctgggcatccacccctacggccaccagcccacagctgccttcagcaagaacaaggtgcccagccgggagcccgtcatcggcaactgcatggacaggagcagccctggccaggccgtggagctgcctgaccacaacggcctgggctacccagcccggcccagcgtgcatgagcaccaccggccccgggccctgcagaggcaccacaccatccagaacagtgatgatgcctacgtgcagctggacaacctgcccggcatgagcctggtggccggcaaggccctgagcagcgccaggatgtctgatgctgtgctgagccagagcagcctgatgggcagccagcagttccaggatggagaaaatgaggagtgtggggccagcctgggcggccacgagcacccagacctgagtgatggcagccagcacctgaacagcagctgctaccccagcacctgcatcacagacatcctgctgagctacaagcaccctgaggtgtccttctccatggagcaggccggcgtgtag

SEQ ID NO: 20022 - DNA, 1569 bp, synthetic construct
  source 1..1569: mol_type = other DNA; note = Synthetic coding sequence
atgcccaggaagaaggctgctgctgctgcctgggaggagcccagcagtggaaatggaacagcccgggccggccccaggaagagaggaggccctgctggcaggaagcgggagaggcctgagcgctgcagcagcagcagcggcggcggcagcagtggagatgaagatggcctggagctggatggagcccctgggggcggcaagagagctgcccggcctgccacagctgggaaggccggcggcgctgctgtggtgatcacagagcctgagcacaccaaggagcgggtgaagctggagggcagcaaatgtaaaggccagctgctgatctttggagccaccaactgggacctgattggaaggaaggaggtgcccaagcagcaggccgcctacagaaacctgggccagaacctgtggggcccccacagatatggctgcctggccggcgtgcgggtgaggacagtggtgtctggcagctgtgccgcccacagcctgctgatcaccacagagggcaagctgtggagctggggcagaaatgagaagggccagctgggccacggggacaccaagagggtggaggcccccaggctcatcgagggcctgagccatgaagtcatcgtgtctgctgcctgtggcaggaaccacaccctggccctgacagagaccggctctgtgtttgccttcggggagaacaagatgggccagctgggcctgggcaaccagacagatgctgtgcccagccctgcccagatcatgtacaacggccagcccatcaccaagatggcctgtggggctgagttctccatgatcatggactgcaagggcaacctgtacagctttggctgcccagaatatggccagctgggccacaacagtgatggcaagttcatcgcccgggcccagagaattgaatatgactgtgagctggtgccccggcgggtggccatcttcatcgagaagaccaaggatggccagatcctgcctgtgcccaacgtggtggtgagagatgtggcctgtggggccaaccacaccctggtgctggacagccagaagagggtcttctcctggggctttggaggctacggccgcctgggccatgctgagcagaaggatgagatggtgccccggctggtgaagctgtttgacttccctggccgcggggccagccagatctatgccggctacacctgcagctttgctgtgtctgaggtgggcggcctcttcttctggggcgccaccaacaccagccgggagagcaccatgtaccccaaggctgtgcaggacctgtgtggctggaggatccgcagcctggcctgtgggaagagcagcatcatcgtggccgcagatgagagcaccatctcctggggccccagccccacctttggagagctgggctacggggaccacaagcccaagagcagcacagctgcccaggaggtgaagaccctggatggcatcttcagcgagcaggtggccatgggctacagccacagcctggtgattgccagagatgagagcgagacagagaaggagaagatcaagaagctgcctgagtacaaccccaggaccctgtag

SEQ ID NO: 20023 - DNA, 1569 bp, synthetic construct; identical to SEQ ID NO: 20022
  source 1..1569: mol_type = other DNA; note = Synthetic coding sequence

SEQ ID NO: 20024 - DNA, 552 bp, synthetic construct
  source 1..552: mol_type = other DNA; note = Synthetic coding sequence
atgacagaccagacctactgtgaccggctggtgcaggacacccccttcctgaccggccacggccgcctgtctgagcagcaggtggaccgcatcatcctgcagctgaaccgctactacccccagatcctgaccaacaaggaggccgagaagttcaggaaccccaaggccagcctgcgggtgcggctgtgtgacctgctgagccacctgcagaggtctggagagcgggactgccaggagttctaccgggccctgtacatccacgcccagcccctgcacagccggctgcccagcagacatgccctgcagaacagcgactgcacagagctggacagcggcagccagagcggggagctgagcaacagaggccccatgtccttcctggccggcctgggcctggccgtgggcctggccctgctgctgtactgctaccccccagaccccaagggcctgcccggcacccggcgggtgctgggcttcagccctgtgatcatcgacagacatgtgagccgctacctgctggccttcctggctgatgacctgggcggcctgtag

SEQ ID NO: 20025 - DNA, 492 bp, synthetic construct
  source 1..492: mol_type = other DNA; note = Synthetic coding sequence
atgctggacctgctggacatcgagggcctgtaccccctgtacaacagagtggagcgctacctggaggagttccctgaggagaggaagaccctgcagattgatggcccctatgatgaggccttctaccagaagctgctggacctgagcacagaagatgatggcaccgtggcctttgccctgaccaaggtgcagcagtacagagtggccatgacagccaaggactgcagcatcatgattgccctgagcccctgcctgcaggatgccagcagtgaccagaggcctgtggtgcccagcagccgcagcagatttgccttctctgtgtctgtgctggacctggacctgaagccctatgagagcatcccccaccagtacaagctggatggcaagatcgtgaactactacagcaagacagtgcgggccaaggacaatgctgtgatgagcacccgcttcaaggagagcgaggactgcaccctggtgctgcacaaggtgtag

SEQ ID NO: 20026 - DNA, 777 bp, synthetic construct
  source 1..777: mol_type = other DNA; note = Synthetic coding sequence
atggcccggccccctgtgcccggctctgtggtggtgcccaactggcatgagagcgctgagggcaaggagtacctggcctgcatcctgaggaagaacagaagaagagtgtttggcctgctggagaggcctgtgctgctgccccctgtgtccattgacacagccagctacaagatctttgtgtctgggaagagcggcgtgggcaagacagccctggtggccaagctggccggcctggaggtgcctgtggtgcaccacgagaccaccggcatccagaccaccgtggtgttctggccagccaagctgcaggccagcagccgggtggtgatgttccgctttgagttctgggactgtggggagagcgccctgaagaagtttgaccacatgctgctggcctgcatggagaacacagatgccttcctgttcctgttctccttcacagaccgggccagctttgaggacctgcccggccagctggccagaattgctggggaggcccctggggtggtgaggatggtgattggcagcaagtttgaccagtacatgcacacagatgtgcctgagcgggacctgacagccttccggcaggcctgggagctgcccctgctgcgggtgaagtctgtgcccggccggcggctggctgatggccgcaccctggatggccgggccggcctggctgatgtggcccacatcctgaatggcctggccgagcagctgtggcaccaggaccaggtggccgccggcctgctgcccaaccccccagagagcgcccctgagtag

SEQ ID NO: 20027 - DNA, 333 bp, synthetic construct
  source 1..333: mol_type = other DNA; note = Synthetic coding sequence
atggctgacaaggtgctgaaggagaagaggaagcagttcatccgctctgtgggggagggcaccatcaatggcctgctgggggagctgctggagaccagggtgctgagccaggaggagattgagatcgtgaagtgtgaaaatgccaccgtgatggacaaggcccgggccctgctggacagcgtcatcaggaagggggccccagcctgccagatctgcatcacctacatctgtgaggaggacagccacctggccggcaccctgggcctgtctgctggccccaccagcggcaaccacctgaccacccaggacagccagatcgtgctgcccagctag

SEQ ID NO: 20028 - DNA, 924 bp, synthetic construct
  source 1..924: mol_type = other DNA; note = Synthetic coding sequence
atggagcccagcagcctggagctgcctgctgacacagtgcagagaattgctgctgagctgaagtgccaccccacagatgagcgggtggccctgcacctggatgaggaggacaagctgcggcacttccgggagtgcttctacatccccaagatccaggacctgccccctgtggacctgagcctggtgaacaaggatgaaaatgccatctacttcctgggcaacagcctgggcctgcagcccaagatggtgaagacctacctggaggaggagctggacaagtgggccaagattgctgcctacggccacgaggtgggcaagaggccctggatcactggagatgagagcatcgtgggcctgatgaaggacatcgtgggcgccaatgagaaggagatcgccctgatgaatgccctgactgtgaacctgcacctgctgatgctgtccttcttcaagcccacccccaagcgctacaagatcctgctggaggccaaggccttccccagcgaccactacgccatcgagagccagctgcagctgcacggcctgaacatcgaggagagcatgaggatgatcaagccccgggagggggaggagaccctgagaattgaggacatcctggaggtgattgagaaggagggggacagcattgctgtgatcctcttctctggagtgcacttctacacaggccagcacttcaacatcccagccatcaccaaggccggccaggccaagggctgctacgtgggctttgacctggcccatgctgtgggcaatgtggagctgtacctgcatgactggggcgtggactttgcctgctggtgcagctacaagtacctgaatgctggggccggcggcattgctggggccttcatccacgagaagcacgcccacaccatcaagccagcccggtctgagttcttcaactag

SEQ ID NO: 20029 - DNA, 3060 bp, synthetic construct
  source 1..3060: mol_type = other DNA; note = Synthetic coding sequence
atggagcctggagaggtgaaggaccgcatcctggagaacatcagcctgtctgtgaagaagctgcagagctactttgctgcctgtgaagatgagatcccagccatccggaaccacgacaaggtgctgcagaggctgtgtgagcacctggaccacgccctgctgtatggcctgcaggacctgagcagcggctactgggtgctggtggtgcacttcacccggcgggaggccatcaagcagatcgaggtgctgcagcacgtggccaccaacctgggccgcagccgggcctggctgtacctggccctgaatgaaaacagcctggagagctacctgcggctcttccaggagaacctgggcctgctgcacaagtactacgtgaagaatgccctggtgtgcagccatgaccacctgaccctcttcctgaccctggtgtctggcctggagttcatccgctttgagctggacctggatgccccctacctggacctggccccctacatgccagactactacaagccccagtacctgctggactttgaagatcggctgcccagctctgtgcacggcagtgacagcctgagcctgaacagcttcaacagcgtgaccagcaccaacctggagtgggatgacagcgccatcgcccccagcagtgaagattatgactttggagatgtgtttcctgctgtgcccagcgtgcccagcacagactgggaggatggagacctgacagacacagtgtctggccccaggagcacagccagtgacctgaccagcagcaaggccagcaccaggagccccacccagaggcagaaccccttcaatgaggagcctgctgagaccgtgagcagcagtgacaccacccctgtgcacaccaccagccaggagaaggaggaggcccaggccctggaccccccagatgcctgcacagagctggaggtgatccgggtgaccaagaagaagaagattggcaagaagaagaagagcagaagtgatgaggaggccagccccctgcacccagcctgcagccagaagaagtgtgccaagcagggagatggagacagcagaaatggcagccccagcctgggccgggacagcccagacaccatgctggccagcccccaggaggagggggagggccccagcagcaccacagagagcagcgagaggtctgagcccggcctgctgatccctgagatgaaggacacctccatggagcggctgggccagcccctgagcaaggtgattgaccagctgaatggccagctggaccccagcacctggtgcagcagagctgagcccccagaccagagcttcagaacaggcagccctggagatgcccctgagaggcctcccctgtgtgacttcagcgagggcctgagcgcccccatggacttctaccgcttcaccgtggagagccccagcacagtgaccagcggcggcggccaccacgaccctgctggcctgggccagcccctgcacgtgcccagcagccctgaggccgccggccaggaggaggagggcggcggcggggagggccagaccccccggcccctggaggacaccacccgggaggcccaggagctggaggcccagctgagcctggtgcgggagggccctgtgtctgagcctgagcccggcacccaggaggtgctgtgccagctgaagagggaccagcccagcccctgcctgagcagcgctgaggacagcggcgtggatgagggccagggcagccccagcgagatggtgcacagcagcgagttccgggtggacaacaaccacctgctgctgctgatgattcatgtgttcagagaaaatgaggagcagctgttcaagatgatccgcatgagcacaggccacatggagggcaacctgcagctgctgtatgtgctgctgacagactgctacgtgtacctgctgaggaagggggccacagagaagccctacctggtggaggaggccgtgtcctacaatgagctggactatgtgtctgtgggcctggaccagcagacagtgaagctggtgtgcaccaacagaaggaagcagttcctgctggacacagcagatgtggccctggccgagttcttcctggccagcctgaagagcgccatgatcaagggctgccgggagcccccctaccccagcatcctgacagatgccaccatggagaagctggccctggccaagtttgtggcccaggagagcaaatgtgaggccagcgctgtgacagtgcgcttctacggcctggtgcactgggaggaccccacagatgagagcctgggccccaccccctgccactgcagccccccagagggcaccatcaccaaggagggcatgctgcactacaaggccggcaccagctacctgggcaaggagcactggaagacctgctttgtggtgctgagcaatggcatcctgtaccagtacccagacagaacagatgtgatccccctgctgtctgtgaacatgggcggggagcagtgtggcggctgccggcgggccaacaccacagaccggccccacgccttccaggtgatcctgagtgaccggccctgcctggagctgtctgctgagagcgaggccgagatggccgagtggatgcagcacctgtgccaggccgtgtccaagggcgtcatcccccagggcgtggcccccagcccctgcatcccctgctgcctggtgctgacagatgacaggctcttcacctgccacgaggactgccagaccagcttcttccgcagcctgggcacagccaagctgggggacatctctgctgtgtccacagagcccgggaaggagtactgtgtgctggagttcagccaggacagccagcagctgctgcccccctgggtgatctacctgagctgcaccagcgagctggaccggctgctgagcgccctgaacagcggctggaagaccatctaccaggtggacctgccccacacagccatccaggaggccagcaacaagaagaagtttgaagatgccctgagcctcatccacagcgcctggcagaggagtgacagcctgtgccggggccgggccagccgggacccctggtgctag

SEQ ID NO: 20030 - DNA, 318 bp, synthetic construct
  source 1..318: mol_type = other DNA; note = Synthetic coding sequence
atgaagccctttgaagatgccctgaagaaccagcccctgggccctgtgctgagcaaggccgcctctgtggagtgcatcagccctgtgagcccccgggccccagatgccaagatgctggaggagctgcaggccgagacctggtaccagggcgagatgagcaggaaggaggccgagggcctgctggagaaggatggagacttcctggtgaggaagagcaccaccaaccctggcagctttgtgctgaccggcatgcacaacggccaggccaagcacctgctgctggtggaccctgagggcaccaggagcaacagctactag

SEQ ID NO: 20031 - DNA, 318 bp, synthetic construct; identical to SEQ ID NO: 20030
  source 1..318: mol_type = other DNA; note = Synthetic coding sequence

SEQ ID NO: 20032 - DNA, 1785 bp, synthetic construct
  source 1..1785: mol_type = other DNA; note = Synthetic coding sequence
atgctgcccaggaccaagtacaaccgcttcagaaatgacagcgtgacctctgtggatgacctgctgcacagcctgtctgtgtctgggggcggcggcaaggtgtctgctgcccgggccaccccagctgctgccccctacctggtgtctggagaggccctgaggaaggccccagatgatggccctggcagcctgggccacctgctgcacaaggtgagccacctgaagctgagcagcagcggcctgcggggcctgagcagcgctgcccgggagcgggccggggcccggctgagcggcagctgcagcgcccccagcctggccgccccagatggcagcgcccccagcgccccccgggccccagccatgtctgctgccaggaagggccggcctggagatgagcccctgcccaggcctcccaggggggcccctcatgccagtgaccaggtgctgggccctggggtgacctacgtggtgaagtacctgggctgcatcgaggtgctgcgctccatgaggagcctggacttcagcaccaggacccagatcacccgggaggccatcagccgggtgtgtgaggccgtgcctggggccaagggggccttcaagaagaggaagccacccagcaagatgctgagcagcatcctgggcaagagcaacctgcagtttgctggcatgagcatcagcctgaccatcagcacagccagcctgaacctgcggaccccagacagcaagcagatcatcgccaaccaccacatgaggagcatcagctttgccagcggcggggaccctgacaccacagattatgtggcctacgtggccaaggaccctgtgaacagaagagcctgccacatcctggagtgctgtgatggcctggcccaggacgtcatcggcagcatcggccaggcctttgagctgcgcttcaagcagtacctgcagtgccccaccaagatcccagccctgcatgacaggatgcagagcctggatgagccctggacagaggaggagggagatggcagtgaccacccctactacaacagcatccccagcaagatgcctcctcctgggggcttcctggacacccggctgaagccccggccccacgccccagacacagcccagtttgctgggaaggagcagacctactaccagggccgccacctgggggacacctttggagaggactggcagcagacccccctgcggcagggcagcagtgacatctacagcaccccagagggcaagctgcacgtggcccccaccggggaggcccccacctacgtgaacacccagcagatccccccccaggcctggccagctgctgtgtcctctgctgagagcagccccaggaaggacctgtttgacatgaagccctttgaagatgccctgaagaaccagcccctgggccctgtgctgagcaaggccgcctctgtggagtgcatcagccctgtgagcccccgggccccagatgccaagatgctggaggagctgcaggccgagacctggtaccagggcgagatgagcaggaaggaggccgagggcctgctggagaaggatggagacttcctggtgaggaagagcaccaccaaccctggcagctttgtgctgaccggcatgcacaacggccaggccaagcacctgctgctggtggaccctgagggcaccatccgcaccaaggacagagtgtttgacagcatcagccacctgatcaaccaccacctggagagcagcctgcccatcgtgtctgctggcagcgagctgtgcctgcagcagcctgtggagaggaagcagtag

SEQ ID NO: 20033 - DNA, 693 bp, synthetic construct
  source 1..693: mol_type = other DNA; note = Synthetic coding sequence
atgaacaccctgatggatgtgctgcggcaccggcccggctgggtggaggtgaaggatgaaggagagtgggacttctactggtgtgatgtgtcctggctgagagaaaattttgaccacacctacatggatgaacatgtgcgcatcagccacttcaggaaccactatgagctgaccaggaagaactacatggtgaagaacctgaagcgcttcaggaagcagctggagcgggaggccggcaagctggaggccgccaagtgtgacttcttccccaagacctttgagatgccctgtgagtaccacctgtttgtggaggagttcaggaagaaccctggcatcacctggatcatgaagccagacaccaggagcagtgatgaccagaaggatgacatccctgtggagaactacgtggcccagcgctacatcgagaacccctacctgattggaggcaggaagtttgacctgcgggtgtatgtgctggtgatgagctacatccccctgcgggcctggctgtacagagatggctttgcccgcttcagcaacacccgcttcaccctgaacagcattgatgaccagtatgtgcacctgaccaacgtggccgtgcagaagaccagcccagactaccaccccaagaaggtggcccctgggggccagtgtgtgcccatcacagacagccagcagcccggccgcctgtag

SEQ ID NO: 20034 - DNA, 1068 bp, synthetic construct
  source 1..1068: mol_type = other DNA; note = Synthetic coding sequence
atgaacaccctgatggatgtgctgcggcaccggcccggctgggtggaggtgaaggatgaaggagagtgggacttctactggtgtgatgtgtcctggctgagagaaaattttgaccacacctacatggatgaacatgtgcgcatcagccacttcaggaaccactatgagctgaccaggaagaactacatggtgaagaacctgaagcgcttcaggaagcagctggagcgggaggccggcaagctggaggccgccaagtgtgacttcttccccaagacctttgagatgccctgtgagtaccacctgtttgtggaggagttcaggaagaaccctggcatcacctggatcatgaagccagacaccaggagcagtgatgaccagaaggatgacatccctgtggagaactacgtggcccagcgctacatcgagaacccctacctgattggaggcaggaagtttgacctgcgggtgtatgtgctggtgatgagctacatccccctgcgggcctggctgtacagagatggctttgcccgcttcagcaacacccgcttcaccctgaacagcattgatgaccagtatgtgcacctgaccaacgtggccgtgcagaagaccagcccagactaccaccccaagaagggctgcaagtggaccctgcagcgcttccggcagtacctggccagcaagcacggccctgaggccgtggagaccctcttccgggacatcgacaacatctttgtgaagagcctgcagagcgtgcagaaggtgatcatcagtgacaagcactgctttgagctgtatggctatgacatcctgattgaccaggacctgaagccctggctgctggaggtgaatgccagccccagcctgacagccagcagccaggaggactatgagctgaagacctgcctgctggaggacaccctgcacgtggtggacatggaggcccggctgcggcagaggtctgaggagaccacagaggccgccctgctgctgcccagcagcagcgaggagagcttccagctgatccccagctgccaggaggagatcagcctgagccggccctgtgtgtag

SEQ ID NO: 20035 - DNA, 840 bp, synthetic construct
  source 1..840: mol_type = other DNA; note = Synthetic coding sequence
atgagccggcccaagaaccagaactacaagggccacggcctgagcaagggcaaggagcgggagcagagggccagcatccgcttcaagaccaccctgatgaacaccctgatggatgtgctgcggcaccggcccggctgggtggaggtgaaggatgaaggagagtgggacttctactggtgtgatgtgtcctggctgagagaaaattttgaccacacctacatggatgaacatgtgcgcatcagccacttcaggaaccactatgagctgaccaggaagaactacatggtgaagaacctgaagcgcttcaggaagcagctggagcgggaggccggcaagctggaggccgccaagtgtgacttcttccccaagacctttgagatgccctgtgagtaccacctgtttgtggaggagttcaggaagaaccctggcatcacctggatcatgaagcctgtggcccggagccagggcaagggcatcttcctgttccggcggctgaaggacatcgtggactggaggaaggacaccaggagcagtgatgaccagaaggatgacatccctgtggagaactacgtggcccagcgctacatcgagaacccctacctgattggaggcaggaagtttgacctgcgggtgtatgtgctggtgatgtccatgttcaccagccccacctggctgtgcaagaagcacctgcccaccaccacccagaggcgggccgccagcggccgctgcagcgccagcggcagcacctggaggcccaacacaggcccccggcagtggaggcacagcagcggcaccagcaccaccagcctgagcaaggcctgccgggtgtgcagaagatag

SEQ ID NO: 20036 - DNA, 1116 bp, synthetic construct
  source 1..1116: mol_type = other DNA; note = Synthetic coding sequence
atgagccggcccaagaaccagaactacaagggccacggcctgagcaagggcaaggagcgggagcagagggccagcatccgcttcaagaccaccctgatgaacaccctgatggatgtgctgcggcaccggcccggctgggtggaggtgaaggatgaaggagagtgggacttctactggtgtgatgtgtcctggctgcgggagaacctggagcgggaggccggcaagctggaggccgccaagtgtgacttcttccccaagacctttgagatgccctgtgagtaccacctgtttgtggaggagttcaggaagaaccctggcatcacctggatcatgaagcctgtggcccggagccagggcaagggcatcttcctgttccggcggctgaaggacatcgtggactggaggaaggacaccaggagcagtgatgaccagaaggatgacatccctgtggagaactacgtggcccagcgctacatcgagaacccctacctgattggaggcaggaagtttgacctgcgggtgtatgtgctggtgatgagctacatccccctgcgggcctggctgtacagagatggctttgcccgcttcagcaacacccgcttcaccctgaacagcattgatgaccagtatgtgcacctgaccaacgtggccgtgcagaagaccagcccagactaccaccccaagaagctgcaccccaccgtgggccccctgtgcatccacagcccagaaaatggcagcctgtctgtgaccccctggccctgggatgcccacatgggctgcaagtggaccctgcagcgcttccggcagtacctggccagcaagcacggccctgaggccgtggagaccctcttccgggacatcgacaacatctttgtgaagagcctgcagagcgtgcagaaggtgatcatcagtgacaagcactgctttgagctgtatggctatgacatcctgattgaccaggacctgaagccctggctgctggaggtgaatgccagccccagcctgacagccagcagccaggaggactatgagctgaagacctgcctgctggaggacaccctgcacgtggtggacatggaggccagcttcagccccatcatcccagctgaggtgtag

SEQ ID NO: 20037 - DNA, 1320 bp, synthetic construct
  source 1..1320: mol_type = other DNA; note = Synthetic coding sequence
atggtgcccagccgggaggccctgctgggccctggcaccacagccatccgctgccccaagaagctgcagaaccagaactacaagggccacggcctgagcaagggcaaggagcgggagcagagggccagcatccgcttcaagaccaccctgatgaacaccctgatggatgtgctgcggcaccggcccggctgggtggaggtgaaggatgaaggagagtgggacttctactggtgtgatgtgtcctggctgagagaaaattttgaccacacctacatggatgaacatgtgcgcatcagccacttcaggaaccactatgagctgaccaggaagaactacatggtgaagaacctgaagcgcttcaggaagcagctggagcgggaggccggcaagctggaggccgccaagtgtgacttcttccccaagacctttgagatgccctgtgagtaccacctgtttgtggaggagttcaggaagaaccctggcatcacctggatcatgaagcctgtggcccggagccagggcaagggcatcttcctgttccggcggctgaaggacatcgtggactggaggaaggacaccaggagcagtgatgaccagaaggatgacatccctgtggagaactacgtggcccagcgctacatcgagaacccctacctgattggaggcaggaagtttgacctgcgggtgtatgtgctggtgatgtctgtgtttgctgaatgtctgctgtggagcggccaccggcggcaggatgtgcacctgaccaacgtggccgtgcagaagaccagcccagactaccaccccaagaagggctgcaagtggaccctgcagcgcttccggcagtacctggccagcaagcacggccctgaggccgtggagaccctcttccgggacatcgacaacatctttgtgaagagcctgcagagcgtgcagaaggtgatcatcagtgacaagcactgctttgagctgtatggctatgacatcctgattgaccaggacctgaagccctggctgctggaggtgaatgccagccccagcctgacagccagcagccaggaggactatgagctgaagacctgcctgctggaggacaccctgcacgtggtggacatggaggcccggctgaccggccgggagaagagggtgggcggctttgacctgatgtggaatgatggccctgtgtcccgggaggagggcgccccagacctgagcggcatgggcaactttgtgaccaacacccacctgggctgtgtgaatgacaggaagaagcagctgcggcagctgttctgcagcctgcaggtgcagaagaaggccagcagctag

SEQ ID NO: 20038 - DNA, 501 bp, synthetic construct
  source 1..501: mol_type = other DNA; note = Synthetic coding sequence
atgaaggagatgctggccaaggacctggaggagagccagggcggcaagagcagcgaggtgctgagcgccacagagctgcgggtgcagctggcccagaaggagcaggagctggcccgggccaaggaggccctgcaggccatgaaggctgacaggaagaggctgaagggggagaagacagacctggtgtcccagatgcagcagctgtatgccaccctggagagccgggaggagcagctgcgggacttcatccggaactatgagcagcacaggaaggagagtgaagatgctgtgaaggccctggccaaggagaaggacctgctggagcgggagaagtgggagctgcggcggcaggccaaggaggccacagaccacgccacagccctgcggagccagctggacctgaaggacaacaggatgaaggagctggaggccgagctggccatggccaagcagagcctggccaccctgaccaaggatgtgcccaagaggcacagcctgtag

SEQ ID NO: 20039 - DNA, 2328 bp, synthetic construct
  source 1..2328: mol_type = other DNA; note = Synthetic coding sequence
atgatggaggacaacaagcagctggccctgagaattgatggagctgtgcagagcgccagccaggaggtgaccaacctgcgggcagagctgacagccaccaacagaaggctggccgagctgagcggcggcggcggccctggccctggccctggagctgctgccagcgccagcgctgctggggacagcgctgccaccaacatggagaacccccagctgggcgcccaggtgctgctgcgggaggaggtgtcccggctgcaggaggaggtgcacctgctgcggcagatgaaggagatgctggccaaggacctggaggagagccagggcggcaagagcagcgaggtgctgagcgccacagagctgcgggtgcagctggcccagaaggagcaggagctggcccgggccaaggaggccctgcaggccatgaaggctgacaggaagaggctgaagggggagaagacagacctggtgtcccagatgcagcagctgtatgccaccctggagagccgggaggagcagctgcgggacttcatccggaactatgagcagcacaggaaggagagtgaagatgctgtgaaggccctggccaaggagaaggacctgctggagcgggagaagtgggagctgcggcggcaggccaaggaggccacagaccacgccacagccctgcggagccagctggacctgaaggacaacaggatgaaggagctggaggccgagctggccatggccaagcagagcctggccaccctgaccaaggatgtgcccaagaggcacagcctggccatgcctggagagaccgtgctgaatggaaaccaggagtgggtggtgcaggccgacctgcccctgacagctgccatccggcagagccagcagaccctgtaccacagccaccccccccaccctgctgaccggcaggccgtgcgggtgagcccctgccacagccggcagcccagcgtcatcagtgatgccagcgctgctgagggggacaggagcagcacccccagcgacatcaacagccccaggcacaggacccacagcctgtgcaatggagacagccctggccctgtgcagaagaacctgcacaaccccatcgtgcagagcctggaggacctggaggaccagaagaggaagaagaagaaggagaagatgggcttcggcagcatcagccgggtgtttgcccggggcaagcagaggaagagcctggaccccggcctgtttgatgacagcgacagccagtgcagccccacccggcagagcctgagcctgtctgagggggaggagcagatggaccggctgcagcaggtggagctggtgaggaccacccccatgagccactggaaggccggcaccgtgcaggcctggctggaggtggtgatggccatgcccatgtatgtgaaggcctgcacagaaaatgtgaagagcggcaaggtgctgctgagcctgagtgatgaggacctgcagctgggcctgggcgtgtgcagcagcctgcacaggaggaagctgcggctggccatcgaggactacagagatgctgaggccggccgcagcctgagcaaggctgctgagctggaccaccactgggtggccaaggcctggctgaatgacatcggcctgagccagtacagccaggccttccagaaccacctggtggatggccgcatgctgaacagcctgatgaagagggacctggagaagcacctgaatgtgtccaagaagttccaccaggtgtccatcctgctgggcatcgagctgctgtaccaggtgaacttcagccgggaggccctgcaggagcggcgggcccgctgtgagacccagaacattgatcctgtggtgtggaccaaccagagggtgctgaagtgggtgcgggacatcgacctgaaggagtatgctgacaacctgaccaacagcggcgtgcatggagctgtgctggtgctggagcccaccttcaatgctgaggccatggccacagccctgggcatccccagcggcaagcacatcctgcggcggcacctggccgaggagatgtctgctgtgttccacccagccaacagcacaggcatccgggaggccgagagatttggcaccccacctggccgggccagctctgtgacccgggccggcaaggaggagaacagcagcggcctgaagtacaaggccggccgcctgcccctgggcaagattggccggggcttcagcagcaaggaccctgacttccatgatgattatggcagcctgcagaatgaagactgtggagatgatgacccccagagccggctggagcagtgccgcctggagggctacaacagcctggaggtgaccaacgtgtag

SEQ ID NO: 20040 - DNA, 861 bp, synthetic construct
  source 1..861: mol_type = other DNA; note = Synthetic coding sequence
atgtacagcctggaccgcatctttgctggcttccgcaccaggagccagatgctgctgggccacatcgaggagcaggacaaggtgctgcactgccagttcagtgacaacagtgatgatgaggagagcgagggccaggagaagagcggcacccgctgccgcagccgctcctggatccagaagccagattctgtgtgcagcctggtggagctgagtgacacccaggatgagacccagaagagtgacctggagaatgaagacctgaagattgactgcctgcaggagagccaggagctgaacctgcagaagctgaagaacagcgagcgcatcctgacagaggccaagcagaagatgagggagctgaccatcaacatcaagatgaaggaggacctgatcaaggagctgatcaagacaggaaatgatgccaagtctgtgtccaagcagtacagcctgaaggtgaccaagctggagcatgatgctgagcaggccaaggtggagctgattgagacccagaagcagctgcaggagctggagaacaaggacctgagtgatgtggccatgaaggtgaagctgcagaaggagttcaggaagaagatggatgctgccaagctgcgggtgcaggtgctgcagaagaagcagcaggacagcaagaagctggccagcctgagcatccagaatgagaagagggccaatgagctggagcagagcgtggaccacatgaagtaccagaagatccagctgcagaggaagctgcgggaggagaatgagaagaggaagcagctggatgctgtgatcaagagggaccagcagaagatcaaggtgatcctgagctacatcccagccaagtacaacatgaagtgctag

SEQ ID NO: 20041 - DNA, 1662 bp, synthetic construct
  source 1..1662: mol_type = other DNA; note = Synthetic coding sequence
atgaacaagaacaccagcacagtggtgagccccagcctgctggagaaggaccctgccttccagatgatcaccatcgccaaggagaccggcctgggcctgaaggtgctgggcggcatcaacagaaatgaaggccccctggtgtacatccaggagatcatccctggaggagactgctacaaggatggccgcctgaagccaggggaccagctggtgtctgtgaacaaggagagcatgattggagtgtcctttgaggaggccaagagcatcatcactggagccaagctgcggctggagagcgcctgggagatcgccttcatccggcagaagagtgacaacatccagcctgagaacctgagctgcaccagcctcatcgaggccagcggggagtatggcccccaggccagcaccctgagcctcttcagcagccccccagagatcctgatccccaagaccagcagcacccccaagaccaacaatgacatcctgagcagctgtgagatcaagacaggctacaacaagacagtgcagatccccatcaccagcgagaacagcacagtgggcctgagcaacacagatgtggccagcgcctggacagaaaattatggcctgcaggagaagatcagcctgaaccccagcgtgcgcttcaaggccgagaagctggagatggccctgaactacctgggcatccagcccaccaaggagcagcaccaggccctgcggcagcaggtgcaggccgacagcaagggcaccgtgtcctttggagactttgtgcaggtggccaggaacctcttctgcctgcagctggatgaggtgaatgtgggcgcccacgagatcagcaacatcctggacagccagctgctgccctgtgacagcagcgaggctgatgagatggagcggctgaagtgtgaaagagatgatgccctgaaggaggtgaacaccctgaaggagaagctgctggagagtgacaagcagaggaagcagctgacagaggagctgcagaatgtgaagcaggaggccaaggctgtggtggaggagacccgggccctgcggagccgcatccacctggccgaggccgcccagaggcaggcccacggcatggagatggactatgaggaggtgatccggctgctggaggccaagatcacagagctgaaggcccagctggccgactacagcgaccagaacaaggagagcgtgcaggacctgaagaagaggatcatggtgctggactgccagctgaggaagtctgagatggccaggaagacctttgaggccagcacagagaagctgctgcactttgtggaggccatccaggaggtgttcagtgacaacagcacccccctgagcaacctgtctgagcggcgggctgtgctggccagccagaccagcctgacccccctgggcagaaatggccgcagcatcccagccaccctggccctggagagcaaggagctggtgaagtctgtgcgggccctgctggacatggactgcctgccctacggctgggaggaggcctacacagcagatggcatcaagtacttcatcaaccacgtgacccagaccacctcctggatccaccctgtgatgtctgtgctgaacctgagccgctcagaagaaaatgaggaggactgcagccgggagctgcccaaccagaagagctag

SEQ ID NO: 20042 - DNA, 564 bp, synthetic construct
  source 1..564: mol_type = other DNA; note = Synthetic coding sequence
atggccgcccctggggccctgctggtgatgggcgtgtctggcagcggcaagagcacagtgggcgccctgctggccagcgagctgggctggaagttctatgatgctgatgactaccaccctgaggagaacagaaggaagatgggcaagggcatccccctgaatgaccaggaccgcatcccctggctgtgcaacctgcatgacatcctgctgagagatgtggccagcggccagagggtggtgctggcctgcagcgccctgaagaagacctacagagacatcctgacccagggcaaggatggagtggccctgaagtgtgaggagagcggcaaggaggccaagcaggccgagatgcagctgctggtggtgcacctgagcggcagctttgaggtgatcagcggccgcctgctgaagcgggagggccacttcatgcctcctgagctgctgcagagccagtttgagaccctggagcccccagctgcccctgagaacttcatccagatctctgtggacaagaatgtgtctgagatcatcgccaccatcatggagaccctgaagatgaagtag

SEQ ID NO: 20043 - DNA, 1134 bp, synthetic construct
  source 1..1134: mol_type = other DNA; note = Synthetic coding sequence
atggccaccatcccagactggaagctgcagctgctggcccggcggcggcaggaggaggcctctgtgcggggccgggagaaggccgagcgggagcggctgagccagatgcctgcctggaagaggggcctgctggagaggagaagagccaagctgggcctgagccctggagagcccagccctgtgctgggcaccgtggaggccggccccccagaccctgatgaatctgctgtgctgctggaggccatcggccctgtgcaccagaaccgcttcatccggcaggagcggcagcagcagcagcagcagcagcagaggtctgaggagctgctggccgagaggaagccaggccccctggaggcccgggagcggcggcccagccctggagagatgagggaccagagccccaagggccgggagagccgggaggagcggctgagcccccgggagacccgggagcggcggctgggcatcggcggggcccaggagctgagcctgcggcccctggaggcccgggactggaggcagagccctggagaggtgggggacaggagcagccggctgtctgaggcctggaagtggaggctgagccctggagagaccccagagaggagcctgcggctggccgagagccgggagcagagccccaggaggaaggaggtggagagccggctgagccctggagagagcgcctaccagaagctgggcctgacagaggcccacaagtggaggccagacagccgggagagccaggagcagagcctggtgcagctggaggccacagagtggaggctgcggtctggagaggagcggcaggactacagtgaagaatgtggcaggaaggaggagtggcctgtgcctggggtggcccccaaggagacagctgagctgtctgagaccctgacccgggaggcccagggcaacagcagcgctggggtggaggccgctgagcagaggcctgtggaggatggagagcggggcatgaagcccacagagggctggaagtggaccctcatcatgagcctggccgggaaaggaaaccagcacctggtgacctgcttcccccaccctgtgtctgggggccgggccaactgccccatcagcaccctcatccagagcccctggtgtggctggggctag

SEQ ID NO: 20044 - DNA, 2223 bp, synthetic construct
  source 1..2223: mol_type = other DNA; note = Synthetic coding sequence
atggaggctgatggagatggagaggagctggcccggctgcggtctgtgtttgctgcctgtgatgccaacagaagtggccgcctggagcgggaggagttccgggccctgtgcacagagctgcgggtgcggccagcagatgctgaggccgtgttccagaggctggatgctgacagagatggagccatcaccttccaggagtttgcccggggcttcctgggcagcctgcggggcggcagaagaagagactggggccccctggaccctgccccagctgtgtctgaggccggccctgagacccatgacagcgaggaggatgaaggagatgaagatgctgctgctgccctggccaccagctgtggccctgccagccctggccgggcctggcaggacttccaggcccggctgggagatgaggccaagttcatcccccgggaggagcaggtgtccaccctgtaccagaacatcaacctggtggagcccaggctcatccagccctatgagcacgtgatcaagaacttcatccgggagatccggctgcagagcacagagatggagaacctggccatcgctgtgaagagggcccaggacaaggccgccatgcagctgtctgagctggaggaggagatggaccagaggatccaggccgctgagcacaagaccaggaaggatgagaagaggaaggccgaggaggccctgagtgacctgcggcggcagtatgaaacagaggtgggggacctgcaggtgaccatcaagaagctgaggaagctggaggagcagagcaagagggtgtcccagaaggaggatgtggccgccctgaagaagcagatctatgacctgtccatggagaaccagaaggtgaagaaggacctgctggaggcccagaccaacatcgccttcctgcagagcgagctggatgccctgaagagtgactatgctgaccagagcctgaacacagagcgggacctggagatcatccgggcctacacagaggacaggaacagcctggagcggcagatcgagatcctgcagacagccaacaggaagctgcatgacagcaatgatggcctgcggagcgccctggagaacagctacagcaagttcaacagaagcctgcacatcaacaacatcagccctggcaacaccatcagccgcagcagccccaagttcatcggccacagcccccagcccctgggctatgacaggagcagccgcagcagctatgtggatgaggactgtgacagcctggccctgtgtgaccccctgcagaggaccaactgtgaggtggacagcctgcctgagagctgctttgacagcggcctgagcaccctgcgggaccccaatgaatatgattctgaggtggagtacaagcaccagaggggcttccagaggagccatggagtgcaggagagctttggaggagatgccagtgacacagatgtgcctgacatcagagatgaggagaccttcggcctggaggatgtggcctctgtgctggactggaagccccagggctctgtgtctgagggcagcatcgtgagcagcagcaggaagcccatcagcgccctgagcccccagacagacctggtggatgacaatgccaagagcttcagcagccagaaggcctacaagatcgtgctggccggagatgctgctgtgggcaagagcagcttcctgatgaggctgtgcaagaatgagttccgggagaacatcagcgccaccctgggcgtggacttccagatgaagaccctcatcgtggatggagagaggacagtgctgcagctgtgggacacagctggccaggagcgcttccgcagcatcgccaagagctacttcaggaaggcagatggagtgctgctgctgtatgatgtgacctgtgagaagagcttcctgaacatccgggagtgggtggacatgattgaagatgctgcccacgagaccgtgcccatcatgctggtgggcaacaaggctgacatccgggacacagctgccacagagggccagaagtgtgtgcccggccactttggagagaagctggccatgacctacggggccctcttctgtgagaccagcgccaaggatggcagcaacatcgtggaggccgtgctgcacctggcccgggaggtgaagaagaggacagacaaggatgacagccgcagcatcaccaacctgaccggcaccaacagcaagaagagcccccagatgaagaactgctgcaatggatag

SEQ ID NO: 20045 - DNA, 4125 bp, synthetic construct
  source 1..4125: mol_type = other DNA; note = Synthetic coding sequence
atggaggagaatgaaagccagaagtgtgagccctgcctgccctacagcgctgaccggcggcagatgcaggagcagggcaaaggaaacctgcacgtgaccagcccagaagatgctgaatgtagaaggaccaaggagcggctgagcaatggaaacagccggggctctgtgtccaagagcagcaggaacatccccaggaggcacaccctgggcggccccaggagcagcaaggagatcctgggcatgcagaccagcgagatggacaggaagcgggaggccttcctggagcacctgaagcagaagtacccccaccacgccagcgccatcatgggccaccaggagcggctgcgggaccagaccaggagccccaagctgagccacagcccccagccccccagcctgggggaccctgtggagcacctgtctgagaccagcgctgacagcctggaggccatgtctgaaggagatgcccccacccccttcagccggggcagcaggacccgggccagcctgcctgtggtgcgcagcaccaaccagaccaaggagaggagcctgggcgtgctgtacctgcagtatggagatgagaccaagcagctgaggatgcccaatgagatcaccagcgctgacaccatccgggccctgtttgtgtctgccttcccccagcagctgaccatgaagatgctggagagccccagcgtggccatctacatcaaggatgagagcagaaatgtgtactatgagctgaatgatgtgaggaacatccaggacaggagcctgctgaaggtgtacaacaaggaccctgcccacgccttcaaccacacccccaagaccatgaatggagacatgaggatgcagcgggagctggtgtatgcccggggagatggccctggggccccccggcccggcagcacagcccaccccccccacgccatccccaacagcccccccagcacccctgtgccccacagcatgccacccagccccagccgcatcccctacggcggcaccaggtccatggtggtgcctggaaatgccaccatcccccgggaccgcatcagcagcctgcctgtgtcccggcccatcagccccagccccagcgccatcctggagaggagagatgtgaagccagatgaggacatgtctgggaagaacatcgccatgtacagaaatgaaggcttctacgccgacccctacctgtaccacgagggccgcatgagcatcgccagcagccacggcggccaccccctggatgtgcctgaccacatcatcgcctaccacaggacagccatccgcagcgccagcgcctactgcaaccccagcatgcaggccgagatgcacatggagcagagcctgtaccggcagaagagcaggaagtacccagacagccacctgcccaccctgggcagcaagaccccaccagccagcccccaccgggtgtctgacctgaggatgattgacatgcacgcccactacaatgcccacggccccccccacaccatgcagcctgaccgggccagccccagccggcaggccttcaagaaggagcccggcaccctggtgtacatcgagaagcccaggtctgctgctggcctgagcagcctggtggacctgggcccccccctgatggagaagcaggtgtttgcctacagcacagccaccatccccaaggaccgggagaccagcgagaagatgatgaagaccacagccaacagaaaccacacagattctgctggcaccccccacgtgtctgggggcaagatgctgagcgccctggagagcacagtgccccccagccagcccccacctgtgggcaccagcgccatccacatgagcctgctggagatgagaagatctgtggccgagctgcggctgcagctgcagcagatgaggcagctgcagctgcagaaccaggagctgctgcgggccatgatgaagaaggccgagctggagatcagcggcaaggtgatggagaccatgaagaggctggaggaccctgtgcagaggcagagggtgctggtggagcaggagcggcagaagtacctgcacgaggaggagaagatcgtgaagaagctgtgtgagctggaggactttgtggaggacctgaagaaggacagcacagctgccagccggctggtgaccctgaaggatgtggaggatggagccttcctgctgcggcaggtgggggaggccgtggccaccctgaagggggagttccccaccctgcagaacaagatgagggccatcctgcgcatcgaggtggaggccgtgcgcttcctgaaggaggagccccacaagctggacagcctgctgaagagggtgcgctccatgacagatgtgctgaccatgctgcggagacatgtgacagatggcctgctgaagggcacagatgctgcccaggccgcccagtacatggccatggagaaggccacagctgctgaggtgctgaagagccaggaggaggccgcccacaccagcggccagcccttccacagcactggagcccctggagatgccaagtctgaggtggtgcccctgagcggcatgatggtgagacatgcccagagcagccctgtggtgatccagcccagccagcacagcgtggccctgctgaacccagcccagaacctgccccacgtggccagcagccctgctgtgccccaggaggccaccagcaccctgcagatgagccaggccccccagagcccccagatccccatgaatggcagcgccatgcagagcctcttcatcgaggagatccacagcgtgtctgccaagaacagagctgtgtccattgagaaggccgagaagaagtgggaggagaagaggcagaacctggaccactacaacgggaaggagtttgagaagctgctggaggaggcccaggccaacatcatgaagagcatccccaacctggagatgcccccagccaccggccccctgcccagaggagatgcccctgtggacaaggtggagctgagtgacagccccaacagcgagcaggacctggagaagctgggcggcaagagccccccacctcctcctcctcctccaagaagaagctacctgcccggcagcggcctgaccaccaccaggtctggagatgtggtgtacacaggcaggaaagaaaacatcacagccaaggccagcagtgaagatgctggccccagcccccagacccgggccaccaagtacccagctgaggagcccgccagcgcctggacccccagccccccacctgtgaccaccagcagcagcaaggatgaggaggaggaggaggaggagggggacaagatcatggccgagctgcaggccttccagaagtgcagcttcatggatgtgaacagcaacagccacgccgagcccagcagagctgacagccacgtgaaggacaccaggtctggggccaccgtgccccccaaggagaagaagaacctggagttcttccatgaagatgtgaggaagagtgatgtggagtatgaaaatggcccccagatggagttccagaagggcagcagcggggccccccagaccagcaggatgcctgtgcccatgtctgccaagaacagacctggcaccctggacaagccaggcaagcagagcaagctgcaggacccccggcagtaccggcaggccaatggaagtgccaagaagtctggaggagacttcaagcccaccagccccagcctgcctgccagcaagatcccagccctgagccccagcagcggcaagagcagcagcctgcccagcagcagcggggacagcagcaacctgcccaaccccccagccaccaagcccagcatcgccagcaaccccctgagcccccagacaggccccccagcccacagcgccagcctcatccccagcgtgtccaatggcagcctgaagttccagagcctgacccacacaggcaagggccaccacctgtccttcagcccccagagccagaatggccgggcccccccacccctgtccttcagcagcagcccccccagccctgccagctctgtgtccctgaaccagggcgccaagggcaccaggaccatccacacccccagcctgaccagctacaaggcccagaatggcagcagcagcaaggccacccccagcacagccaaggagaccagctag

SEQ ID NO: 20046 - DNA, 5832 bp, synthetic construct
  source 1..5832: mol_type = other DNA; note = Synthetic coding sequence
atggaggagaatgaaagccagaagtgtgagccctgcctgccctacagcgctgaccggcggcagatgcaggagcagggcaaaggaaacctgcacgtgaccagcccagaagatgctgaatgtagaaggaccaaggagcggctgagcaatggaaacagccggggctctgtgtccaagagcagcaggaacatccccaggaggcacaccctgggcggccccaggagcagcaaggagatcctgggcatgcagaccagcgagatggacaggaagcgggaggccttcctggagcacctgaagcagaagtacccccaccacgccagcgccatcatgggccaccaggagcggctgcgggaccagaccaggagccccaagctgagccacagcccccagccccccagcctgggggaccctgtggagcacctgtctgagaccagcgctgacagcctggaggccatgtctgaaggagatgcccccacccccttcagccggggcagcaggacccgggccagcctgcctgtggtgcgcagcaccaaccagaccaaggagaggagcctgggcgtgctgtacctgcagtatggagatgagaccaagcagctgaggatgcccaatgagatcaccagcgctgacaccatccgggccctgtttgtgtctgccttcccccagcagctgaccatgaagatgctggagagccccagcgtggccatctacatcaaggatgagagcagaaatgtgtactatgagctgaatgatgtgaggaacatccaggacaggagcctgctgaaggtgtacaacaaggaccctgcccacgccttcaaccacacccccaagaccatgaatggagacatgaggatgcagcgggagctggtgtatgcccggggagatggccctggggccccccggcccggcagcacagcccaccccccccacgccatccccaacagcccccccagcacccctgtgccccacagcatgccacccagccccagccgcatcccctacggcggcaccaggtccatggtggtgcctggaaatgccaccatcccccgggaccgcatcagcagcctgcctgtgtcccggcccatcagccccagccccagcgccatcctggagaggagagatgtgaagccagatgaggacatgtctgggaagaacatcgccatgtacagaaatgaaggcttctacgccgacccctacctgtaccacgagggccgcatgagcatcgccagcagccacggcggccaccccctggatgtgcctgaccacatcatcgcctaccacaggacagccatccgcagcgccagcgcctactgcaaccccagcatgcaggccgagatgcacatggagcagagcctgtaccggcagaagagcaggaagtacccagacagccacctgcccaccctgggcagcaagaccccaccagccagcccccaccgggtgtctgacctgaggatgattgacatgcacgcccactacaatgcccacggccccccccacaccatgcagcctgaccgggccagccccagccggcaggccttcaagaaggagcccggcaccctggtgtacatcgagaagcccaggtctgctgctggcctgagcagcctggtggacctgggcccccccctgatggagaagcaggtgtttgcctacagcacagccaccatccccaaggaccgggagacccgggagaggatgcaggccatggagaagcagatcgccagcctgaccggcctggtgcagagcgccctcttcaagggccccatcaccagctacagcaaggatgccagcagcgagaagatgatgaagaccacagccaacagaaaccacacagacagcgctggcacccctcatgtgtctgggggcaagatgctgagcgccctggagagcacagtgccccccagccagcccccacctgtgggcaccagcgccatccacatgagcctgctggagatgagaagatctgtggccgagctgcggctgcagctgcagcagatgaggcagctgcagctgcagaaccaggagctgctgcgggccatgatgaagaaggccgagctggagatcagcggcaaggtgatggagaccatgaagaggctggaggaccctgtgcagaggcagagggtgctggtggagcaggagcggcagaagtacctgcacgaggaggagaagatcgtgaagaagctgtgtgagctggaggactttgtggaggacctgaagaaggacagcacagctgccagccggctggtgaccctgaaggatgtggaggatggagccttcctgctgcggcaggtgggggaggccgtggccaccctgaagggggagttccccaccctgcagaacaagatgagggccatcctgagaattgaggtggaggccgtgcgcttcctgaaggaggagccccacaagctggacagcctgctgaagagggtgcgctccatgacagatgtgctgaccatgctgcggcggcacgtgacagatggcctgctgaagggcacagatgctgcccaggccgcccagtacatggccatggagaaggccacagctgctgaggtgctgaagagccaggaggaggccgcccacaccagcggccagcccttccacagcactggagcccctggagatgccaagtctgaggtggtgcccctgagcggcatgatggtgagacatgcccagagcagccctgtggtgatccagcccagccagcacagcgtggccctgctgaacccagcccagaacctgccccacgtggccagcagccctgctgtgccccaggaggccaccagcaccctgcagatgagccaggccccccagagcccccagatccccatgaatggaagtgccatgcagagcctcttcatcgaggagatccacagcgtgtctgccaagaacagagctgtgtccattgagaaggccgagaagaagtgggaggagaagaggcagaacctggaccactacaacgggaaggagtttgagaagctgctggaggaggcccaggccaacatcatgaagagcatccccaacctggagatgcccccagccaccggccccctgcccagaggagatgcccctgtggacaaggtggagctgtctgaggacagccccaacagcgagcaggacctggagaagctgggcggcaagagccccccacctcctcctcctcctccaagaagaagctacctgcccggcagcggcctgaccaccaccaggtctggagatgtggtgtacacaggcaggaaagaaaacatcacagccaaggccagcagtgaagatgctggccccagcccccagacccgggccaccaagtacccagctgaggagcccgccagcgcctggacccccagccccccacctgtgaccaccagcagcagcaaggatgaggaggaggaggaggaggagggggacaagatcatggccgagctgcaggccttccagaagtgcagcttcatggatgtgaacagcaacagccacgccgagcccagcagagctgacagccacgtgaaggacaccaggtctggggccaccgtgccccccaaggagaagaagaacctggagttcttccatgaagatgtgaggaagagtgatgtggagtatgaaaatggcccccagatggagttccagaaggtgaccactggagctgtgcggcccagcgacccccccaagtgggagcggggcatggagaacagcatcagtgatgccagcaggaccagcgagtacaagacagagatcatcatgaaggaaaattccatcagcaacatgagcctgctgcgggacagcaggaactacagccaggagaccgtgcccaaggccagctttggcttcagcggcatcagccccctggaggatgagatcaacaagggcagcaagatcagcggcctgcagtacagcatcccagacacagagaaccagaccctgaactacggcaagaccaaggagatggagaagcagaacacagacaagtgccacgtgagcagccacacccggctgacagagagctctgtgcatgacttcaagacagaggaccaggaggtgatcaccacagactttggccaggtggtgctgcggcccaaggaggcccggcatgccaacgtgaaccccaatgaagatggagagagcagcagcagcagccccacagaggagaatgctgccacagacaacatcgccttcatgatcacagagaccaccgtgcaggtgctgagcagtggagaggtgcatgacatcgtgtcccagaagggggaggacatccagacagtgaacattgatgccaggaaggagatgaccccccggcaggagggcacagacaatgaagatcctgtggtgtgcctggacaagaagcctgtgatcatcatctttgatgagcccatggacatccgcagcgcctacaagaggctgagcaccatctttgaggagtgtgatgaggagctggagaggatgatgatggaggagaagattgaggaggaggaggaggaggagaatggagacagcgtggtgcagaacaacaacaccagccagatgagccacaagaaggtggcccctggcaacctgaggacaggccagcaggtggagaccaagagccagccccacagcctggccacagagaccagaaatcctgggggccaggagatgaacagaacagagctgaacaagttcagccacgtggacagccccaacagtgaatgtaaaggagaagatgccacagatgaccagtttgagagccccaagaagaagttcaagttcaagttccccaagaagcagctggccgccctgacccaggccatcagaacaggcaccaagacaggcaagaagaccctgcaggtggtggtgtatgaggaggaggaggaggatggcaccctgaagcagcacaaggaggccaagagatttgaaattgcccggagccagcctgaggacaccccagaaaatacagtgcggcggcaggagcagcccagcattgagagcaccagccccatcagcaggacagatgagatcaggaagaacacctaccgcaccctggacagcctggagcagaccatcaagcagctggagaacaccatcagcgagatgagccccaaggccctggtggacaccagctgcagcagcaacagagattctgtggccagcagcagccacatcgcccaggaggccagcccccggcccctgctggtgcctgatgagggccccacagccctggagccccccaccagcatccccagcgccagcaggaagggcagcagcggggccccccagaccagcaggatgcctgtgcccatgtctgccaagaaccggcccggcaccctggacaagccaggcaagcagagcaagctgcaggacccccggcagtaccggcaggccaacggcagcgccaagaagagcggcggggacttcaagcccaccagccccagcctgcctgccagcaagatcccagccctgagccccagcagcggcaagagcagcagcctgcccagcagcagcggggacagcagcaacctgcccaaccccccagccaccaagcccagcatcgccagcaaccccctgagcccccagacaggccccccagcccacagcgccagcctcatccccagcgtgtccaatggcagcctgaagttccagagcctgacccacacaggcaagggccaccacctgtccttcagcccccagagccagaatggccgggcccccccacccctgtccttcagcagcagcccccccagccctgccagctctgtgtccctgaaccagggcgccaagggcaccaggaccatccacacccccagcctgaccagctacaaggcccagaatggcagcagcagcaaggccacccccagcacagccaaggagaccagctag

SEQ ID NO: 20047 - DNA, 3795 bp, synthetic construct
  source 1..3795: mol_type = other DNA; note = Synthetic coding sequence
atgcagaccagcgagatggacaggaagcgggaggccttcctggagcacctgaagcagaagtacccccaccacgccagcgccatcatgggccaccaggagcggctgcgggaccagaccaggagccccaagctgagccacagcccccagccccccagcctgggggaccctgtggagcacctgtctgagaccagcgctgacagcctggaggccatgtctgaaggagatgcccccacccccttcagccggggcagcaggacccgggccagcctgcctgtggtgcgcagcaccaaccagaccaaggagaggagcctgggcgtgctgtacctgcagtatggagatgagaccaagcagctgaggatgcccaatgagatcaccagcgctgacaccatccgggccctgtttgtgtctgccttcccccagcagctgaccatgaagatgctggagagccccagcgtggccatctacatcaaggatgagagcagaaatgtgtactatgagctgaatgatgtgaggaacatccaggacaggagcctgctgaaggtgtacaacaaggaccctgcccacgccttcaaccacacccccaagaccatgaatggagacatgaggatgcagcgggagctggtgtatgcccggggagatggccctggggccccccggcccggcagcacagcccaccccccccacgccatccccaacagcccccccagcacccctgtgccccacagcatgccacccagccccagccgcatcccctacggcggcaccaggtccatggtggtgcctggaaatgccaccatcccccgggaccgcatcagcagcctgcctgtgtcccggcccatcagccccagccccagcgccatcctggagaggagagatgtgaagccagatgaggacatgtctgggaagaacatcgccatgtacagaaatgaaggcttctacgccgacccctacctgtaccacgagggccgcatgagcatcgccagcagccacggcggccaccccctggatgtgcctgaccacatcatcgcctaccacaggacagccatccgcagcgccagcgcctactgcaaccccagcatgcaggccgagatgcacatggagcagagcctgtaccggcagaagagcaggaagtacccagacagccacctgcccaccctgggcagcaagaccccaccagccagcccccaccgggtgtctgacctgaggatgattgacatgcacgcccactacaatgcccacggccccccccacaccatgcagcctgaccgggccagccccagccggcaggccttcaagaaggagcccggcaccctggtgtacatcgagaagcccaggtctgctgctggcctgagcagcctggtggacctgggcccccccctgatggagaagcaggtgtttgcctacagcacagccaccatccccaaggaccgggagacccgggagaggatgcaggccatggagaagcagatcgccagcctgaccggcctggtgcagagcgccctcttcaagggccccatcaccagctacagcaaggatgccagcagcgagaagatgatgaagaccacagccaacagaaaccacacagacagcgctggcacccctcatgtgtctgggggcaagatgctgagcgccctggagagcacagtgccccccagccagcccccacctgtgggcaccagcgccatccacatgagcctgctggagatgagaagatctgtggccgagctgcggctgcagctgcagcagatgaggcagctgcagctgcagaaccaggagctgctgcgggccatgatgaagaaggccgagctggagatcagcggcaaggtgatggagaccatgaagaggctggaggaccctgtgcagaggcagagggtgctggtggagcaggagcggcagaagtacctgcacgaggaggagaagatcgtgaagaagctgtgtgagctggaggactttgtggaggacctgaagaaggacagcacagctgccagccggctggtgaccctgaaggatgtggaggatggagccttcctgctgcggcaggtgggggaggccgtggccaccctgaagggggagttccccaccctgcagaacaagatgagggccatcctgagaattgaggtggaggccgtgcgcttcctgaaggaggagccccacaagctggacagcctgctgaagagggtgcgctccatgacagatgtgctgaccatgctgcggcggcacgtgacagatggcctgctgaagggcacagatgctgcccaggccgcccagtacatggccatggagaaggccacagctgctgaggtgctgaagagccaggaggaggccgcccacaccagcggccagcccttccacagcactggagcccctggagatgccaagtctgaggtggtgcccctgagcggcatgatggtgagacatgcccagagcagccctgtggtgatccagcccagccagcacagcgtggccctgctgaacccagcccagaacctgccccacgtggccagcagccctgctgtgccccaggaggccaccagcaccctgcagatgagccaggccccccagagcccccagatccccatgaatggaagtgccatgcagagcctcttcatcgaggagatccacagcgtgtctgccaagaacagagctgtgtccattgagaaggccgagaagaagtgggaggagaagaggcagaacctggaccactacaacgggaaggagtttgagaagctgctggaggaggcccaggccaacatcatgaagagcatccccaacctggagatgcccccagccaccggccccctgcccagaggagatgcccctgtggacaaggtggagctgtctgaggacagccccaacagcgagcaggacctggagaagctgggcggcaagagccccccacctcctcctcctcctccaagaagaagctacctgcccggcagcggcctgaccaccaccaggtctggagatgtggtgtacacaggcaggaaagaaaacatcacagccaaggccagcagtgaagatgctggccccagcccccagacccgggccaccaagtacccagctgaggagcccgccagcgcctggacccccagccccccacctgtgaccaccagcagcagcaaggatgaggaggaggaggaggaggagggggacaagatcatggccgagctgcagggcagcagcggggccccccagaccagcaggatgcctgtgcccatgtctgccaagaacagacctggcaccctggacaagccaggcaagcagagcaagctgcaggacccccggcagtaccggcaggccaatggaagtgccaagaagtctggaggagacttcaagcccaccagccccagcctgcctgccagcaagatcccagccctgagccccagcagcggcaagagcagcagcctgcccagcagcagcggggacagcagcaacctgcccaaccccccagccaccaagcccagcatcgccagcaaccccctgagcccccagacaggccccccagcccacagcgccagcctcatccccagcgtgtccaatggcagcctgaagttccagagcctgacccacacaggcaagggccaccacctgtccttcagcccccagagccagaatggccgggcccccccacccctgtccttcagcagcagcccccccagccctgccagctctgtgtccctgaaccagggcgccaagggcaccaggaccatccacacccccagcctgaccagctacaaggcccagaatggcagcagcagcaaggccacccccagcacagccaaggagaccagctag

SEQ ID NO: 20048 - DNA, 531 bp, synthetic construct
  source 1..531: mol_type = other DNA; note = Synthetic coding sequence
atgggctgctgcggctgcagcggcggctgcggcagcggctgcggcggctgcggcagcggcagcggcggctgcggcagcggctgcggcggctgcggcagcagctgctgcgtgcccatctgctgctgcaagcctgtgtgctgctgcgtgcctgcctgcagctgcagcagctgtggcagctgtggcggcagcaagggcggctgcggcagctgtggcagcagcaagggcggctgcggcagctgtggctgcagccagagcaactgctgcaagccctgctgcagcagcagcggctgcggcagcttctgctgccagagcagctgcagcaagccctgctgctgccagagcagctgctgccagagcagctgctgcaagccctgctgctgccagagcagctgctgccagagcagctgcttcaagccctgctgctgccagagcagctgctgcgtgcctgtgtgctgccagagcagctgctgcaagccctgctgcagccagagcagctgctgcgtgcccatctgctgccagtacaagatctag

SEQ ID NO: 20049 - DNA, 513 bp, synthetic construct
  source 1..513: mol_type = other DNA; note = Synthetic coding sequence
atgggctgctgcggctgcagcggcggctgcggcagcggctgcggcggctgcggcagcggctgcggcggctgcggcagcggctgcggcggctacggcagcggctgcggcggctgcggcagcagctgctgcgtgcctgtgtgctgctgcaagcctgtgtgctgctgcgtgcctgcctgcagctgcagcagctgtggcagctgtggcggcagcaaaggagactgtggctgcggcagctgtggcggcagcaaaggaggctgcggcagctgtggctgcagccagtgcaactgctgcaagccctgctgctgcagcagcggctgcggcagctgctgccagagcagctgctgcaacccctgctgctgccagagcagctgctgcgtgcctgtgtgctgccagagcagctgctgcaagccctgctgctgccagagcagctgctgcgtgcccagcagctgctgccgcagctgctgcagcaagagcagctgctgcgtgcccatctgctgccagtacaagatctag

SEQ ID NO: 20050 - DNA, 2169 bp, synthetic construct
  source 1..2169: mol_type = other DNA; note = Synthetic coding sequence
atgattgacagcgtgaagctgcggcgggacagcgctgctgacttcttcagccactatgagtacctgtgtgccctgcagaacagcgtgcccctgcctgctgtgcgggcctgcctgcgggagggcgtgctggacttcaatgctgaccggctgcggggcgtggactgggcccccctgctgagcaccctgaagatcaacaaggacctgcccctggtgtccatcaagagcttcttccagccctggctgggggacaccggcagtgacatgaacaagttctgccgcagccgggtgcctgccatccgctacaaggatgtgaccttccagctgtgcaaggccctgaagggctgcctgagcatcagctctgtgctgaagaacctggagctgaatggcctcatcctgcgggagcgggacctgaccatcctggccaagggcctgaacaagagcgccagcctggtgcacctgagcctggccaactgccccatcggagatggcggcctggagatcatctgccagggcatcaagagcagcatcaccctgaagacagtgaacttcaccggctgcaacctgacctggcagggcgctgaccacatggccaagatcctgaagtaccagaccatgagaagacatgaggagacctgggccgagagcctgcgctacagaagaccagacctggactgcatggccggcctgcggcgcatcaccctgaactgcaacaccctcatcggggacctgggcgcctgtgcctttgctgacagcctgtctgaggacctgtggctgcgggccctggacctgcagcagtgtggcctgaccaatgaaggagccaaggccctgctggaggccctggagaccaacaccaccctggtggtgctggacatcaggaagaaccccctgattgaccacagcatgatgaaggccgtcatcaagaaggtgctgcagaatggccgcagcgccaagtctgagtaccagtggatcaccagccccagcgtgaaggagcccagcaagacagccaagcagaagaggaggaccatcatcctgggcagcggccacaagggcaaggccaccatccgcatcgtgggcctggccaccaagaagcctgtgagcagcggcaggaagcacagcctgggcaaggagtactatgccccagcccccctgcccccaggagtgtctggcttcctgccctggaggacagctgagcgggccaagaggcaccggggcttccccctcatcaagacccgggacatctgcaaccagctgcagcagcccggcttccctgtgacagtgacagtggagagccccagcagcagcgaggtggaggaggtggatgacagcagcgagagcgtgcatgaggtgcctgagaagaccagcattgagcaggaggccctgcaggagaagctggaggagtgcctgaagcagctgaaggaggagagggtcatccggctgaaggtggacaagagggtgtctgagctggagcatgaaaatgcccagctgaggaacatcaacttcagcctgtctgaggccctgcacgcccagagcctgaccaacatgatcctggatgatgagggcgtgctgggcagcattgagaacagcttccagaagttccacgccttcctggacctgctgaaggatgctggcctgggccagctggccaccatggccggcatcgaccagagcgacttccagctgctgggccacccccagatgaccagcacagtgagcaacccccccaaggaggagaagaaggccctggaggatgagaagccagagcccaagcagaatgccctgggccagatgcagaacatccaggtgtccatctgcatgcagagcgcctacaatgaaggcaccctgatgaagttccagaagatcactggagatgcccgcatccccctgcccctggacagcttccctgtgcctgtgtccaccccagagggcctgggcaccagcagcaacaacctgggcgtgcctgccacagagcagaggcaggagagctttgagggcttcatcgccaggatgtgcagccccagcccagatgccaccagcggcaccggcagccagaggaaggaggaggagctgagcaggaacagccgcagcagcagcgagaagaagaccaagacaggagagtacaccaagaagcacagcgacaagcagcaccctgggaaggacctgcacagctag

SEQ ID NO: 20051 - DNA, 1122 bp, synthetic construct
  source 1..1122: mol_type = other DNA; note = Synthetic coding sequence
atggccctgaatgtggcccctgtgcgggacaccaagtggctgaccctggaggtgtgccggcagttccagaggggcacctgcagcagaagtgatgaggagtgcaagtttgcccacccccccaagagctgccaggtggagaatggccgggtgattgcctgctttgacagcctgaagggccgctgcagccgggagaactgcaagtacctgcacccccccacccacctgaagacccagctggagatcaatggaagaaacaacctgatccagcagaagacagctgctgccatgctggcccagcagatgcagttcatgtttcctggcacccccctgcaccctgtgcccaccttccctgtgggccctgccatcggcaccaacacagccatcagctttgccccctacctggcccctgtgaccccaggagtgggcctggtgcccacagagatcctgcccaccacccctgtgattgtgcccggcagcccccctgtgacagtgcccggcagcacagccacccagaagctgctgaggacagacaagctggaggtgtgccgggagttccagaggggcaactgtgcccggggggagacagactgccgctttgcccaccctgctgacagcaccatgattgacaccagtgacaacacagtgacagtgtgcatggactacatcaagggccgctgcatgagggagaagtgcaagtacttccaccccccagcccacctgcaggccaagatcaaggccgcccagcaccaggccaaccaggccgctgtggccgcccaggccgctgctgctgctgccaccgtgatggccttccccccaggggccctgcaccccctgcccaagaggcaggccctggagaagagcaatggcaccagcgctgtgttcaaccccagcgtgctgcactaccagcaggccctgaccagcgcccagctgcagcagcacgccgccttcatccccactggatctgtgctgtgcatgaccccagccaccagcattgacaacagcgagatcatcagcagaaatggcatggagtgccaggagagcgccctgcgcatcaccaagcactgctactgcacctactaccctgtgagcagcagcattgagctgccccagacagcctgctag

SEQ ID NO: 20052 - DNA, 321 bp, synthetic construct
  source 1..321: mol_type = other DNA; note = Synthetic coding sequence
atgacccagagcacagccaaggccatgaagaggcccctggaggccaccgtggacctggccttccccccaggggccctgcaccccctgcccaagaggcaggccctggagaagagcaatggcaccagcgctgtgttcaaccccagcgtgctgcactaccagcaggccctgaccagcgcccagctgcagcagcacgccgccttcatccccaccgtgcccatgatgcacagcgccaccagcgccaccgtgtctgctgccaccaccccagccacctctgtgccctttgctgccacagccacagccaaccagctggtgtacagctag

SEQ ID NO: 20053 - DNA, 915 bp, synthetic construct
  source 1..915: mol_type = other DNA; note = Synthetic coding sequence
atggccaagattgagaagaatgcccccaccatggagaagaagccagagctgttcaacatcatggaggtggatggagtgcccaccctcatcctgagcaaggagtggtgggagaaggtgtgcaacttccaggccaagccagatgacctgatcctggccacctaccccaagagcggcaccacctggatgcatgagatcctggacatgatcctgaatgatggagatgtggagaagtgcaagagggcccagaccctggacagacatgccttcctggagctgaagttcccccacaaggagaagccagacctggagtttgtgctggagatgagcagcccccagctgatcaagacccacctgcccagccacctgatcccccccagcatctggaaggagaactgcaagatcgtgtatgtggccaggaaccccaaggactgcctggtgtcctactaccacttccacaggatggccagcttcatgccagacccccagaacctggaggagttctatgagaagttcatgtctgggaaggtggtgggcggctcctggtttgaccacgtgaagggctggtgggccgccaaggacatgcaccgcatcctgtacctgttctatgaggacatcaagaagaaccccaagcatgagatccacaaggtgctggagttcctggagaagacctggagcggagatgtgatcaacaagatcgtgcaccacaccagctttgatgtgatgaaggacaaccccatggccaaccacacagctgtgcctgcccacatcttcaaccacagcatcagcaagttcatgaggaagggcatgcctggggactggaagaaccacttcaccgtggccctgaatgaaaattttgacaagcactatgagaagaagatggccggcagcaccctgaacttctgcctggagatctag

SEQ ID NO: 20054 - DNA, 1188 bp, synthetic construct
  source 1..1188: mol_type = other DNA; note = Synthetic coding sequence
atggccagcgctgcctctgtgaccagcctggctgatgaggtgaactgccccatctgccagggcaccctgcgggagcctgtgaccatcgactgtggccacaacttctgccgggcctgcctgacccgctactgtgagatccctggccctgacctggaggagagccccacctgccccctgtgcaaggagcccttccggcccggcagcttccggcccaactggcagctggccaacgtggtggagaacatcgagcggctgcagctggtgtccaccctgggcctgggggaggaggatgtgtgccaggagcacggggagaagatctacttcttctgtgaagatgatgagatgcagctgtgtgtggtgtgccgggaggccggggagcacgccacccacaccatgaggttcctggaggatgctgctgccccctaccgggagcagatccacaagtgcctgaagtgcctgaggaaggagcgggaggagatccaggagatccagagccgggagaacaagaggatgcaggtgctgctgacccaggtgtccaccaagaggcagcaggtgatcagcgagtttgcccacctgaggaagttcctggaggagcagcagagcatcctgctggcccagctggagagccaggatggagacatcctgcggcagagagatgaatttgacctgctggtggccggggagatctgccgcttcagcgccctgattgaggagctggaggagaagaatgaaagacctgcccgggagctgctgacagacatccgcagcaccctcatccgctgtgagaccaggaaatgtaggaagcctgtggccgtgtccccagagctgggccagaggatccgggacttcccccagcaggccctgcccctgcagcgggagatgaagatgttcctggagaagctgtgctttgagctggactatgagcccgcccacatcagcctggacccccagaccagccaccccaagctgctgctgtctgaggaccaccagagggcccagttctcctacaagtggcagaacagcccagacaacccccagagatttgaccgggccacctgtgtgctggcccacacaggcatcactggaggccgccacacctgggtgtggatggcccgggtgcctggggacagcggctgctgccagttctgcagccccccatctgtgctgggcacagaggtggccgcctag

SEQ ID NO: 20055 - DNA, 1446 bp, synthetic construct
  source 1..1446: mol_type = other DNA; note = Synthetic coding sequence
atggccagcgctgcctctgtgaccagcctggctgatgaggtgaactgccccatctgccagggcaccctgcgggagcctgtgaccatcgactgtggccacaacttctgccgggcctgcctgacccgctactgtgagatccctggccctgacctggaggagagccccacctgccccctgtgcaaggagcccttccggcccggcagcttccggcccaactggcagctggccaacgtggtggagaacatcgagcggctgcagctggtgtccaccctgggcctgggggaggaggatgtgtgccaggagcacggggagaagatctacttcttctgtgaagatgatgagatgcagctgtgtgtggtgtgccgggaggccggggagcacgccacccacaccatgaggttcctggaggatgctgctgccccctaccgggagcagatccacaagtgcctgaagtgcctgaggaaggagcgggaggagatccaggagatccagagccgggagaacaagaggatgcaggtgctgctgacccaggtgtccaccaagaggcagcaggtgatcagcgagtttgcccacctgaggaagttcctggaggagcagcagagcatcctgctggcccagctggagagccaggatggagacatcctgcggcagagagatgaatttgacctgctggtggccggggagatctgccgcttcagcgccctgattgaggagctggaggagaagaatgaaagacctgcccgggagctgctgacagacatccgcagcaccctcatccgctgtgagaccaggaaatgtaggaagcctgtggccgtgtccccagagctgggccagaggatccgggacttcccccagcaggccctgcccctgcagcgggagatgaagatgttcctggagaacctgcccaaccacctggtgatccccacagcccacatcagcctggacccccagaccagccaccccaagctgctgctgtctgaggaccaccagagggcccagttctcctacaagtggcagaacagcccagacaacccccagagatttgaccgggccacctgtgtgctggcccacacaggcatcactggaggccgccacacctgggtggtgtccattgacctggcccatggaggcagctgcaccgtgggcgtggtgtctgaagatgtgcagaggaaaggagagctgcggctgcggcctgaggagggcgtgtgggccgtgcggctggcctggggctttgtgtctgccctgggcagcttccccacccggctgaccctgaaggagcagccccggcaggtgcgggtgtccctggactatgaggtgggctgggtgaccttcaccaatgctgtgacccgggagcccatctacaccttcaccgccagcttcaccaggaaggtgatccccttcttcggcctgtggggccggggcagcagcttcagcctgagcagctag

SEQ ID NO: 20056 - DNA, 2604 bp, synthetic construct; identical to SEQ ID NO: 19351
  source 1..2604: mol_type = other DNA; note = Synthetic coding sequence

SEQ ID NO: 20057 - DNA, 279 bp, synthetic construct
  source 1..279: mol_type = other DNA; note = Synthetic coding sequence
atggccaccccacccaagagaagagctgtggaggccactggagagaaggtgctgcgctatgagaccttcatcagtgatgtgctgcagagggacctgaggaaggtgctggaccaccgggacaaggtgtatgagcagctggccaagtacctgcagctgagaaatgtcatcgagcggctgcaggtgaagaccatgggcctgggcaccatcttcctggtgtgtgtgggcaagggcggcaagtgggaggagcggctgcagacccagccctgccacctgacctag

SEQ ID NO: 20058 - DNA, 2532 bp, synthetic construct
  source 1..2532: mol_type = other DNA; note = Synthetic coding sequence
atggctgtggaggacagcaccctgcaggtggtggtgcgggtgcggccccccaccccccgggagctggacagccagaggaggcctgtggtgcaggtggtggatgagcgggtgctggtgttcaaccctgaggagccagatggcggcttccctggcctgaagtggggcggcacccatgatggccccaagaagaagggcaaggacctgacctttgtgtttgacagagtgtttggagaggccgccacccagcaggatgtgttccagcacaccacccacagcgtgctggacagcttcctgcagggctacaactgcagcgtgtttgcctacggggccactggagctgggaagacccacaccatgctgggccgggagggggaccccggcatcatgtacctgaccaccgtggagctgtaccgccgcctggaggcccggcagcaggagaagcactttgaggtgctgatctcctaccaggaggtgtacaatgagcagatccatgacctgctggagcccaagggccccctggccatcagagaagatcctgacaagggcgtggtggtgcagggcctgtccttccaccagcctgccagcgctgagcagctgctggagatcctgacccggggcaacagaaacagaacccagcaccccacagatgccaatgccaccagcagccgcagccacgccatcttccagatctttgtgaagcagcaggacagagtgcccggcctgacccaggccgtgcaggtggccaagatgagcctgattgacctggccggcagcgagcgggccagcagcacccacgccaagggggagcggctgcgggagggcgccaacatcaacagaagcctgctggccctgatcaacgtgctgaatgccctggctgatgccaagggcaggaagacccacgtgccctacagagacagcaagctgacccggctgctgaaggacagcctgggcggcaactgcaggacagtgatgattgctgccatcagccccagcagcctgacctatgaggacacctacaacaccctgaagtatgctgaccgggccaaggagatccggctgagcctgaagagcaatgtgaccagcctggactgccacatcagccagtatgccaccatctgccagcagctgcaggccgaggtggccgccctgaggaagaagctgcaggtgtatgagggcggcggccagcccccaccccaggacctgcccggcagccccaagagcggccccccacctgagcacctgcccagcagccccctgcccccccacccccccagccagccctgcaccccagagctgcctgctggcccccgggccctgcaggaggagagcctgggcatggaggcccaggtggagcgggccatggagggcaacagcagtgaccaggagcagagcccagaagatgaagatgagggccctgctgaggaggtgcccacccagatgcctgagcagaaccccacccacgccctgcctgagagcccccggctgaccctgcagcccaagcctgtggtgggccacttcagcgcccgggagctggatggagacaggagcaagcagctggccctgaaggtgctgtgtgtggcccagaggcagtacagcctgctgcaggccgccaacctgctgaccccagacatgatcacagaatttgagaccctgcagcagctggtgcaggaggagaagattgagcccggggctgaggccctgcggaccagcggcctggcccggggggcccccctggcccaggagctgtgcagcgagagcatccctgtgcccagccccctgtgcccagagcccccaggctacacaggccctgtgaccaggaccatggcccggcggctgagcggccccctgcacaccctgggcatccccccaggccccaactgcaccccagcccagggcagccgctggcccatggagaagaagagaagaagaccttctgccctggaggccgacagccccatggcccccaagaggggcaccaagaggcagaggcagagcttcctgccctgcctgcggcggggcagcctgcctgacacccagcccagccagggccccagcacccccaagggggagcgggccagcagcccctgccacagcccccgggtgtgcccagccaccgtcatcaagagccgggtgcccctgggccccagcgccatgcagaactgcagcacccccctggccctgcccacccgggacctgaatgccacctttgacctgtctgaggagccccccagcaagcccagcttccacgagtgcatcggctgggacaagatcccccaggagctgagccggctggaccagcccttcatcccccgggcccctgtgcccctcttcaccatgaagggccccaagcccaccagcagcctgcccggcaccagcgcctgcaagaagaagagggtggccagcagctctgtgagccacggccgcagcagaattgcccggctgcccagcagcaccctgaagaggcctggccccctgtacagccaggtgacaggcacccgggaccgggacagcctgggccacggcggccgctag

SEQ ID NO: 20059 - DNA, 561 bp, synthetic construct
  source 1..561: mol_type = other DNA; note = Synthetic coding sequence
atggagcccccccggggccccccagccaacggggctgagcccagcagagctgtgggcaccgtgaaggtgtacctgcccaacaagcagaggacagtggtgacagtgagagatggcatgtctgtgtatgacagcctggacaaggccctgaaggtgcggggcctgaaccaggactgctgcgtggtgtaccgcctcatcaagggcaggaagacagtgacagcctgggacacagccatcgcccccctggatggagaggagctgattgtggaggtgctggaggatgtgcccctgaccatgcacaactttgtgaggaagaccttcttcagcctggccttctgtgacttctgcctgaagttcctgttccacggcttccgctgccagacctgtggctacaagttccaccagcactgcagcagcaaggtgcccaccgtgtgtgtggacatgagcaccaaccggcagcagttctaccacagcgtgcaggacctgagcggcggcagccggcagcacgaggcccccagcaaccggcccctgaatgagctgctgaccccccagggccccaggtag

SEQ ID NO: 20060 - DNA, 1821 bp, synthetic construct
  source 1..1821: mol_type = other DNA; note = Synthetic coding sequence
atggagcccccccggggccccccagccaacggggctgagcccagcagagctgtgggcaccgtgaaggtgtacctgcccaacaagcagaggacagtggtgacagtgagagatggcatgtctgtgtatgacagcctggacaaggccctgaaggtgcggggcctgaaccaggactgctgcgtggtgtaccgcctcatcaagggcaggaagacagtgacagcctgggacacagccatcgcccccctggatggagaggagctgattgtggaggtgctggaggatgtgcccctgaccatgcacaactttgtgaggaagaccttcttcagcctggccttctgtgacttctgcctgaagttcctgttccacggcttccgctgccagacctgtggctacaagttccaccagcactgcagcagcaaggtgcccaccgtgtgtgtggacatgagcaccaaccggcagcagttctaccacagcgtgcaggacctgagcggcggcagccggcagcacgaggcccccagcaaccggcccctgaatgagctgctgaccccccagggccccagccccaggacccagcactgtgaccctgagcacttccccttccctgccccagccaatgcccccctgcagaggatccgcagcaccagcaccccaaatgtgcacatggtgtccaccacagcccccatggacagcaacctgatccagctgaccggccagagcttcagcacagatgctgctggcagccggggcggcagtgatggcaccccccggggcagccccagccctgcctctgtgagcagcggcaggaagagcccccacagcaagagccctgctgagcagcgggagaggaagagcctggctgatgacaagaagaaggtgaagaacctgggctacagagattctggctactactgggaggtgccccccagcgaggtgcagctgctgaagagaattggcaccggcagctttggaacagtgttccggggccgctggcatggagatgtggccgtgaaggtgctgaaggtgtcccagcccacagctgagcaggcccaggccttcaagaatgagatgcaggtgctgaggaagaccaggcatgtgaacatcctgctcttcatgggcttcatgacccggcccggctttgccatcatcacccagtggtgtgagggcagcagcctgtaccaccacctgcacgtggccgacaccaggtttgacatggtgcagctgattgatgtggcccggcagacagcccagggcatggactacctgcacgccaagaacatcatccaccgggacctgaagagcaacaacatcttcctgcacgagggcctgactgtgaagattggagactttggcctggccaccgtgaagacccgctggagcggggcccagcccctggagcagcccagcggctctgtgctgtggatggctgctgaggtgatccgcatgcaggaccccaacccctacagcttccagagtgatgtgtatgcctatggagtggtgctgtatgagctgatgacaggcagcctgccctacagccacatcggctgccgggaccagatcatcttcatggtgggccggggctacctgagcccagacctgagcaagatcagcagcaactgccccaaggccatgaggcggctgctgagtgactgcctgaagttccagcgggaggagcggcccctcttcccccagatcctggccaccatcgagctgctgcagaggagcctgcccaagattgaaagaagtgccagcgagcccagcctgcacaggacccaggctgatgagctgcctgcctgcctgctgtctgctgcccggctggtgccctag

SEQ ID NO: 20061 - DNA, 3036 bp, synthetic construct
  source 1..3036: mol_type = other DNA; note = Synthetic coding sequence
atggtgtccagtgacaggcctgtgtccctggaggatgaggtgagccacagcatgaaggagatgattggaggctgctgcgtgtgcagtgatgagcggggctgggccgagaaccccctggtgtactgtgatggccacggctgcagcgtggccgtgcaccaggcctgctacggcatcgtgcaggtgcccaccggcccctggttctgcaggaaatgtgagagccaggagagagctgcccgggtgcgctgtgagctgtgcccccacaaggatggagccctgaagaggacagacaatggaggctgggcccacgtggtgtgtgccctgtacatccctgaggtgcagtttgccaacgtgtccaccatggagcccatcgtgctgcagagcgtgccccatgaccgctacaacaagacctgctacatctgtgatgagcagggccgggagagcaaggccgccactggagcctgcatgacctgcaacaagcacggctgccggcaggccttccacgtgacctgtgcccagtttgctggcctgctgtgtgaggaggagggcaatggagctgacaacgtgcagtactgcggctactgcaagtaccacttcagcaagctgaagaagagcaagaggggcagcaacagaagctatgaccagagcctgagtgacagcagcagccacagccaggacaagcaccacgagaaggagaagaagaagtacaaggagaaggacaagcacaagcagaagcacaagaagcagcctgagcccagccctgccctggtgcccagcctgactgtgaccacagagaagacctacaccagcaccagcaacaacagcatcagcggcagcctgaagaggctggaggacaccacagcccgcttcaccaatgccaacttccaggaggtgtctgcccacaccagcagcggcaaggatgtgtctgagacccggggcagcgagggcaagggcaagaagagcagcgcccacagcagcggccagaggggcaggaagccaggcggcggcaggaaccctggcaccaccgtgtctgctgccagccccttcccccagggcagcttcagcggcaccccaggctctgtgaagagcagcagcggcagctctgtgcagagcccccaggacttcctgtccttcacagacagcgacctgagaaatgacagctacagccacagccagcagagcagcgccaccaaggatgtgcacaagggggagagcggcagccaggagggcggcgtgaacagcttcagcaccctcatcggcctgcccagcaccagcgctgtgaccagccagcccaagagctttgagaacagccctggggacctgggcaacagcagcctgcccacagctggctacaagagggcccagaccagcggcatcgaggaggagaccgtgaaggagaagaagaggaaaggaaacaagcagagcaagcacggccctggccggcccaagggcaacaagaaccaggagaatgtgagccacctgtctgtgtcctctgccagccccaccagctctgtggccagcgctgctggcagcatcaccagcagcagcctgcagaagagccccaccctgctgagaaatggcagcctgcagagcctgtctgtgggcagcagccctgtgggcagcgagatctccatgcagtacagacatgatggagcctgccccaccaccaccttcagcgagctgctgaatgccatccacaacggcatctacaacagcaatgatgtggccgtgtccttccccaacgtggtgtctggcagcggcagcagcacccctgtgagcagcagccacctgccccagcagagcagcggccacctgcagcaggtgggcgccctgagccccagcgctgtgtcctctgctgccccagctgtggccaccacccaggccaacaccctgagcggcagcagcctgagccaggcccccagccacatgtatggcaacagaagcaacagctccatggccgccctgattgcccagagcgagaacaaccagacagaccaggacctgggggacaacagcaggaacctggtgggccggggcagcagcccccggggcagcctgagccccaggagccctgtgagcagcctgcagatccgctatgaccagcccggcaacagcagcctggagaacctgccccctgtggccgccagcattgagcagctgctggagcggcagtggagcgagggccagcagttcctgctggagcagggcacccccagcgacatcctgggcatgctgaagagcctgcaccagctgcaggtggagaacagaaggctggaggagcagatcaagaacctgacagccaagaaggagcggctgcagctgctgaatgcccagctgtctgtgcccttccccaccatcacagccaaccccagccccagccaccagatccacaccttcagcgcccagacagcccccaccacagacagcctgaacagcagcaagagcccccacatcggcaacagcttcctgcctgacaacagcctgcctgtgctgaaccaggacctgaccagcagcggccagagcaccagcagcagcagcgccctgagcaccccacctcctgctggccagagccctgcccagcagggcagcggcgtgtctggagtgcagcaggtgaatggagtgacagtgggcgccctggccagcggcatgcagcctgtgaccagcaccatcccagctgtgtctgctgtgggcggcatcattggagccctgcccggcaaccagctggccatcaatggcatcgtgggcgccctgaatggagtgatgcagacccctgtgaccatgagccagaaccccacccccctgacccacaccaccgtgcccccaaatgccacccaccccatgcctgccaccctgaccaacagcgccagcggcctgggcctgctgagtgaccagcagaggcagatcctgatccaccagcagcagttccagcagctgctgaacagccagcagctgacccctgtgcaccgccacccccacttcacccagctgccccccacccacttcagccccagcatggagatcatgcaggtgaggaagtag

SEQ ID NO: 20062 - DNA, 3084 bp, synthetic construct
  source 1..3084: mol_type = other DNA; note = Synthetic coding sequence
atggtgtccagtgacaggcctgtgtccctggaggatgaggtgagccacagcatgaaggagatgattggaggctgctgcgtgtgcagtgatgagcggggctgggccgagaaccccctggtgtactgtgatggccacggctgcagcgtggccgtgcaccaggcctgctacggcatcgtgcaggtgcccaccggcccctggttctgcaggaaatgtgagagccaggagagagctgcccgggtgcgctgtgagctgtgcccccacaaggatggagccctgaagaggacagacaatggaggctgggcccacgtggtgtgtgccctgtacatccctgaggtgcagtttgccaacgtgtccaccatggagcccatcgtgctgcagagcgtgccccatgaccgctacaacaagacctgctacatctgtgatgagcagggccgggagagcaaggccgccactggagcctgcatgacctgcaacaagcacggctgccggcaggccttccacgtgacctgtgcccagtttgctggcctgctgtgtgaggaggagggcaatggagctgacaacgtgcagtactgcggctactgcaagtaccacttcagcaagctgaagaagagcaagaggggcagcaacagaagctatgaccagagcctgagtgacagcagcagccacagccaggacaagcaccacgagaaggagaagaagaagtacaaggagaaggacaagcacaagcagaagcacaagaagcagcctgagcccagccctgccctggtgcccagcctgactgtgaccacagagaagacctacaccagcaccagcaacaacagcatcagcggcagcctgaagaggctggaggacaccacagcccgcttcaccaatgccaacttccaggaggtgtctgcccacaccagcagcggcaaggatgtgtctgagacccggggcagcgagggcaagggcaagaagagcagcgcccacagcagcggccagaggggcaggaagccaggcggcggcaggaaccctggcaccaccgtgtctgctgccagccccttcccccagggcagcttcagcggcaccccaggctctgtgaagagcagcagcggcagctctgtgcagagcccccaggacttcctgtccttcacagacagcgacctgagaaatgacagctacagccacagccagcagagcagcgccaccaaggatgtgcacaagggggagagcggcagccaggagggcggcgtgaacagcttcagcaccctcatcggcctgcccagcaccagcgctgtgaccagccagcccaagagctttgagaacagccctggggacctgggcaacagcagcctgcccacagctggctacaagagggcccagaccagcggcatcgaggaggagaccgtgaaggagaagaagaggaaaggaaacaagcagagcaagcacggccctggccggcccaagggcaacaagaaccaggagaatgtgagccacctgtctgtgtcctctgccagccccaccagctctgtggccagcgctgctggcagcatcaccagcagcagcctgcagaagagccccaccctgctgagaaatggcagcctgcagagcctgtctgtgggcagcagccctgtgggcagcgagatctccatgcagtacagacatgatggagcctgccccaccaccaccttcagcgagctgctgaatgccatccacaatgacagaggagacagcagcaccctgaccaagcaggagctgaagttcatcggcatctacaacagcaatgatgtggccgtgtccttccccaacgtggtgtctggcagcggcagcagcacccctgtgagcagcagccacctgccccagcagagcagcggccacctgcagcaggtgggcgccctgagccccagcgctgtgtcctctgctgccccagctgtggccaccacccaggccaacaccctgagcggcagcagcctgagccaggcccccagccacatgtatggcaacagaagcaacagctccatggccgccctgattgcccagagcgagaacaaccagacagaccaggacctgggggacaacagcaggaacctggtgggccggggcagcagcccccggggcagcctgagccccaggagccctgtgagcagcctgcagatccgctatgaccagcccggcaacagcagcctggagaacctgccccctgtggccgccagcattgagcagctgctggagcggcagtggagcgagggccagcagttcctgctggagcagggcacccccagcgacatcctgggcatgctgaagagcctgcaccagctgcaggtggagaacagaaggctggaggagcagatcaagaacctgacagccaagaaggagcggctgcagctgctgaatgcccagctgtctgtgcccttccccaccatcacagccaaccccagccccagccaccagatccacaccttcagcgcccagacagcccccaccacagacagcctgaacagcagcaagagcccccacatcggcaacagcttcctgcctgacaacagcctgcctgtgctgaaccaggacctgaccagcagcggccagagcaccagcagcagcagcgccctgagcaccccacctcctgctggccagagccctgcccagcagggcagcggcgtgtctggagtgcagcaggtgaatggagtgacagtgggcgccctggccagcggcatgcagcctgtgaccagcaccatcccagctgtgtctgctgtgggcggcatcattggagccctgcccggcaaccagctggccatcaatggcatcgtgggcgccctgaatggagtgatgcagacccctgtgaccatgagccagaaccccacccccctgacccacaccaccgtgcccccaaatgccacccaccccatgcctgccaccctgaccaacagcgccagcggcctgggcctgctgagtgaccagcagaggcagatcctgatccaccagcagcagttccagcagctgctgaacagccagcagctgacccctgtgcaccgccacccccacttcacccagctgccccccacccacttcagccccagcatggagatcatgcaggtgaggaagtag

SEQ ID NO: 20063 - DNA, 567 bp, synthetic construct; identical to SEQ ID NO: 19160
  source 1..567: mol_type = other DNA; note = Synthetic coding sequence

SEQ ID NO: 20064 - DNA, 381 bp, synthetic construct
  source 1..381: mol_type = other DNA; note = Synthetic coding sequence
atggtgtccagtgacaggcctgtgtccctggaggatgaggtgagccacagcatgaaggagatgattggaggctgctgcgtgtgcagtgatgagcggggctgggccgagaaccccctggtgtactgtgatggccacggctgcagcgtggccgtgcaccaggcctgctacggcatcgtgcaggtgcccaccggcccctggttctgcaggaaatgtgagagccaggagagagctgcccgggtggccgagagccgctctgtggcccaggccaaggtgcagtggtgtgacctgagccccctgcagcccctgctgcccggcttcaagcgcttcagctgcctgagcctgcccaacggcatgcagttcctgctggtgtccctcatctag

SEQ ID NO: 20065 - DNA, 540 bp, synthetic construct
  source 1..540: mol_type = other DNA; note = Synthetic coding sequence
atggtgtccagtgacaggcctgtgtccctggaggatgaggtgagccacagcatgaaggagatgattggaggctgctgcgtgtgcagtgatgagcggggctgggccgagaaccccctggtgtactgtgatggccacggctgcagcgtggccgtgcaccaggcctgctacggcatcgtgcaggtgcccaccggcccctggttctgcaggaaatgtgagagccaggagagagctgcccgggtgatggtgtgcaacagctgctggctggccagcagtgaaaatgtgaccccaggctacatcgagcaccactgtgcctgtgccagcccccacccccgctgcctggtgtccaatgtgccccctgtgtctggggccctgatgcactgcttctgggcctgcctgaccacagctgccttcttcggcccccagagcttcaccacctgccacatgtccttcctggtgtcccgggacatcctcttctacatctacggcttcatgcccttcatctctgtggtgatctggaggttcaagaaggagcgctggtag

SEQ ID NO: 20066 - DNA, 540 bp, synthetic construct
  source 1..540: mol_type = other DNA; note = Synthetic coding sequence
atgggcctcatctttgccaagctgtggagcctcttctgcaaccaggagcacaaggtgatcatcgtgggcctggacaatgccggcaagaccaccatcctgtaccagttcctgatgaatgaggtggtgcacaccagccccaccatcggcagcaatgtggaggagatcgtggtgaagaacacccacttcctgatgtgggacattggaggccaggagagcctgcggagctcctggaacacctactacagcaacacagagttcatcatcctggtggtggacagcattgaccgggagcggctggccatcaccaaggaggagctgtacaggatgctggcccacgaggacctgaggaaggctgctgtgctgatctttgccaacaagcaggacatgaagggctgcatgacagctgctgagatcagcaagtacctgaccctgagcagcatcaaggaccacccctggcacatccagagctgctgtgccctgactggagagggcctgtgccagggcctggagtggatgaccagccgcatcggcgtgaggtag

SEQ ID NO: 20067 - DNA, 3345 bp, synthetic construct
  source 1..3345: mol_type = other DNA; note = Synthetic coding sequence
atgagccagacccaggactatgagtgccgcagccacaacgtggacctgcctgagagccgcatccctggcagcaacacccggctggagtgggtggagatcatcgagcccaggacccgggagaggatgtatgccaacctggtgactggagaatgtgtgtgggaccccccagctggggtgcgcatcaagaggaccagcgagaaccagtggtgggagctgtttgaccccaacaccagccgcttctactactacaatgccagcacccagaggacagtgtggcaccggccccagggctgtgacatcatccccctggccaagctgcagaccctgaagcagaacacagagagcccccgggccagcgctgagagcagccctggccggggcagctctgtgtcccgggagggcagcaccagcagcagcctggagcctgagccagacacagagaaggcccaggagctgcctgcccgggccggccggcctgctgccttcggcaccgtgaaggaggacagcggcagcagcagccccccaggagtcttcctggagaaggactatgagatctacagagactacagcgcagatggccagctgctgcactaccgcaccagcagcctgcgctggaacagcggggccaaggagaggatgctgatcaaggtggccgaccgggagcccagcttcctggccgcccagggcaatggctacgccccagatggccccccaggagtgcgcagcagaagacccagcggcagccagcacagccccagcctgcagacctttgcccctgaggctgatggcaccatcttcttccctgagcggcggcccagccccttcctgaagagagctgagctgcccggcagcagcagccccctgctggcccagcccaggaagcccagcggggacagccagcccagcagccccaggtatggctatgagccccccctgtatgaggagccccctgtggagtaccaggcccccatctatgatgagccccccatggatgtgcagtttgaggccggcggcggctaccaggccggcagcccccagaggagccctggcaggaagccccggcccttcctgcagcccaacaagcagggcccccccagcccctgccagcagctggtgctgaccaagcagaagtgcccagagcgcttcctgagcctggagtacagccctgctgggaaggagtatgtgcggcagctggtgtatgtggagcaggccggcagcagccccaagctgcgggccggccccaggcacaagtatgcccccaaccctgggggcggcagctacagcctgcagcccagcccctgcctgctgcgggaccagaggctgggcgtgaagagcggggactacagcaccatggagggccctgagctgcggcacagccagccccccacccccctgccccaggcccaggaggatgccatgtcctggagcagccagcaggacaccctgagcagcacaggctacagccctggcaccaggaagaggaagagcaggaagcccagcctgtgccaggccaccagcgccacccccacagagggccctggggacctgctggtggagcagcccctggccgaggagcagcccccctgtggcaccagcctggcccctgtgaagagagctgagggggaggccgagggcgcccggggagctgctgagcccttcctggcccaggcccggctggcctgggaggcccagcaggcccacttccacatgaagcagaggagctcctgggacagccagcaggacggcagcggctatgaaagtgatggagccctgcccctgcccatgcctggccctgtggtgcgggccttctctgaagatgaggccctggcccagcaggagaacagacactggaggcggggcacctttgagaagctgggcttcccccagatcctgctggagaagtctgtgtctgtgcagaccaacctggccagccctgagccctacctgcaccccagccagagcgaggacctggccgcctgtgcccagtttgagagcagccggcagagccgctctggagtgcccagcagcagctgtgtgttccccaccttcaccctgaggaagcccagcagcgagacagacatcgagaactgggccagcaagcacttcaacaagcacacccagggcctcttccggaggaaggtgtccatcgccaacatgctggcctggagcagcgagagcatcaagaagcccatgattgtgaccagtgacagacatgtgaagaaggaggcctgtgagctgttcaagctgatccagatgtacatgggagacagaagagccaaggctgaccccctgcacgtggccctggaggtggccaccaagggctggagcgtgcagggcctgagagatgagctgtacatccagctgtgccggcagaccacagagaacttccggctggagagcctggcccggggctgggagctgatggccatctgcctggccttcttcccccccacccccaagttccacagctacctggagggctacatctaccgccacatggaccctgtgaatgacaccaaggtgacccagcacatcaaggagctgctggagaggaacaccaagaagaagagcaagctgaggaagaagcccaagccctacgtggaggagccagatggagtggccatcagcacctacgccaagtactgctaccacaagctgcagaaggccgccctgaccggggccaagaagggcctgaagaagcccaacgtggaggagatcagacatgccaagaatgctgtgttcagccccagcatgtttggaagtgccctgcaggaggtgatgggcatgcagcgggagcgctacccagagcggcagctgccctgggtgcagacccggctgtctgaggaggtgctggccctgaatggagaccagacagagggcatcttccgggtgcctggggacattgatgaggtgaatgccctgaagctgcaggtggaccagtggaaggtgcccaccggcctggaggacccccacgtgcctgccagcctgctgaagctgtggtaccgggagctggaggagcccctcatcccccatgagttctatgagcagtgcatcgcccactatgacagccctgaggccgctgtggccgtggtgcacgccctgccccgcatcaacaggatggtgctgtgctacctgatccgcttcctgcaggtgtttgtgcagcctgccaacgtggccgtgaccaagatggatgtgagcaacctggccatggtgatggcccccaactgcctgcgctgccagagtgatgaccccagggtcatctttgagaacaccaggaaggagatgtccttcctgcgggtgctgatccagcacctggacaccagcttcatggagggcgtgctgtag

SEQ ID NO: 20068 - DNA, 822 bp, synthetic construct; identical to SEQ ID NO: 19062
  source 1..822: mol_type = other DNA; note = Synthetic coding sequence

SEQ ID NO: 20069 - DNA, 3633 bp, synthetic construct
  source 1..3633: mol_type = other DNA; note = Synthetic coding sequence
atgcccagaggagaggcccctggccctggaagaagaggagccaaggatgaggccctgggggaggagagcggggagcgctggagccctgagttccacctgcagaggaagctggccgacagcagccacagcgagcagcaggacaggaacagagtgtctgaggagctgatcatggtggtgcaggagatgaagaagtacttccccagcgagaggaggaacaagcccagcaccctggatgccctgaactatgccctgcgctgtgtgcacagcgtgcaggccaacagcgagttcttccagatcctgagccagaatggagccccccaggctgatgtgtccatgtacagcctggaggagctggccaccatcgccagcgagcacaccagcaagaacacagacacctttgtggccgtgttctccttcctgagcggccgcctggtgcacatcagcgagcaggccgccctgatcctgaacaggaagaaggatgtgctggccagcagccactttgtggacctgctggccccccaggacatgagggtcttctacgcccacacagcccgggcccagctgcccttctggaacaactggacccagagagctgctgcccgctatgaatgtgcccctgtgaagcccttcttctgccgcatccggggcggggaggacaggaagcaggagaagtgccacagccccttccgcatcatcccctacctgattcatgtgcaccacccagcccagcctgagctggagagcgagccctgctgcctgactgtggtggagaagatccacagcggctatgaggccccccgcatccctgtgaacaagaggatcttcaccaccacccacaccccaggctgtgtgttcctggaggtggatgagaaggctgtgcccctgctgggctacctgccccaggacctgattggcaccagcatcctgagctacctgcacccagaagatagaagcctgatggtggccatccaccagaaggtgctgaagtatgccggccaccccccatttgagcacagccccatccgcttctgcacccagaatggagactacatcatcctggacagctcctggagcagctttgtgaacccctggagcaggaagatctccttcatcatcggccgccacaaggtgaggaccagccccctgaatgaagatgtgtttgccaccaagatcaagaagatgaatgacaatgacaaggacatcacagagctgcaggagcagatctacaagctgctgctgcagcctgtgcacgtgtctgtgagcagcggctacggcagcctgggcagcagcggcagccaggagcagctggtgtccatcgccagcagcagcgaggccagcggccaccgggtggaggagaccaaggccgagcagatgaccctgcagcaggtgtatgcctctgtgaacaagatcaagaacctgggccagcagctgtacattgaatccatgaccaagagcagcttcaagcctgtgacaggcaccaggacagagcccaacggcggcggggagagcgccaatggaggaggagagtgcaagaccttcaccagcttccaccagaccctgaagaacaacagcgtgtacacagagccctgtgaggacctgagaaatgatgagcacagccccagctaccagcagatcaactgcatcgacagcgtcatccgctacctgaagagctacaacatcccagccctgaagaggaagtgcatcagctgcaccaacaccaccagcagcagcagcgaggaggacaagcagaaccacaaggcagatgatgtgcaggccctgcaggccggcctgcagatcccagccatccccaagtctgagatgcccaccaacggccgcagcattgacaccggcggcggggccccccagatcctgagcacagccatgctgagcctgggcagcggcatcagccagtgtggctacagcagcaccatcgtgcacgtgcccccacctgagacagccagagatgccaccctcttctgtgagccctggaccctgaacatgcagcctgcccccctgaccagcgaggagttcaagcacgtgggcctgacagctgctgtgctgagcgcccacacccagaaggaggagcagaactacgtggacaagttccgggagaagatcctgagcagcccctacagcagctacctgcagcaggagagccgcagcaaggccaagtacagctacttccagggcgacagcaccagcaagcagaccaggtctgctggctgcaggaagggcaagcacaagaggaagaagctgcctgagcccccagacagcagcagcagcaacacaggcagcggcccccggcggggggcccaccagaatgcccagccctgctgccccagcgctgccagcagcccccacaccagcagccccaccttccccccagctgccatggtgcccagccaggccccctacctggtgcctgccttccccctgcctgctgccaccagccctggccgggagtatgctgcccctggaacagcccctgagggcctgcacggcctgcccctgtctgagggcctgcagccctacccagccttccccttcccctacctggacaccttcatgacagtgttcctgcctgacccccctgtgtgccccctgctgagccccagcttcctgccctgccccttcctgggcgccacagccagcagcgccatcagccccagcatgagcagcgccatgagccccaccctggaccccccacccagcgtgaccagccagaggcgggaggaggagaagtgggaggcccagagcgagggccaccccttcatcaccagccgcagcagcagccccctgcagctgaacctgctgcaggaggagatgccccggcccagcgagagcccagaccagatgagaagaaacacctgcccccagacagagtaccagtgtgtgacaggcaacaatggaagtgagagcagccctgccaccaccggggccctgagcacaggcagccccccccgggagaaccccagccaccccacagccagcgccctgagcacaggcagcccccccatgaagaaccccagccaccccacagccagcgccctgagcacaggcagcccccccatgaagaaccccagccaccccacagccagcaccctgtccatgggcctgccccccagcaggacccccagccaccccacagccaccgtgctgagcacaggcagcccccccagcgagagccccagcaggacaggcagcgctgccagcggcagcagtgacagcagcatctacctgaccagctctgtgtacagcagcaagatcagccagaatggccagcagagccaggatgtgcagaagaaggagaccttccccaacgtggccgaggagcccatctggaggatgatccggcagaccccagagcgcatcctgatgacctaccaggtgcctgagcgggtgaaggaggtggtgctgaaggaggacctggagaagctggagagcatgaggcagcagcagccccagttcagccacggccagaaggaggagctggccaaggtgtacaactggatccagagccagacagtgacccaggagattgacatccaggcctgtgtgacctgtgaaaatgaagattctgcagatggagctgccaccagctgtggccaggtgctggtggaggacagctgctag

SEQ ID NO: 20070 - DNA, 1137 bp, synthetic construct
  source 1..1137: mol_type = other DNA; note = Synthetic coding sequence
atgcccagaggagaggcccctggccctggaagaagaggagccaaggatgaggccctgggggaggagagcggggagcgctggagccctgagttccacctgcagaggaagctggccgacagcagccacagcgagcagcaggacaggaacagagtgtctgaggagctgatcatggtggtgcaggagatgaagaagtacttccccagcgagaggaggaacaagcccagcaccctggatgccctgaactatgccctgcgctgtgtgcacagcgtgcaggccaacagcgagttcttccagatcctgagccagaatggagccccccaggctgatgtgtccatgtacagcctggaggagctggccaccatcgccagcgagcacaccagcaagaacacagacacctttgtggccgtgttctccttcctgagcggccgcctggtgcacatcagcgagcaggccgccctgatcctgaacaggaagaaggatgtgctggccagcagccactttgtggacctgctggccccccaggacatgagggtcttctacgcccacacagcccgggcccagctgcccttctggaacaactggacccagagagctgcccgctatgaatgtgcccctgtgaagcccttcttctgccgcatcagaggaggagaggacaggaagcaggagaagtgccacagccccttccgcatcatcccctacctgatccacgtgcaccacccagcccagcctgagctggagagcgagccctgctgcctgactgtggtggagaagatccacagcggctatgaggccccccgcatccctgtgaacaagaggatcttcaccaccacccacaccccaggctgtgtgttcctggaggtggatgagaaggctgtgcccctgctgggctacctgccccaggacctgattggcaccagcatcctgagctacctgcaccctgaggacaggagcctgatggtggccatccaccagaaggtgctgaagtatgccggccaccccccatttgagcacagccccatccgcttctgcacccagaatggagactacatcatcctggacagctcctggagcagctttgtgaacccctggagcaggaagatctccttcatcatcggccgccacaaggtgaggacatag

SEQ ID NO: 20071 - DNA, 1794 bp, synthetic construct
  source 1..1794: mol_type = other DNA; note = Synthetic coding sequence
atggagaggcctgcccccctggccgtgctgcccttcagtgaccctgcccacgccctgagcctgctgcggggcctgagccagctgcgggcagagaggaagttcctggatgtgaccctggaggccgccggcggccgggacttccctgcccacagagctgtgctggccgccgccagcccctacttccgggccatgtttgctggccagctgcgggagagcagagctgagcgggtgcggctgcacggcgtgcccccagacatgctgcagctgctgctggacttctcctacacaggccgggtggccgtgtctggggacaatgctgagcccctgctgcgggctgctgacctgctgcagtttcctgctgtgaaggaggcctgtggggccttcctgcagcagcagctggacctggccaactgcctggacatgcaggactttgctgaggccttcagctgcagcggcctggccagcgctgcccagcgcttcatcctgcggcacgtgggggagctgggcgctgagcagctggagcggctgcccctggcccggctgctgcgctacctgagagatgatggcctgtgtgtgcccaaggaggaggccgcctaccagctggccctgcgctgggtgcgggctgaccccccccggcgggccgcccactggccccagctgctggaggccgtgcggctgccctttgtgcggcgcttctacctgctggcccacgtggaggccgagcccctggtggcccgctgccccccctgcctgcggctgctgcgggaggcccgggacttccaggccgcccgctatgacagacatgaccggggcccctgccccaggatgaggccccggcccagcacaggcctggccgagatcctggtgctggtgggcggctgtgaccaggactgtgatgagctggtgacagtggactgctacaacccccagacaggccagtggagatacctggccgagttcccagaccacctgggcggcggctacagcatcgtggccctgggcaatgacatctacgtgactggaggcagtgatggcagccggctgtatgactgtgtgtggagatacaacagctctgtgaatgagtgggccgaggtggcccccatgctgaaggcccgggagtaccacagcagctctgtgctggatggcctgctgtatgtggtggccgctgacagcacagaaagatatgaccacaccacagacagctgggaggccctgcagcccatgacctaccccatggacaactgcagcaccacagcctgccggggccgcctgtatgccatcggcagcctggccggcaaggagaccatggtgatgcagtgctatgaccctgacacagacctgtggagcctggtggactgtggccagctgcccccctggagctttgcccccaagacagccaccctgaatggcctgatgtactttgtgagagatgattctgctgaggtggatgtgtacaaccccaccagaaatgagtgggacaagatccccagcatgaaccaggtgcacgtgggcggcagcctggccgtgctgggcggcaagctgtatgtgtctgggggctatgacaacacctttgagctgagtgatgtggtggaggcctatgaccctgagacccgggcctggagcgtggtgggccgcctgcctgagcccaccttctggcacggctctgtgtccatcttccggcagttcatgccccagaccttcagcggcggccggggctttgagctggacagcggcagtgatgacatggaccccggccggcccaggcctccccgggaccctgatgagctgcactag

SEQ ID NO: 20072 - DNA, 1620 bp, synthetic construct
  source 1..1620: mol_type = other DNA; note = Synthetic coding sequence
atggagaggcctgcccccctggccgtgctgcccttcagtgaccctgcccacgccctgagcctgctgcggggcctgagccagctgcgggcagagaggaagttcctggatgtgaccctggaggccgccggcggccgggacttccctgcccacagagctgtgctggccgccgccagcccctacttccgggccatgtttgctggccagctgcgggagagcagagctgagcgggtgcggctgcacggcgtgcccccagacatgctgcagctgctgctggacttctcctacacaggccgggtggccgtgtctggggacaatgctgagcccctgctgcgggctgctgacctgctgcagtttcctgctgtgaaggaggcctgtggggccttcctgcagcagcagctggacctggccaactgcctggacatgcaggactttgctgaggccttcagctgcagcggcctggccagcgctgcccagcgcttcatcctgcggcacgtgggggagctgggcgctgagcagctggagcggctgcccctggcccggctgctgcgctacctgagagatgatggcctgtgtgtgcccaaggaggaggccgcctaccagctggccctgcgctgggtgcgggctgaccccccccggcgggccgcccactggccccagctgctggaggccgtgcggctgccctttgtgcggcgcttctacctgctggcccacgtggaggccgagcccctggtggcccgctgccccccctgcctgcggctgctgcgggaggcccgggacttccaggccgcccgctatgacagacatgaccggggcccctgccccaggatgaggccccggcccagcacaggcctggccgagatcctggtgctggtgggcggctgtgaccaggactgtgatgagctggtgacagtggactgctacaacccccagacaggccagtggagatacctggccgagttcccagaccacctgggcggcggctacagcatcgtggccctgggcaatgacatctacgtgactggaggcagtgatggcagccggctgtatgactgtgtgtggagatacaacagctctgtgaatgagtgggccgaggtggcccccatgctgaaggcccgggagtaccacagcagctctgtgctggatggcctgctgtatgtggtggccgctgacagcacagaaagatatgaccacaccacagacagctgggaggccctgcagcccatgacctaccccatggacaactgcagcaccacagcctgccggggccgcctgtatgccatcggcagcctggccggcaaggagaccatggtgatgcagtgctatgaccctgacacagacctgtggagcctggtggactgtggccagctgcccccctggagctttgcccccaagacagccaccctgaatggcctgatgtactttgtgagagatgattctgctgaggtggatgtgtacaaccccaccagaaatgagtgggacaagatccccagcatgaaccaggtgaacttccaggccggccagcactggaagcaccggctggtgctgatcctgcagcccaagtgccacagagatgaatgtctgggcagcacagccatgatgggcggcagccacctgaactag

SEQ ID NO: 20073 - DNA, 2067 bp, synthetic construct
  source 1..2067: mol_type = other DNA; note = Synthetic coding sequence
atggatggcagctttgtgcagcacagcgtgcgggtgctgcaggagctgaacaagcagcgggagaagggccagtactgtgatgccaccctggatgtgggcggcctggtgttcaaggcccactggagcgtgctggcctgctgcagccacttcttccagagcctgtatggagatggcagcggcggctctgtggtgctgcctgctggctttgctgagatcttcggcctgctgctggacttcttctacacaggccacctggccctgaccagcggcaacagagaccaggtgctgctggccgcccgggagctgcgggtgcctgaggccgtggagctgtgccagagcttcaagcccaagacctctgtgggccaggccgccggcggccagagcggcctgggccccccagccagccagaatgtgaacagccacgtgaaggagcccgccggcctggaggaggaggaggtgtccaggaccctgggcctggtgccccgggaccaggagccccggggcagccacagcccccagaggccccagctgcacagccctgcccagagcgagggccccagcagcctgtgtgggaagctgaagcaggccctgaagccctgccccctggaggacaagaagccagaggactgcaaggtgcccccccggcccctggaggccgagggcgcccagctgcagggcggcagcaatgagtgggaggtggtggtgcaggtggaggatgatggagatggagactacatgtctgagcctgaggccgtgctgaccaggaggaagagcaatgtcatcaggaagccctgtgccgctgagcccgccctgtctgctggcagcctggccgctgagcctgctgagaacagaaaaggaacagctgtgcctgtggagtgccccacctgccacaagaagttcctgagcaagtactacctgaaggtgcacaacaggaagcacactggagagaagccctttgagtgccccaagtgtgggaagtgctacttcaggaaggagaacctgctggagcacgaggccaggaactgcatgaacagaagtgagcaggtgttcacctgcagcgtgtgccaggagaccttcagaagaaggatggagctgcgggtgcacatggtgagccacactggagagatgccctacaagtgcagcagctgcagccagcagttcatgcagaagaaggacctgcagagccacatgatcaagctgcatggagcccccaagccccacgcctgccccacctgtgccaagtgcttcctgagcaggacagagctgcagctgcacgaggccttcaagcacagaggagagaagctgtttgtgtgtgaggagtgtggccaccgggccagcagcagaaatggcctgcagatgcacatcaaggccaagcacagaaatgaaagacctcatgtgtgtgagttctgcagccacgccttcacccagaaggccaacctgaacatgcacctgcggacccacactggagagaagcccttccagtgccacctgtgtgggaagaccttccgcacccaggccagcctggacaagcacaacagaacccacactggagagcggcccttcagctgtgagttctgtgagcagcgcttcacagagaagggccccctgctgcggcacgtggccagccgccaccaggagggccggccccacttctgccagatctgtgggaagaccttcaaggctgtggagcagctgcgggtgcacgtgcggcggcacaagggcgtgaggaagtttgaatgtacagaatgtggctacaagttcacccggcaggcccacctgcggcggcacatggagatccatgacagagtggagaactacaacccccggcagaggaagctgaggaacctgatcattgaagatgagaagatggtggtggtggccctgcagcccccagctgagctggaggtgggcagcgctgaggtgattgtggagagcctggcccagggcggcctggccagccagctgcccggccagaggctgtgtgccgaggagagcttcaccggccctggggtgctggagcccagcctcatcatcacagctgctgtgcctgaggactgtgacacctag

SEQ ID NO: 20074 - DNA, 525 bp, synthetic construct
  source 1..525: mol_type = other DNA; note = Synthetic coding sequence
atgacccactgctgcagcccctgctgccagcccacctgctgcaggaccacctgctgcaggaccacctgctggaagcccaccaccgtgaccacctgcagcagcaccccctgctgccagcctgcctgctgcgtgagcagctgctgccagccctgctgccggcccacctgctgccagaacacctgctgcaggaccacctgctgccagcccacctgtgtgaccagctgctgccagcccagctgctgcagcaccccctgctgccagcccacctgctgcggcagcagctgctgcggccagaccagctgtggcagcagctgtggccagagcagcagctgtgcccctgtgtactgcaggaggacctgctactaccccaccaccgtgtgcctgcccggctgcctgaaccagagctgtggcagcaactgctgccagccctgctgcaggcctgcctgctgtgagaccacctgctgcaggaccacctgcttccagcccacctgtgtgagcagctgctgccagcccagctgctgctag

SEQ ID NO: 20075 - DNA, 597 bp, synthetic construct
  source 1..597: mol_type = other DNA; note = Synthetic coding sequence
atggtgagcagctgctgcggctctgtgtgcagcgaccagggctgcagccaggacctgtgccaggagacctgctgccggcccagctgctgccagaccacctgctgcaggaccacctgctaccggcccagctgctgcgtgagcagctgctgccggccccagtgctgccagagcgtgtgctgccagcccacctgctgcaggcctccccgctgctgcatcagcagctgctgccggcccagctgctgcatgagcagctgctgcaagccccagtgctgccagagcgtgtgctgccagcccaccaccacctgctgccacccccgctgctgcatcagcagctgctgccggcccagctgctgcgtgagcagctgctgcaagccccagtgctgccagagcgtgtgctgccagcccaactgctgccggcccagctgcagcatcagcagctgctgccggcccagctgctgtgagagcagctgctgccggccctgctgctgcgtgcggcctgtgtgtggccgggtgtcctgccacaccacctgctaccggcccacctgtgtgatcagcagctgcccccggcccctgtgctgtgccagcagctgctgctag

SEQ ID NO: 20076 - DNA, 1296 bp, synthetic construct
  source 1..1296: mol_type = other DNA; note = Synthetic coding sequence
atgaccagtgactgcagcagcacccactgcagccctgagagctgtggcacagccagcggctgtgccccagccagcagctgcagcgtggagacagcctgcctgcccggcacctgtgccaccagccgctgccagacccccagcttcctgagccgcagccggggcctgaccggctgcctgctgccctgctacttcaccggcagctgcaacagcccctgcctggtgggcaactgtgcctggtgtgaagatggagtcttcaccagcaatgagaaggagaccatgcagttcctgaatgaccggctggccagctacctggagaaggtgcgcagcctggaggagaccaatgctgagctggagagccgcatccaggagcagtgtgagcaggacatccccatggtgtgcccagactaccagcgctacttcaacaccatcgaggacctgcagcagaagatcctgtgcaccaaggccgagaacagccggctggccgtgcagctggacaactgcaagctggccacagatgacttcaagagcaaatatgagagcgagctgagcctgcggcagctgctggaggccgacatcagcagcctgcacggcatcctggaggagctgaccctgtgcaagagtgacctggaggcccacgtggagagcctgaaggaggacctgctgtgcctgaagaagaaccacgaggaggaggtgaacctgctgcgggagcagctgggggaccggctgtctgtggagctggacacagcccccaccctggacctgaacagagtgctggatgagatgcgctgccagtgtgaaacagtgctggccaacaacagaagagaggccgaggagtggctggccgtgcagacagaggagctgaaccagcagcagctgagcagcgctgagcagctgcagggctgccagatggagatcctggagctgaagaggacagccagcgccctggagattgagctgcaggcccagcagagcctgacagagagcctggagtgcaccgtggccgagacagaggcccagtacagcagccagctggcccagatccagtgcctgattgacaacctggagaaccagctggccgagatccgctgtgacctggagcggcagaaccaggagtaccaggtgctgctggatgtgaaggcccggctggagggggagatcaacacctactggggcctgctggacagcgaggacagccggctgagctgcagcccctgcagcaccacctgcaccagcagcaacacctgtgagccctgcagcgcctacgtgatctgcaccgtggagaactgctgcctgtag

SEQ ID NO: 20077 - DNA, 1047 bp, synthetic construct
  source 1..1047: mol_type = other DNA; note = Synthetic coding sequence
atggccggcagcctgcccccctgtgtggtggactgtggcaccggctacaccaagctgggctacgccggcaacacagagccccagttcatcatccccagctgcatcgccatccgggagagcgccaaggtggtggaccaggcccagaggagagtgctgcggggcgtggatgacctggacttcttcatcggagatgaggccatcgacaagcccacctacgccaccaagtggcccatccgccacggcatcatcgaggactgggacctgatggagcgcttcatggagcaggtggtgttcaagtacctgcgggcagagcctgaggaccactacttcctgatgacagagccccccctgaacaccccagaaaatcgggagtacctggccgagatcatgtttgagagcttcaacgtgcccggcctgtacatcgctgtgcaggccgtgctggccctggccgcctcctggaccagccggcaggtgggggagaggaccctgaccggcatcgtcatcgacagcggagatggagtgacccacgtgattcctgtggccgagggctacgtgattggcagctgcatcaagcacatccccatcgccggccgggacatcacctacttcatccagcagctgctgcgggagcgggaggtgggcatccccccagagcagagcctggagacagccaaggccatcaaggagaagtactgctacatctgcccagacatcgtgaaggagtttgccaagtatgatgtggaccccaggaagtggatcaagcagtacacaggcatcaatgccatcaaccagaagaagtttgtgattgatgtgggctatgagcgcttcctgggccctgagatcttcttccaccctgagtttgccaacccagacttcatggagagcatcagtgatgtggtggatgaagtcatccagaactgccccattgatgtgcggcggcccctgtacaagccagagttcttccaggtgtgccacaccaagaaggactatgaggagtatggccccagcatctgccgccacaaccctgtgtttggagtgatgtcctag

SEQ ID NO: 20078 - DNA, 273 bp, synthetic construct; identical to SEQ ID NO: 18343
  source 1..273: mol_type = other DNA; note = Synthetic coding sequence

SEQ ID NO: 20079 - DNA, 249 bp, synthetic construct
  source 1..249: mol_type = other DNA; note = Synthetic coding sequence
atggccagcagcagtggagctggagctgctgctgctgctgctgctgccaacctgaatgctgtgcgggagaccatggatgtgctgctggagatcagccgcatcctgaacacaggcctggacatggagaccctgagcatctgtgtgcggctgtgtgagcagggcatcaaccctgaggccctgagcagcgtcatcaaggagctgaggaaggccacagaggccctgaaggctgctgagaacatgaccagctag

SEQ ID NO: 20080 - DNA, 3732 bp, synthetic construct
  source 1..3732: mol_type = other DNA; note = Synthetic coding sequence
atggagaccagggctgctgaaaatacagccatcttcatgtgcaagtgctgcaacctcttcagccccaaccagagcgagctgctgagccacgtgtctgagaagcacatggaggagggcgtgaatgtggatgagatcatcatccccctgcggcccctgagcaccccagagccccccaacagcagcaagacaggagatgagttcctggtgatgaagaggaagaggggccggcccaagggcagcaccaagaagagcagcacagaggaggagctggccgagaacatcgtgagccccacagaggacagccccctggcccctgaggagggcaacagcctgccccccagcagcctggagtgcagcaagtgctgcaggaagttcagcaacacccggcagctgaggaagcacatctgcatcatcgtgctgaacctgggggaggaggagggggaggccggaaatgaaagtgacctggagctggagaagaagtgcaaggaggatgaccgggagaaggccagcaagaggcccaggagccagaagacagagaaggtgcagaagatcagcggcaaggaggcccggcagctgagcggggccaagaagcccatcatctctgtggtgctgacagcccacgaggccatccctggggccaccaagatcgtgcctgtggaggccggccccccagagaccggggccaccaacagcgagaccaccagcgctgacctggtgccccggcggggctaccaggagtatgccatccagcagaccccctatgagcagcccatgaagagcagccggctgggccccacccagctgaagatcttcacctgtgagtactgcaacaaggtgttcaagttcaagcacagcctgcaggcccacctgcgcatccacaccaatgagaagccctacaagtgcccccagtgcagctatgccagcgccatcaaggccaacctgaatgtgcacctgaggaagcacactggagagaagtttgcctgtgactactgcagcttcacctgcctgagcaagggccacctgaaggtgcacatcgagcgggtgcacaagaagatcaagcagcactgccgcttctgcaagaagaagtacagtgatgtgaagaacctgatcaagcacatcagagatgcccatgacccccaggacaagaaggtgaaggaggccctggatgagctgtgcctgatgacccgggagggcaagaggcagctgctgtatgactgccacatctgtgagaggaagttcaagaatgagctggaccgggacagacacatgctggtgcacggggacaagtggccctttgcctgtgagctgtgtggccatggagccaccaagtaccaggccctggagctgcacgtgaggaagcacccctttgtgtatgtgtgtgctgtgtgcaggaagaagtttgtgagcagcatccggctgcggacccacatcaaggaggtgcatggagctgcccaggaggccctggtgttcaccagcagcatcaaccagagcttctgcctgctggagcctggaggagacatccagcaggaggccctgggggaccagctgcagctggtggaggaggagtttgccctgcagggcgtgaatgccctgaaggaggaggcctgccctggggacacccagctggaggagggcaggaaggagcctgaggcccctggagagatgcctgccccagctgtgcacctggccagcccccaggccgagagcacagccctgcccccctgtgagctggagaccaccgtggtgagcagcagtgacctgcacagccaggaggtggtgtctgatgacttcctgctgaagaatgacaccagcagcgctgaggcccacgccgcccctgagaagcccccagacatgcagcacaggagctctgtgcagacccagggcgaggtgatcaccctgctgctgagcaaggcccagagcgctggcagtgaccaggagagccacggggcccagagccccctgggggagggccagaacatggctgtgctgtctgctggggaccctgaccccagccgctgcctgcggagcaacccagctgaggccagtgacctgctgccccctgtggccggcggcggggacaccatcacccaccagcctgacagctgcaaggccgcccctgagcacaggagcggcatcacagccttcatgaaggtgctgaacagcctgcagaagaagcagatgaacaccagcctgtgtgagcgcatcaggaaggtgtatggagacctggagtgtgagtactgcggcaagctgttctggtaccaggtgcactttgacatgcacgtgaggacccacacccgggagcacctgtactactgcagccagtgccactacagcagcatcaccaagaactgcctgaagagacatgtgatccagaagcacagcaacatcctgctgaagtgccccacagatggctgtgactacagcaccccagacaagtacaagctgcaggcccacctgaaggtgcacacagccctggacaagaggagctacagctgccctgtgtgtgagaagagcttctctgaagatagactcatcaagagccacatcaagaccaaccaccctgaggtgtccatgagcaccatcagcgaggtgctgggcagaagagtgcagctgaagggcctgattggcaagagggccatgaagtgcccctactgtgacttctacttcatgaagaatggaagtgacctgcagaggcacatctgggcccatgaaggagtgaagcccttcaagtgcagcctgtgtgaatatgccaccaggagcaagagcaacctgaaggcccacatgaacagacacagcacagagaagacccacctgtgtgacatgtgtgggaagaagttcaagagcaagggcaccctgaagagccacaagctgctgcacacagcagatggcaagcagttcaagtgcaccgtgtgtgactacacagctgcccagaagccccagctgctgcggcacatggagcagcacgtgtccttcaagcccttccgctgtgcccactgccactacagctgcaacatcagcggcagcctgaagaggcactacaacaggaagcaccccaatgaggagtatgccaacgtgggcactggagagctggccgctgaggtgctgatccagcagggcggcctgaagtgccctgtgtgcagctttgtgtatggcaccaagtgggagttcaacagacacctgaagaacaagcacggcctgaaggtggtggagattgatggagaccccaagtgggagacagccacagaggcccctgaggagcccagcacccagtacctgcacatcacagaagcagaagaagatgtgcagggcacccaggccgctgtggccgccctgcaggacctgcgctacaccagcgagagcggggaccggctggaccccacagctgtgaacatcctgcagcagatcatcgagctgggcgctgagacccatgatgccacagccctggcctctgtggtggccatggcccctggcaccgtgacagtggtgaagcaggtgacagaggaggagcccagcagcaaccacacagtgatgatccaggagaccgtgcagcaggcctctgtggagctggccgagcagcaccacctggtggtgtccagtgatgatgtggagggcattgaaacagtgacagtgtacacccagggcggggaggccagcgagttcatcgtgtatgtgcaggaggccatgcagcctgtggaggagcaggccgtggagcagcctgcccaggagctgtag

SEQ ID NO: 20081 - DNA, 2274 bp, synthetic construct
  source 1..2274: mol_type = other DNA; note = Synthetic coding sequence
atggccctgggggaggagaaggccgaggccgaggccagcgaggacaccaaggcccagagctatggccggggcagctgccgggagcgggagctggacatccctggccccatgtctggagagcagcccccccggctggaggccgagggcggcctcatcagccctgtgtggggcgctgagggcatcccagcccccacctgctggattggaacagaccccggcggccccagccgggcccaccagccccaggccagtgatgccaaccgggagcctgtggccgagaggtctgagcccgccctgagcggcctgcccccagccaccatgggcagcggggacctgctgctgtctggagagagccaggtggagaagaccaagctgagcagcagcgaggagttcccccagaccctgagcctgcccaggaccaccaccatctgcagcggccatgatgctgacacagaagatgaccccagcctggccgacctgccccaggccctggacctgagccagcagccccacagcagcggcctgagctgcctgagccagtggaagtctgtgctgagccctggcagcgctgcccagcccagcagctgcagcatcagcgccagcagcacaggcagcagcctgcagggccaccaggagcgggcagagccccggggcggcagcctggccaaggtgagcagcagcctggagcctgtggtgccccaggagcccagctctgtggtgggcctgggcccccggccccagtggagcccccagcccgtcttctctggaggagatgccagcggcctgggcagaagaaggctgtccttccaggccgagtactgggcctgtgtgctgcctgacagcctgccccccagcccagacagacacagccccctgtggaaccccaacaaggagtatgaggacctgctggactacacctaccccctgcggcccggcccccagctgcccaagcacctggacagccgggtgcctgctgaccctgtgctgcaggacagcggcgtggacctggacagcttctctgtgtccccagccagcaccctgaagagccccaccaacgtgagccccaactgccccccagctgaggccacagccctgcccttcagcggcccccgggagcccagcctgaagcagtggcccagccgggtgccccagaagcagggcggcatgggcctggcctcctggagccagctggccagcaccccccgggcccctggcagcagagatgcccgctgggagcggcgggagcccgccctgcggggggccaaggaccggctgaccatcggcaagcacctggacatgggcagcccccagctgcggacccgggaccggggctggcccagccccaggcctgagcgggagaagaggaccagccagagcgcccggcggcccacctgcacagagagccgctggaagtctgaggaggaggtggagagtgatgatgagtacctggccctgcctgcccggctgacccaggtgagcagcctggtgtcctacctgggcagcatcagcaccctggtgaccctgcccaccggggacatcaagggccagagccccctggaggtgtctgacagtgatggccctgccagcttccccagcagcagcagccagagccagctgcccccaggagctgccctgcagggcagcggggaccctgagggccagaacccctgcttcctgcggagctttgtgcgggcccatgacagcgctggggagggcagcctgggcagcagccaggccctgggcgtgagcagcggcctgctgaagacccggcccagcctgcctgcccggctggaccgctggcccttcagtgaccctgatgtggagggccagctgcccaggaagggcggggagcagggcaaggagagcctggtgcagtgtgtgaagaccttctgctgccagctggaggagctgatctgctggctgtacaacgtggctgatgtgacagaccacggcacagctgcccggagcaacctgaccagcctgaagagcagcctgcagctgtaccggcagttcaagaaggacattgatgagcaccagagcctgacagagagcgtgctgcagaagggggagatcctgctgcagtgcctgctggagaacacccctgtgctggaggatgtgctgggccgcatcgccaagcagagcggggagctggagagccatgctgaccggctgtatgacagcatcctggccagcctggacatgctggccggctgcaccctcatcccagacaagaagcccatggccgccatggagcacccctgtgagggcgtgtag

SEQ ID NO: 20082 - DNA, 540 bp, synthetic construct
  source 1..540: mol_type = other DNA; note = Synthetic coding sequence
atgaaccccagcatgaagcagaagcaggaggagatcaaggagaacatcaagaacagctctgtgcccaggaggaccctgaagatgatccagcccagcgccagcggcagcctggtgggcagagaaaatgagctgtctgctggcctgagcaagaggaagcacagaaatgaccacctgaccagcaccaccagcagccctggggtcatcgtgcctgagagcagcgagaacaagaacctgggcggcgtgacccaggagagctttgacctgatgatcaaggagaaccccagcagccagtactggaaggaggtggccgagaagaggaggaaggccctgtatgaggccctgaaggaaaatgagaagctgcacaaggagattgagcagaaggacaatgaaattgcccggctgaagaaggagaacaaggagctggccgaggtggccgagcacgtgcagtacatggccgagctgattgagcggctgaatggagagcccctggacaactttgagagcctggacaaccaggagtttgacagcgaggaggagtag

SEQ ID NO: 20083 - DNA, 309 bp, synthetic construct
  source 1..309: mol_type = other DNA; note = Synthetic coding sequence
atgaaccccagcatgaagcagaagcaggaggagatcaaggagaacatcaagaacagctctgtgcccaggaggaccctgaagatgatccagcccagcgccagcggcagcctggtgggcagagaaaatgagctgtctgctggcctgagcaagaggaagcacagaaatgaccacctgaccagcaccaccagcagccctggggtcatcgtgcctgagagcagcgagaacaagaacctgggcggcgtgacccaggagagctttgacctgatgatcaaggagaaccccagcagccagtactggaaggaggtgtag

SEQ ID NO: 20084 - DNA, 2259 bp, synthetic construct
  source 1..2259: mol_type = other DNA; note = Synthetic coding sequence
atggccgagcccgcctctgtgacagtgacctttgatgatgtggccctgtacttcagcgagcaggagtgggagatcctggagaagtggcagaagcagatgtacaagcaggagatgaagaccaactatgagaccctggacagcctgggctacgccttcagcaagccagacctgatcacctggatggagcagggccgcatgctgctgatcagcgagcagggctgcctggacaagaccaggaggaccaccagccccccaacagatgagcagctgaacatgaagaacacaggcaagctgctgtgctttgatgatgagggcacccccaggaccaaggaggaggactgccgcctgaatggcccccagaagcaggacctgtgtgccgccctgcggggcaaggagaggaagatcctgctggcccagacagccaccttccagagccccagcctgcgggagacagagatcctgaacaagaaggtgtccatcacagcctatgaccctgacaagaaggacctgcggcacaagccccgggagaccccaggccgcctggagatccccaccggcccccgctgctacagctgctacgtgtgcaggaaggtgttccaggtgcggcgggacctgctgaagcacaagaggagccacagcaagagccagctgtgccgctaccccaagtacaagaacagcagccggggcaagtctgagctgcggaggacccagaggctgctgtgccagaagaagcgcttccagtgcagtgaatgtgagaagagctacttcctgaagggcagcctggtgacccaccaggtggtgcacacaggccagaggccctacccctgcccagaatgtgacaagaccttccgctaccgggccaacctgaagaagcacctgtgcctgcacagaggagagcggcccttctgctgcggggagtgtggccgggcctttgtgcagcagtgtgagctgacagagcacctgcggctgcacagcggggagaagcccttccagtgcccccagtgtgaccgctgcttccggctgaagaggggcatgaaggtgcacctgacccagcacagcggcaagaggcccttccactgcccagaatgtggccgctccttcagcaggaaggccgccctgaagacccaccagaggacccacagcgaggagaagcccttcagctgtggggagtgtggcaggaagttcatctacaagatcaagctggatgagcacatccgggtgcacactggagagaagcccttcagctgcccagagtgcaacaagagcttccggctgaagaggagcctgaaggcccacggcctgcagcacatcggcaagaggcccttccagtgcccagagtgcagccggggcttcttctggagaaatgccatgagggcccaccagaggctgcacagcgagcagaagcccttcccctgtgccgagtgtgggaagcgcttcacccggcccagcaagctggcctgccacaccagggtgcatgaccggcagaaggagttcccctgtggggagtgcaagaagaccttcagccagcagagccggctgacccagcacctgaaggtgcacaccacagagaagcccttcagctgtgccgagtgtggccgctccttcagaagaagagcccacctgacagagcacacccggctgcacagcggggaggagcccttccagtgcccagaatgtgacaagagcttctcctggaaggcctccatgaagttccaccagaggatgcacagagatgagaagccctttgcctgtggggagtgtgacaagacctacacccaccagagccagctgacagagcacctgcggctgcacagcggggagaagccctaccagtgcccagaatgtgagaagaccttccggctgaagggcaacctgaagagccacctgctgcagcacagcggccagaagcccttcagctgtgtgatgtgtgggaagagcttcacccagcagtaccgcctgacagagcacatccgggtgcacagcggggagaagcccttccagtgcccagaatgtgacaagagctactgcatccggggcagcctgaaggtgcacctgtacaagcacagcggggagcggcccttccagtgcccagaatgtgggaagggcttcctgcagaagaggagcctgaaggcccacctgtgcctgcacagcggggagcggcccttcagctgtgatgaatgtggccgctccttcacctacgtgggcgccctgaagacccacatcgctgtgcacgccaaggagaagcccagcagcctgtag

SEQ ID NO: 20085 - DNA, 1935 bp, synthetic construct
  source 1..1935: mol_type = other DNA; note = Synthetic coding sequence
atgttcctgacctacatggagaccgtgaccaaggagctggtgtcctggatgaggggccacgagagctctgtgttcagcatctctgtgcacgccagcggcaagtatgccatcaccaccagcagtgacacagcccagctgtgggacctggacaccttccagaggaagaggaagctgaacatccggcagagcgtgggcatccagaaggtgttcttcctgcccctgagcaacaccatcctgagctgcttcaaggacaacagcatctttgcctgggagtgtgacaccctcttctgcaagtaccagctgcctgcccctcctgagagcagcagcatcctgtacaaggtgtttgctgtgaccagagatggccgcatcctggccgccggcggcaagagcaaccacctgcacctgtggtgcctggaggcccggcagctgttccgcatcatccagatgcccaccaaggtgcgggccatccgccacctggagttcctgcctgacagctttgatgctggcagcaaccaggtgctgggcgtgctgagccaggacggcatcatgaggttcatcaacatgcagacctgcaagctgctgtttgaaattggcagcctggatgagggcatcagcagcagcgccatcagcccccacggccgctacatcgccagcatcatggagaatggcagcctgaacatctacagcgtgcaggccctgacccaggagatcaacaagcccccaccacccctggtgaaggtgattgaggacctgcccaagaacaagctgagcagcagtgacctgaagatgaaggtgaccagcggccgggtgcagcagcctgccaagagccgggagagcaagatgcagacccgcatcctgaagcaggacctgactggagactttgagagcaagaagaatgagctgcctgatggcctgaacaagaagaggctgcagatcctgctgaagggctatggagagtaccccaccaagtacaggatgttcatctggaggagcctgctgcagctgcctgagaaccacacagccttcagcaccctgattgacaagggcacccacgtggccttcctgaacctgcagaagaagtaccccatcaagagcaggaagctgctgcgggtgctgcagaggaccctgagcgccctggcccactggagcgtcatcttcagtgacaccccctacctgcccctgctggccttcccctttgtgaagctgttccagaacaaccagctgatctgctttgaagtcatcgccaccctcatcatcaactggtgccagcactggtttgagtacttccccaacccccccatcaacatcctgtccatgattgaaaatgtgctggccttccatgacaaggagctgctgcagcacttcatcgaccatgacatcaccagccagctgtatgcctggcccctgctggagaccgtcttcagcgaggtgctgacccgggaggagtggctgaagctgtttgacaacatcttcagcaaccaccccagcttcctgctgatgacagtggtggcctacaacatctgcagcaggacccccctgctgagctgcaacctgaaggatgactttgagttcttcttccaccacaggaacaacctggacatcaacgtggtgatccggcaggtgtaccacctgatggagaccacccccacagacatccacccagacagcatgctgaatgtgtttgtggccctgaccaagggccagtaccctgtgttcaaccagtaccccaagttcatcgtggactaccagacccaggagcgggagcgcatcagaaatgatgagctggactacctgcgggagcggcagctgaagatctgcaagctgaagagcaccagcaaggagctgaagatgaagctgggcaccaggaacagaagctgctttgtgaagctgaagaagcaggaggagaagtgcagctacaagagaagaaggaagtag

SEQ ID NO: 20086 - DNA, 735 bp, synthetic construct
  source 1..735: mol_type = other DNA; note = Synthetic coding sequence
atgccccacaagattggatttgtggtggtgagcagcagcggccatgaagatggcttcagcgcccgggagctgatgattcatgcccccaccgtgtctggctggaggagcccccgcttctgccagttcccccaggagatcgtgctgcagatggtggagcgctgccgcatcaggaagctgcagctgctggcccaccagtacatgatcagcagcaagattgagttctacatcagcgagagcctgcctgagtactttgccccctaccaggccgagcgcttccggcggctgggctacgtgtccctgtgtgacaatgagaagacaggctgcaaggcccgggagctgaagtctgtgtatgtggatgctgtgggccagttcctgaagctgatcttccaccagaaccacgtgaacaagtacaacatctacaaccaggtggccctggtggccatcaacatcattggagaccctgctgacttcagtgatgagagcaacacagccagccgggagaagctgattgaccactacctgggccacaacagtgaagatcctgccctggagggcacctacgccagctctgtgaggactggaggagagagcacctttggagagctgaagggccctgctgtgcccagctctgtgaccctgtctgtgctgggcaccagcctgggccagtggttcccctgccacctgcctgctgtggatgacaatgaaggcacccccttccagcgctgcctggtgtag

SEQ ID NO: 20087 - DNA, 2778 bp, synthetic construct
  source 1..2778: mol_type = other DNA; note = Synthetic coding sequence
atgccccacaagattggatttgtggtggtgagcagcagcggccatgaagatggcttcagcgcccgggagctgatgattcatgcccccaccgtgtctggctggaggagcccccgcttctgccagttcccccaggagatcgtgctgcagatggtggagcgctgccgcatcaggaagctgcagctgctggcccaccagtacatgatcagcagcaagattgagttctacatcagcgagagcctgcctgagtactttgccccctaccaggccgagcgcttccggcggctgggctacgtgtccctgtgtgacaatgagaagacaggctgcaaggcccgggagctgaagtctgtgtatgtggatgctgtgggccagttcctgaagctgatcttccaccagaaccacgtgaacaagtacaacatctacaaccaggtggccctggtggccatcaacatcattggagaccctgctgacttcagtgatgagagcaacacagccagccgggagaagctgattgaccactacctgggccacaacagtgaagatcctgccctggagggcacctacgccaggaagagtgactacatcagccccctggatgacctggcctttgacatgtaccaggaccctgaggtggcccagatcatcaggaagctggatgagaggaagcgggaggccgtgcagaaggagagatatgactatgccaagaagctgaagcaggccatcgctgacctgcagaaggtgggggagcggctgggccgctatgaggtggagaagagatgtgctgtggagaaggaggactatgacctggccaaggagaagaagcagcagatggagcagtacagagctgaggtgtatgagcagctggagctgcacagcctgctggatgctgagctgatgagaagaccatttgacctgcccctgcagcccctggcccggagcggcagcccctgccaccagaagcccatgcccagcctgccccagctggaggagcggggcacagagaaccagtttgctgagcccttcctgcaggagaagcccagcagctacagcctgaccatcagcccccagcacagcgctgtggaccccctgctgcctgccacagacccccaccccaagatcaatgctgagagcctgccctatgatgagcggcccctgcctgccatcaggaagcactatggagaggccgtggtggagcctgagatgagcaatgctgacatcagtgatgccaggagaggaggcatgctgggggagcctgagcccctgacagagaaggccctgcgggaggccagcagcgccattgatgtgctgggggagaccctggtggccgaggcctactgcaagacctggagctaccgggaggatgccctgctggccctgagcaagaagctgatggagatgcctgtgggcacccccaaggaggacctgaagaacaccctgcgggcctctgtgttcctggtgcggcgggccatcaaggacatcgtgacctctgtgttccaggccagcctgaagctgctgaagatgatcatcacccagtacatccccaagcacaagctgagcaagctggagacagcccactgtgtggagaggaccatccctgtgctgctgaccaggactggagacagcagcgcccggctgcgggtgacagctgccaacttcatccaggagatggccctcttcaaggaggtgaagagcctgcagatcatccccagctacctggtgcagcccctgaaggccaacagctctgtgcacctggccatgagccagatgggcctgctggcccggctgctgaaggacctgggcaccggcagcagcggcttcaccatcgacaacgtgatgaagttctctgtgtctgccctggagcaccgggtgtatgaggtgcgggagacagctgtgcgcatcatcctggacatgtaccggcagcaccaggccagcatcctggagtacctgcccccagatgacagcaacaccaggaggaacatcctgtacaagaccatctttgagggctttgccaagattgatggccgggccacagatgctgagatgagggcccggaggaaggccgccacagaggaggccgagaagcagaagaaggaggagatcaaggccctgcagggccagctggccgccctgaaggagatccaggccgaggtgcaggagaaggagagtgatgctgtgaagcccaagaaccaggacatccagggcggcaaggccgccccagctgaggccctgggcatcccagatgagcactacctggacaacctgtgcatcttctgtggggagaggtctgagagcttcacagaggagggcctggacctgcactactggaagcactgcctgatgctgacccgctgtgaccactgcaagcaggtggtggagatcagcagcctgacagagcacctgctgacagaatgtgacaagaaggatggctttgggaagtgctaccgctgcagcgaggccgtgttcaaggaggagctgcccaggcacatcaagcacaaggactgcaacccagccaagccagagaagctggccaaccgctgccccctgtgccacgagaacttcagccctggagaggaggcctggaaggcccacctgatgggccctgctggctgcaccatgaacctgaggaagacccacatcctgcagaaggccccagccctgcagcccgggaagagcagcgctgtggccgccagcggccccctgggcagcaaggccggcagcaagatccccacccccaagggcggcctgagcaagagcagcagcaggacctacgccaagaggtag

SEQ ID NO: 20088 - DNA, 2145 bp, synthetic construct
  source 1..2145: mol_type = other DNA; note = Synthetic coding sequence
atggcccgggccggcagctgtggcggcgctgctgctggggccggccggcctgagccctgggagctgagcctggaggaggtgctgaaggcctatgagcagcccctgaatgaggagcaggcctgggccgtgtgcttccagggctgccggggcctgcggggcagccctggaagaaggctgcgggacaccggggacctgctgctgcggggagatggctctgtgggcgcccgggagcctgaggccgctgagcccgccaccatggtggtgcccctggccagcagcgaggcccagacagtgcagagcctgggctttgccatctaccgggccctggactggggcctggatgagagcgaggagcgggagctgagcccccagctggagcggctgattgacctgatggccaacaatgattctgaggacagcggctgtggggctgctgatgagggctatggaggccctgaggaggaggaggaggccgagggcgtgcccaggtctgtgaggacctttgcccaggccatgaggctgtgtgccgcccggctgacagaccccaggggggcccaggcccactaccaggccgtgtgccgggccctgtttgtggagaccctggagctgcgggccttcctggcccgggtgcgggaggccaaggagatgctgcagaagctgcgggaggatgagccccacctggagacccccagggctgagctggacagcctgggccacacagactgggcccggctgtgggtgcagctgatgagggagctgcggcggggcgtgaagctgaagaaggtgcaggagcaggagttcaaccccctgcccacagagttccagctgaccccatttgagatgctgatgcaggacatccgggccaggaactacaagctgaggaaggtgatggtggatggagacatccccccccgggtgaagaaggatgcccacgagctgatcctggacttcatccgcagccggccccccctgaagcaggtgtctgagcggcggctgcggcccctgccccccaagcagaggagcctgcacgagaagatcctggaggagatcaagcaggagcggcggctgcggcctgtgcggggggagggctgggccgcccggggcttcggcagcctgccctgcatcctgaatgcctgcagcggagatgccaagagcaccagctgcatcaacctgtctgtgacagatgctgggggcagcgcccagaggccccggccccgggtgctgctgaaggcccccaccctggccgagatggaggagatgaacaccagcgaggaggaggagagcccctgtggggaggtgaccctgaagagggacaggagcttcagcgagcatgacctggcccagctgcggtctgaggtggccagcggcctgcagagcgccacccaccccccaggcggcacagagcccccccggccccgggccggcagcgcccacgtgtggaggcctggcagccgggaccagggcacctgcccagcctctgtgtctgaccccagccaccccctgctgagcaacagaggcagcagcggggacaggcctgaggcctccatgaccccagatgccaagcacctgtggctggagttcagccaccctgtggagagcctggccctgactgtggaggaggtgatggatgtgagaagagtgctggtgaaggccgagatggagaagttcctgcagaacaaggagctgttcagcagcctgaagaagggcaagatctgctgctgctgccgggccaagttccccctcttctcctggccacccagctgcctcttctgcaagagagctgtgtgcaccagctgcagcatcaagatgaagatgcccagcaagaagtttggccacatccctgtgtacaccctgggctttgagagcccccagagggtgtctgctgccaagacagcccccatccagaggcgggacatcttccagagcctgcagggcccccagtggcagagcgtggaggaggccttcccccacatctacagccacggctgtgtgctgaaggatgtgtgcagtgaatgtaccagctttgtggctgatgtggtgcgcagcagcaggaagtctgtggatgtgctgaacaccaccccaagaagaagccggcagacccagagcctgtacatccccaacaccaggaccctggacttcaagtag

SEQ ID NO: 20089 - DNA, 1308 bp, synthetic construct
  source 1..1308: mol_type = other DNA; note = Synthetic coding sequence
atgaacttcagcgaggtgttcaagctgagcagcctgctgtgcaagttctccccagatggcaagtacctggccagctgtgtgcagtaccgcctggtggtgagagatgtgaacaccctgcagatcctgcagctgtacacctgcctggaccagatccagcacatcgagtggagcgctgacagcctcttcatcctgtgtgccatgtacaagaggggcctggtgcaggtgtggagcctggagcagcctgagtggcactgcaagattgatgagggcagcgctggcctggtggccagctgctggagcccagatggccgccacatcctgaacaccacagagttccacctgcgcatcaccgtgtggagcctgtgcaccaagtctgtgtcctacatcaagtaccccaaggcctgcctgcagggcatcaccttcaccagagatggccgctacatggccctggccgagcggcgggactgcaaggactatgtgtccatctttgtgtgcagcgactggcagctgctgcggcactttgacacagacacccaggacctgaccggcatcgagtgggccccaaatggctgtgtgctggccgtgtgggacacctgcctggagtacaagatcctgctgtacagcctggatggccgcctgctgagcacctacagcgcctatgagtggagcctgggcatcaagtctgtggcctggagccccagcagccagttcctggccgtgggcagctatgatggcaaggtgcgcatcctgaaccacgtgacctggaagatgatcacagaatttggccaccctgctgccatcaatgaccccaagatcgtggtgtacaaggaggccgagaagagcccccagctgggcctgggctgcctgtccttccccccaccccgggccggggccggccccctgcccagcagcgagagcaaatatgagatcgcctctgtgcctgtgtccctgcagaccctgaagcctgtgacagaccgggccaaccccaagattggaattggcatgctggccttctccccagacagctacttcctggccaccagaaatgacaacatccccaatgctgtgtgggtgtgggacatccagaagctgcggctgtttgctgtgctggagcagctgagccctgtgcgggccttccagtgggacccccagcagccccggctggccatctgcaccggcggcagccggctgtacctgtggagccctgctggctgcatgtctgtgcaggtgcctggagagggcaagcacatccctgaggccacagatgtggccgccctgctgtgtgctgtgtggcaccacactggatag

SEQ ID NO: 20090 - DNA, 819 bp, synthetic construct
  source 1..819: mol_type = other DNA; note = Synthetic coding sequence
atgctgcagctgcgggacagcgtggacagcgctggcaccagccccacagctgtgctggccgccggggaggaggtgggcgccggcggcggccctgggggcggccggcctggggccggcacccccctgcggcagaccctgtggcccctgagcatccatgaccccacccggcgggcccgggtgaaggagtactttgtgttccggcccggcagcattgagcaggccgtggaggagatccgggtggtggtgcggcctgtggaggatggagagatccagggcgtgtggctgctgacagaggtggaccactggaacaatgagaaggagcggctggtgctggtgacagagcagagcctgctgatctgcaagtatgacttcatcagcctgcagtgccagcaggtggtgagaattgccctgaatgctgtggacaccatctcctatggagagttccagtttcctcccaagagcctgaacaagcgggagggcttcggcatccgcatccagtgggacaagcagagccggcccagcttcatcaaccgctggaacccctggagcaccaacgtgccctatgccaccttcacagagcaccccatggccggggctgatgagaagacagccagcctgtgccagctggagagcttcaaggccctgctgatccaggccgtgaagaaggcccagaaggagagccccctgcccggccaggccaacggggtgctgatcctggagcggcccctgctgattgagacctacgtgggcctgatgtccttcatcaacaatgaggccaagctgggctacagcatgacccggggcaagattggcttctag

SEQ ID NO: 20091 - DNA, 870 bp, synthetic construct
  source 1..870: mol_type = other DNA; note = Synthetic coding sequence
atgtggcccttccccagccgcagcctcttccccccacccacccaggcctggctgcagacagtgtccagtgaccctgaggcccagggctggggcgcctggaatgagaccaaggagatcctgggccctgagggcggggagggcaaggaggagaaggaggaggaggaggatgctgaggaggaccaggatggagatgctggcttcctgctgagcctgctggagcaggagaacctggctgaatgtcccctgcctgaccaggagctggaggccatcaagatgaaggtgtgtgccatggagcaggccgagggcaccccccggcccccaggagtgcagcagcaggccgaggaggaggagggcacagctgctggccagctgctgagccctgagaccgtgggctgccccctgagcggcaccccagaggagaaggtggaggccgaccacaggtctgtgtatgtgggcaatgtggactatggaggcagcgctgaggagctggaggcccacttcagccgctgtggggaggtgcaccgggtgaccatcctgtgtgacaagttcagcggccaccccaagggctacgcctacattgaatttgccaccaagggctctgtgcaggccgctgtggagctggaccagagcctcttccggggccgggtcatcaaggtgctgcccaagaggaccaacttccctggcatcagcagcacagacagaggaggcctgcggggccaccctggcagcagaggagcccccttcccccacagcggcctgcagggccggccccggctgcggccccagggccagaacagaacaccagctgccctgacccccctgtgggcccggcccctgccctgggtggtggtgagccacgtgatcaagtag

SEQ ID NO: 20092 - DNA, 1266 bp, synthetic construct
  source 1..1266: mol_type = other DNA; note = Synthetic coding sequence
atgtttgagatcctgaccagcgagttctcctaccagcacagcctgagcatcctggtggaggagttcctgcagagcaaggagctgcgggccaccgtgacccagatggagcaccaccacctgttcagcaacatcctggatgtgctgggcgccagccagcgcttctttgaggacctggagcagaggcacaaggcccaggtgctggtggaggacatcagtgacatcctggaggagcacgccgagaagcacttccacccctacatcgcctactgcagcaatgaggtgtaccagcagaggaccctgcagaagctgatcagcagcaatgctgccttccgggaggccctgcgggagattgaaagaagacctgcctgtggcggcctgcccatgctgtccttcctgatcctgcccatgcagagggtgacccggctgcccctgctgatggacaccctgtgcctgaagacccagggccacagcgagcgctacaaggccgccagccgggccctgaaggccatcagcaagctggtgcggcagtgcaatgaaggagcccacaggatggagaggatggagcagatgtacaccctgcacacccagctggacttcagcaaggtgaagagcctgcccctcatcagcgccagccgctggctgctgaagagaggagagctgttcctggtggaggagaccggcctcttcaggaagatcgccagccggcccacctgctacctgttcctgttcaatgatgtgctggtggtgaccaagaagaagtctgaggagagctacatggtgcaggactatgcccagatgaaccacatccaggtggagaagattgagcccagcgagctgcccctgcccggcggcggcaacagaagcagctctgtgccccaccccttccaggtgaccctgctgagaaattctgagggccggcaggagcagctgctgctgagcagtgacagcgccagtgaccgggcccgctggatcgtggccctgacccacagcgagcggcagtggcagggcctgagcagcaagggggacctgccccaggtggagatcaccaaggccttctttgccaagcaggctgatgaggtgaccctgcagcaggctgatgtggtgctggtgctgcagcaggaggatggctggctgtatggagagcggctgagagatggagagaccggctggttcccagaagattttgcccgcttcatcaccagccgggtggccgtggagggcaatgtgcggaggatggagcggctgcgggtggagacagatgtgtag

SEQ ID NO: 20093 - DNA, 1266 bp, synthetic construct; identical to SEQ ID NO: 20092
  source 1..1266: mol_type = other DNA; note = Synthetic coding sequence

SEQ ID NO: 20094 - DNA, 2130 bp, synthetic construct
  source 1..2130: mol_type = other DNA; note = Synthetic coding sequence
atggcccagaggcacagcgacagcagcctggaggagaagctgctgggccaccgcttccacagcgagctgcggctggatgctgggggcaacccagccagcggcctgcccatggtgcggggcagcccccgggtgagagatgatgctgccttccagccccaggtgcctgccccaccccagccccggcccccaggccacgaggagccctggcccatcgtgctgagcacagagagccctgctgccctgaagctgggcacccagcagctgatccccaagagcctggccgtggccagcaaggccaagaccccagcccggcaccagagctttggagctgctgtgctgagccgggaggccgcccggcgggaccccaagctgctgcctgcccccagcttcagcctggatgacatggatgtggacaaggaccccggcggcatgctgcggaggaacctgaggaaccagagctaccgggccgccatgaagggcctgggcaagccaggcggccagggagatgccatccagctgagccccaagctgcaggccctggccgaggagcccagccagccccacaccaggagccctgccaagaacaagaagaccctgggcaggaagaggggccacaagggcagcttcaaggatgacccccagctgtaccaggagatccaggagcggggcctgaacaccagccaggagagtgatgatgacatcctggatgagagcagcagccctgagggcacccagaaggtggatgccaccatcgtggtgaagagctacagacctgcccaggtgacctggagccagctgcctgaggtggtggagctgggcatcctggaccagctgagcacagaggagaggaagaggcaggaggccatgtttgagatcctgaccagcgagttctcctaccagcacagcctgagcatcctggtggaggagttcctgcagagcaaggagctgcgggccaccgtgacccagatggagcaccaccacctgttcagcaacatcctggatgtgctgggcgccagccagcgcttctttgaggacctggagcagaggcacaaggcccaggtgctggtggaggacatcagtgacatcctggaggagcacgccgagaagcacttccacccctacatcgcctactgcagcaatgaggtgtaccagcagaggaccctgcagaagctgatcagcagcaatgctgccttccgggaggccctgcgggagattgaaagaagacctgcctgtggcggcctgcccatgctgtccttcctgatcctgcccatgcagagggtgacccggctgcccctgctgatggacaccctgtgcctgaagacccagggccacagcgagcgctacaaggccgccagccgggccctgaaggccatcagcaagctggtgcggcagtgcaatgaaggagcccacaggatggagaggatggagcagatgtacaccctgcacacccagctggacttcagcaaggtgaagagcctgcccctcatcagcgccagccgctggctgctgaagagaggagagctgttcctggtggaggagaccggcctcttcaggaagatcgccagccggcccacctgctacctgttcctgttcaatgatgtgctggtggtgaccaagaagaagtctgaggagagctacatggtgcaggactatgcccagatgaaccacatccaggtggagaagattgagcccagcgagctgcccctgcccggcggcggcaacagaagcagctctgtgccccaccccttccaggtgaccctgctgagaaattctgagggccggcaggagcagctgctgctgagcagtgacagcgccagtgaccgggcccgctggatcgtggccctgacccacagcgagcggcagtggcagggcctgagcagcaagggggacctgccccaggtggagatcaccaaggccttctttgccaagcaggctgatgaggtgaccctgcagcaggctgatgtggtgctggtgctgcagcaggaggatggctggctgtatggagagcggctgagagatggagagaccggctggttcccagaagattttgcccgcttcatcaccagccgggtggccgtggagggcaatgtgcggaggatggagcggctgcgggtggagacagatgtgtag

SEQ ID NO: 20095 - DNA, 1287 bp, synthetic construct
  source 1..1287: mol_type = other DNA; note = Synthetic coding sequence
atggtgtggcaggtgctggagggcctgagccaggacagcgccaagaggctgcgctttgtggccggggtcatctttgtggatgaaggagctgcctgtggccagagcctggaggagaggagcaagaccctggccgaggtgaagcccatcctgcaggccaccggcttcccctggcacgtggtggccctggaggaggtgttcagcctgcccccatctgtgctgtggtgcagcgcccaggagctggtgggcagcgagggcgcctacaaggctgctgtggacagcttcctgcagcagcagcacgtgctgggcgccggcggcggccctggccccacccagggcgaggagcagcccccccagccccccctggacccccagaacctggcccggcccccagccccagcccagacagaggccctgagccagctgttctgcagcgtgaggaccctgacagccaaggaggagctgctgcagaccctgcggacccacctgatcctgcacatggcccgggcccacggctacagcaaggtgatgactggagacagctgcacccggctggccatcaagctgatgaccaacctggccctgggccgcggggccttcctggcctgggacaccggcttcagtgatgaaagacatggagatgtggtggtggtgcggcccatgagggaccacaccctgaaggaggtggccttctacaacagactcttctctgtgcccagcgtcttcaccccagctgtggacaccaaggcccctgagaaggccagcatccaccggctgatggaggccttcatcctgcggctgcagacccagttccccagcacagtgtccacagtgtaccgcaccagcgagaagctggtgaagggccccagagatggccctgctgctggggacagcggcccccgctgcctgctgtgcatgtgtgccctggatgtggatgctgctgacagcgccacagcctttggagcccagaccagcagccggctgagccagatgcagagccccatccccctgacagagaccaggaccccacctggcccctgctgcagccctggggtgggctgggcccagagatgtggccagggcgcctgcagaagagaggacccccaggcctgcatcgaggagcagctgtgctacagctgccgggtgaacatgaaggacctgcccagcctggaccccctgcccccctacatcctggccgaggcccagctgcggacccagagggcctggggcctgcaggagatccgggactgcctgattgaagattctgatgatgaagctggccagagctag

SEQ ID NO: 20096 - DNA, 417 bp, synthetic construct
  source 1..417: mol_type = other DNA; note = Synthetic coding sequence
atgggagagcaggctgatggcaaggacagcatcgcccggcaggtggcccctgagagccactggccagagctgcgggtgctgatcctggtggtgtctgctgagaagaagctgaccggcagcacagtgggcatgagggcctctgtggagaccagccccctgctgcgcttccgggcagagagcgtggtgcctgcccatggaggagatggccccctgcaccctggggcccggctgccccagctgcggcctgctgaccacgagggccagcagcctgtgcccaggcacctgcccaggcacctgccccccagcctgacctccatgcccagccctggggccagcagcacctggtgcacagccagcacccccaccaccggcaccccccgctggaggacccccctgacccgggcccccatgccctag

SEQ ID NO: 20097 - DNA, 597 bp, synthetic construct
  source 1..597: mol_type = other DNA; note = Synthetic coding sequence
atgagcacagtggacctggcccgggtgggcgcctgcatcctgaagcatgctgtgactggagaggccgtggagctgcggagcctgtggagggagcacgcctgtgtggtggccggcctgcggcgcttcggctgtgtggtgtgccgctggatcgcccaggacctgagcagcctggccggcctgctggaccagcacggcgtgcggctggtgggcgtgggccctgaggccctgggcctgcaggagttcctggatggagactactttgctggggagctgtacctggatgagagcaagcagctgtacaaggagctgggcttcaagcgctacaacagcctgagcatcctgcctgctgccctgggcaagcctgtgagagatgtggccgccaaggccaaggctgtgggcatccagggcaacctgagcggggacctgctgcagagcggcggcctgctggtggtgtccaaaggaggagacaaggtgctgctgcactttgtgcagaagagccctggggactatgtgcccaaggagcacatcctgcaggtgctgggcatctctgctgaggtgtgtgccagtgaccccccccagtgtgaccgggaggtgtag

SEQ ID NO: 20098 - DNA, 642 bp, synthetic construct
  source 1..642: mol_type = other DNA; note = Synthetic coding sequence
tgaagccgggagcggggcagccgctctgaggagcccggggccggcaaccgggagagcggcagccgggagcccggcctggccgctgctgccatgagcacagtggacctggcccgggtgggcgcctgcatcctgaagcatgctgtgactggagaggccgtggagctgcggagcctgtggagggagcacgcctgtgtggtggccggcctgcggcgcttcggctgtgtggtgtgccgctggatcgcccaggacctgagcagcctggccggcctgctggaccagcacggcgtgcggctggtgggcgtgggccctgaggccctgggcctgcaggagttcctggatggagactactttgctggggagctgtacctggatgagagcaagcagctgtacaaggagctgggcttcaagcgctacaacagcctgagcatcctgcctgctgccctgggcaagcctgtgagagatgtggccgccaaggccaaggctgtgggcatccagggcaacctgagcggggacctgctgcagagcggcggcctgctggtggtgtccaaggaggtgccccggcggctgcggccccagggcgcccaccctgctggccctggccacctgtgtggcggcctgtgccagaggcctgcctctgtgtag

SEQ ID NO: 20099 - DNA, 2553 bp, synthetic construct
  source 1..2553: mol_type = other DNA; note = Synthetic coding sequence
atggccgaggtggaggccgtgcagctgaaggaggagggcaacagacacttccagctgcaggactacaaggccgccaccaacagctacagccaggccctgaagctgaccaaggacaaggccctgctggccaccctgtacagaaacagagctgcctgtggcctgaagacagagagctatgtgcaggccgccagtgatgccagccgggccatcgacatcaacagcagtgacatcaaggccctgtaccgccgctgccaggccctggagcacctgggcaagctggaccaggccttcaaggatgtgcagagatgtgccaccctggagcccaggaaccagaacttccaggagatgctgcggcggctgaacaccagcatccaggagaagctgcgggtgcagttcagcacagacagccgggtgcagaagatgtttgagatcctgctggatgagaacagcgaggccgacaagcgggagaaggccgccaacaacctgattgtgctgggccgggaggaggccggggctgagaagatcttccagaacaatggagtggccctgctgctgcagctgctggacaccaagaagccagagctggtgctggccgctgtgaggaccctgagcggcatgtgcagcggccaccaggcccgggccaccgtcatcctgcatgctgtgagaattgaccgcatctgcagcctgatggctgtggagaatgaggagatgagcctggccgtgtgcaacctgctgcaggccatcatcgacagcctgtctggagaggacaagcgggagcaccggggcaaggaggaggccctggtgctggacaccaagaaggacctgaagcagatcaccagccacctgctggacatgctggtgtccaagaaggtgtctggccagggccgggaccaggccctgaacctgctgaacaagaatgtgcccaggaaggacctggccatccatgacaacagcaggaccatctacgtggtggacaatggcctgaggaagatcctgaaggtggtgggccaggtgcctgacctgcccagctgcctgcccctgacagacaacaccaggatgctggccagcatcctgatcaacaagctgtatgatgacctgcgctgtgaccctgagcgggaccacttcaggaagatctgtgaggagtacatcaccgggaagtttgacccccaggacatggacaagaacctgaatgccatccagacagtgtctggcatcctgcagggcccctttgacctgggcaaccagctgctgggcctgaagggcgtgatggagatgatggtggccctgtgtggcagcgagcgggagacagaccagctggtggccgtggaggccctgattcatgccagcaccaagctgagccgggccaccttcatcatcaccaatggagtgtccctgctgaagcagatctacaagaccaccaagaatgagaagatcaagatccgcaccctggtgaccagtgacaagaccatcctgtacagcgtggccaccaccctggtgaactgcaccaacagctatgatgtgaaggaggtgattcctgagctggtgcagctggccaagttcagcaagcagcacgtgcctgaggagcaccccaaggacaagaaggacttcatcgacatgagggtgaagaggctgctgaaggccggggtcatcagcgccctggcctgcatggtgaaggctgacagcgccatcctgacagaccagaccaaggagctgctggcccgggtcttcctggccctgtgtgacaaccccaaggaccggggcaccatcgtggcccagggcggcggcaaggccctgatccccctggccctggagggcacagatgtgggcaaggtgaaggccgcccacgccctggccaagattgctgctgtgagcaacccagacatcgccttccctggagagcgggtgtatgaggtggtgcggcccctggtgcggctgctggacacccagagagatggcctgcagaactatgaggccctgctgggcctgaccaacctgagcggccgcagtgacaagctgcggcagaagatcttcaaggagcgggccctgcctgacatcgagaactacatgtttgaaaatcatgaccagctgcggcaggccgccacagagtgcatgtgcaacatggtgctgcacaaggaggtgcaggagcgcttcctggctgatggaaatgaccggctgaagctggtggtgctgctgtgtggggaggatgatgacaaggtgcagaatgctgctgctggggccctggccatgctgacagctgcccacaagaagctgtgcctgaagatgacccaggtgaccacccagtggctggagatcctgcagaggctgtgcctgcatgaccagctgtctgtgcagcaccggggcctggtgattgcctacaacctgctggccgcagatgctgagctggccaagaagctggtggagagcgagctgctggagatcctgactgtggtgggcaagcaggagccagatgagaagaaggccgaggtggtgcagacagccagagaatgtctcatcaagtgcatggactatggcttcatcaagcctgtgtcctag

SEQ ID NO: 20100 - DNA, 552 bp, synthetic construct; identical to SEQ ID NO: 19200
  source 1..552: mol_type = other DNA; note = Synthetic coding sequence

SEQ ID NO: 20101 - DNA, 366 bp, synthetic construct
  source 1..366: mol_type = other DNA; note = Synthetic coding sequence
atgttcaacaagtgcagcttccacagcagcatctacagacctgctgctgacaacagcgccagcagcctgtgtgccatcatctgcttcctgaacctggtgattgaatgtgacctggagaccaacagcgagatcaacaagctgatcatctacctgttcagccagaacaaccgcatccgcttcagcaagctgctgctgaagatcctcttctacatcagcatcttctcctacccagagctgatgtgtgagcagtatgtgaccttcatcaagccaggcatccactacggccaggtgtccaagaagcacatcatctacagcaccttcctgagcaagaacttcaagttccagctgctgcgggtgtgctggtag

SEQ ID NO: 20102 - DNA, 972 bp, synthetic construct
  source 1..972: mol_type = other DNA; note = Synthetic coding sequence
atggagagccgggtggctgatgctggcaccggggagacagcccgggctgctgggggcagccctgctgtgggctgcaccacccggggccctgtggtgtctgcccccctgggcgccgcccgctggaagctgctgcggcaggtgctgaagcagaagcacctggatgactgcctgcggcacgtgtctgtgagaagatttgagagcttcaacctcttctctgtgacagagggcaaggagcgggagacagaggaggaggtgggcgcctgggtgcagtacaccagcatcttctgcccagagtacagcatcagcctgcggcacaacagcggcagcctgaatgtggaggatgtgctgaccagctttgacaacacaggaaatgtgtgcatctggcccagcgaggaggtgctggcctactactgcctgaagcacaacaacatcttccgggccctggccgtgtgtgagctgggcggcggcatgacctgcctggccggcctgatggtggccatctctgcagatgtgaaggaggtgctgctgacagatggaaatgagaaggccatcagaaatgtgcaggacatcatcaccaggaaccagaaggccggggtcttcaagacccagaagatcagcagctgtgtgctgcgctgggacaatgaaacagatgtgtcccagctggagggccactttgatattgtgatgtgtgccgactgcctcttcctggaccagtaccgggccagcctggtggatgccatcaagaggctgctgcagccccggggcaaggccatggtgtttgccccccggcggggcaacaccctgaaccagttctgcaacctggccgagaaggccggcttctgcatccagagacatgagaactatgatgagcacatcagcaacttccacagcaagctgaagaaggagaacccagacatctatgaggagaacctgcactaccccctgctgctgatcctgaccaagcacggctag

SEQ ID NO: 20103 - DNA, 3120 bp, synthetic construct; identical to SEQ ID NO: 19482
  source 1..3120: mol_type = other DNA; note = Synthetic coding sequence

SEQ ID NO: 20104 - DNA, 390 bp, synthetic construct
  source 1..390: mol_type = other DNA; note = Synthetic coding sequence
atgtaccggcagcgcttcctgtacagcctgtaccgccacacccactgggtgcgctgtgccaagttctccccagatggccgcctgattgtgtcctgcagcgaggacaagaccatcaagatctgggacaccaccaacaagcagtgtgtgaacaacttcagtgacagcgtgggggacctgagcctgctcttccacttccagaaggtggagagctacctgcaccaggaggtgcagacccacaggagctactatggaggcctgaccctgatgaactgcatcgtgaaggtgctgcccaaggagatcagcaaggactacatcctgatccaccaccacatcttcctgatcagcacccaggagcaccacatccccatgaggaagaagctgcggctgtag

SEQ ID NO: 20105 - DNA, 2178 bp, synthetic construct
  source 1..2178: mol_type = other DNA; note = Synthetic coding sequence
atgcaccctgagcccagcgagcccgccaccggcggcgctgctgagctggactgtgcccaggagcccggggtggaggagagcgctggggaccacggcagcgctggccggggcggctgcaaggaggagatcaatgaccccaaggagatctgtgtgggcagcagtgacaccagctaccacagccagcagaagcagagcggggacaatggcagcggcggccactttgcccaccccagagaagatcgggaggaccggggccccaggatgaccaagagcagcctgcagaagctgtgcaagcagcacaagctgtacatcaccccagccctgaatgacaccctgtacctgcacttcaagggctttgacagaattgagaacctggaggagtacacaggcctgcgctgcctgtggctgcagagcaatggcatccagaagattgagaacctggaggcccagacagagctgcgctgcctcttcctgcagatgaacctgctgaggaagattgagaacctggagcccctgcagaagctggatgccctgaacctgagcaacaactacatcaagaccatcgagaacctgagctgcctgcctgtgctgaacaccctgcagatggcccacaaccacctggagaccgtggaggacatccagcacctgcaggagtgcctgcggctgtgtgtgctggacctgagccacaacaagctgagtgaccctgagatcctgagcatcctggagagcatgccagacctgcgggtgctgaacctgatgggcaaccctgtgatccggcagatccccaactacagaagaacagtgacagtgcggctgaagcacctgacctacctggatgacaggcctgtgttccccaaggaccgggcctgtgccgaggcctgggcccggggcggctacgccgctgagaaggaggagcggcagcagtgggagagccgggagaggaagaagatcacagacagcattgaggccctggccatgatcaagcagagagctgaggagaggaagaggcagcgggagagccaggagcggggggagatgaccagcagtgatgatggagaaaatgtgcctgccagcgctgagggcaaggaggagcccccaggggaccgggagacccggcagaagatggagctgtttgtgaaggagagctttgaggccaaggatgagctgtgcccagagaagcccagcggggaggagccccctgtggaggccaagcgggaggatggcggccctgagcctgagggcaccctgcctgctgagaccctgctgctgagcagccctgtggaggtgaagggggaggatggagatggagagcctgagggcaccctgcctgctgaggcccctcctcctcctcctcctgtggaggtgaagggggaggatggagaccaggagcctgagggcaccctgcctgctgagaccctgctgctgagcccccctgtgaaggtgaagggggaggatggagaccgggagcctgagggcaccctgcctgctgaggcccctcctcctccacccctgggcgccgcccgggaggagcccaccccccaggccgtggccacagagggcgtgtttgtgacagagctggatggcaccaggacagaggacctggagaccatccggctggagaccaaggagaccttctgcattgatgacctgcctgacctggaggatgatgatgaaacaggcaagagcctggaggaccagaacatgtgcttccccaagattgaagtcatcagcagcctgagtgatgacagcgaccctgagctggactacaccagcctgcctgtgctggagaacctgcccacagacaccctgagcaacatctttgctgtgtccaaggacaccagcaaggccgcccgggtgcccttcacagacatcttcaagaaggaggccaagagggacctggagatcaggaagcaggacaccaagagcccccggcccctcatccaggagctgagtgatgaggaccccagcggccagctgctgatgccacccacctgccagagagatgctgcccccctgaccagcagcggggaccgggacagcgacttcctggccgccagcagccctgtgcccacagaatctgctgccaccccacctgagacctgtgtgggcgtggcccagcccagccaggccctgcccacctgggacctgacagccttccctgcccccaaggccagctag

SEQ ID NO: 20106 - DNA, 957 bp, synthetic construct
  source 1..957: mol_type = other DNA; note = Synthetic coding sequence
tgaggcatcaatggaagtgaaggagatggagctgagattgctgagaagtttgtgttcttcatcggcagcaagaatggaggcaagaccaccatcatcctgcgctgcctggacagagatgagccccccaagcccaccctggccctggagtacacctacggccggcgggccaagggccacaacacccccaaggacatcgcccacttctgggagctgggcggcggcaccagcctgctggacctgatcagcatccccatcaccggggacaccctgcggaccttcagcctggtgctggtgctggacctgagcaagcccaatgacctgtggcccaccatggagaacctgctgcaggccaccaagagccacgtggacaaggtgatcatgaagctgggcaagaccaatgccaaggctgtgtctgagatgaggcagaagatctggaacaacatgcccaaggaccacccagaccacgagctgattgaccccttccctgtgcccctggtgatcatcggcagcaaatatgatgtgttccaggactttgagagcgagaagaggaaggtgatctgcaagaccctgcgctttgtggcccactactatggagccagcctgatgttcaccagcaagtctgaggccctgctgctgaagatccggggcgtcatcaaccagctggcctttggaattgacaagagcaagagcatctgtgtggaccagaacaagcccctcttcatcacagctggcctggacagctttggccagatcggcagcccccctgtgcctgaaaatgacatcggcaagctgcacgcccacagccccatggagctgtggaagaaggtgtatgagaagctgttcccccccaagagcatcaacaccctgaaggacatcaaggaccctgcccgggacccccagtatgcagaaaatgaggtggatgagatgaggatccagaaggacctggtgctgtcctag

SEQ ID NO: 20107 - DNA, 2559 bp, synthetic construct
  source 1..2559: mol_type = other DNA; note = Synthetic coding sequence
atggaggccctgggccctggaggagaccgggccagccctgccagcagcaccagcagcctggacctgtggcacctgtccatgagagctgacagcgcctacagcagcttctctgctgccagcggcggccctgagcccaggacccagagccctggaacagacctgctgccctacctggactgggactatgtgcgggtggtgtggggcggccctggccctgcccccccagatgctgccctgtgcaccagcccccggcccaggcctgctgtggccgcccggagcggcccccagcccacagaggtgcccggcaccccaggccccctgaaccggcaggccacccccctgctgtatgccctggccgctgaggccgaggccgccgcccaggccgctgagccccccagccccccagccagcagagctgcctaccggcagaggctgcagggcgcccagaggagagtgctgcgggagaccagcttccagaggaaggagctgaggatgagcctgcctgcccggctgcggcccaccgtgcctgcccggcccccagccacccaccccaggtctgccagcctgagccaccctggaggagagggggagcccgcccggagccgggccccagcccctggaacagctggccggggccccctggccaaccagcagaggaagtggtgcttcagcgagcccgggaagctggacagagtgggccggggcggcggccctgccagagaatgtctgggggaggcctgcagcagcagcggcctgcccggccctgagcccctggagttccagcacccagccctggccaagtttgaagatcatgaggtgggctggctgcctgagacccagccccagggctccatgaacctggacagcggcagcctgaagctgggagatgccttccggcctgccagccgcagccgcagcgccagcggggaggtgctgggctcctggggcggcagcggcggcaccatccccatcgtgcaggccgtgccccagggcgctgagaccccccggcccctcttccagaccaagctgagccgcttcctgccccagaaggaggccgctgtgatgtacccagctgagctgccccagagcagccctgctgacagcgagcagagggtgtctgagacctgcatcgtgcctgcctggctgcccagcctgcctgatgaggtgttcctggaggaggcccccctggtgaggatgaggagccccccagacccccacgccagccagggccccccagcctctgtgcacgccagtgaccagccctacggcaccggcctgggccagaggacaggccaggtgacagtgcccacagagtaccccctgcatgaatgtcctggaacagctggagcagatgactgctggcagggcgtgaatggatctgtgggcatcagccggcccaccagccacacccccaccggcacagccaatgacaacatccccaccatcgaccccaccggcctgaccaccaaccccccaacagctgctgagagtgacctgctgaagcctgtgcctgcagatgccctgggcctgtctggaaatgacaccccaggccccagccacaacacagccctggcccggggcaccggccagcccggcagccggcccacctggcccagccagtgcctggaggagctggtgcaggagctggcccggctggaccccagcctgtgtgaccccctggccagccagcccagccctgagccccccctgggcctgctggatggcctcatccccctggccgaggtgcgggccgccatgaggcctgcctgtggggaggccggggaggaggccgccagcacctttgagcccggcagctaccagttctccttcacccagctgctgcctgccccccgggaggagacccggctggagaacccagccacccaccctgtgctggaccagccctgtggccagggcctgcctgcccccaacaacagcatccagggcaagaaggtggagctggccgcccggctgcagaagatgctgcaggacctgcacacagagcaggagcggctgcagggcgaggcccaggcctgggcccggcggcaggccgccctggaggccgctgtgcggcaggcctgtgccccccaggagctggagcgcttcagccgcttcatggctgacctggagcgggtgctgggcctgctgctgctgctgggcagccggctggcccgggtgagaagagccctggcccgggccgccagtgacagcgaccctgatgagcaggccagcctgctgcagaggctgcggctgctgcagaggcaggaggaggatgccaaggagctgaaggagcacgtggcccggcgggagagagctgtgcgggaggtgctggtgcgggccctgcctgtggaggagctgcgggtgtactgtgccctgctggccggcaaggctgctgtgctggcccagcagaggaacctggatgagcgcatccggctgctgcaggaccagctggatgccatcagagatgacctgggccaccacgcccccagccccagccctgcccggcccccaggcacctgcccccctgtgcagccccccttccccctgctgctgacctag

SEQ ID NO: 20108 - DNA, 1776 bp, synthetic construct
  source 1..1776: mol_type = other DNA; note = Synthetic coding sequence
atggcccagggctctgtgtccttcaatgatgtgacagtggacttcacccaggaggagtggcagcacctggaccacgcccagaagaccctgtacatggatgtgatgctggagaactactgccacctgatctctgtgggctgccacatgaccaagccagatgtgatcctgaagctggagcggggggaggagccctggaccagctttgctggccacacctgcctggaggagaactggaaggccgaggacttcctggtgaagttcaaggagcaccaggagaagtacagccgctctgtggtgtccatcaaccacaagaagctggtgaaggagaagagcaagatctatgagaagaccttcaccctgggcaagaaccctgtgaacagcaagaacctgcccccagaatatgacacccacggccgcatcctgaagaatgtgtctgagctgatcatcagcaacctgaacccagccaggaagaggctgtctgagtacaacggctacggcaagagcctgctgagcaccaagcaggagaccacccaccctgaggtgaagagccacaaccagagcgcccgggccttcagccacaatgaggtgctgatgcagtaccagaagacagagaccccagcccagagctttggctacaatgactgtgagaagagcttcctgcagagaggaggcctcatcacccacagccggccctacaagggggagaaccccagcgtgtacaacaagaagaggcgggccaccaacatcgagaagaagcacacctgcaatgaatgtgggaagagcttctgcaggaagtctgtgctgatcctgcaccagggcatccacagcgaggagaagccctaccagtgccaccagtgtggaaatgccttccggaggaagagctacctgattgaccaccagaggacccacactggagagaagccctatgagtgcaatgactgtgggaagagcttccggcagaagaccaccctgagcctgcaccagaggatccacactggagagaagccctacatctgcaaggaatgtgggaagagcttccaccagaaggccaacctgactgtgcaccagaggacccacactggagagaagccctacatctgcaatgaatgtgggaagagcttcagccagaagaccaccctggccctgcacgagaagacccacaatgaggagaagccctacatctgcagtgaatgtgggaagagcttccggcagaagaccaccctggtggcccaccagaggacccacactggagagaagagctatgagtgcccccactgtgggaaggccttcaggatgaagagctacctgattgaccaccacaggacccacactggagagaagccctatgagtgcaatgaatgtgggaagagcttcagccagaagaccaacctgaacctgcaccagaggatccacactggagagaagccctacgtgtgcaatgaatgtgggaagagcttccggcagaaggccaccctgactgtgcaccagaagatccacacaggccagaagagctatgagtgcccccagtgtgggaaggccttcagcaggaagagctacctgatccaccaccagaggacccacactggagagaagccctacaagtgcagtgaatgtgggaagtgcttccggcagaagaccaacctgattgtgcaccagaggacccacactggagagaagccctacgtgtgcaatgaatgtgggaagagcttctcctacaagaggaacctgattgtgcaccagaggacccacaagggggagaacatcgagatgcagtag

SEQ ID NO: 20109 - DNA, 2934 bp, synthetic construct
  source 1..2934: mol_type = other DNA; note = Synthetic coding sequence
atgggctggaagcccagcgaggcccggggccagagccagagcttccaggccagcggcctgcagcccaggagcctgaaggccgcccggcgggccaccggccgcccagacaggagccgggccgcccggcccaccatggaccccagcgcccacaggagccgggccgccccacccaacatggaccctgacccccaggccggcgtgcaggtgggcatgagggtggtgcggggcgtggactggaagtggggccagcaggatggaggagagggcggcgtgggcaccgtggtggagctgggccgccacggcagccccagcaccccagacagaacagtggtggtgcagtgggaccagggcaccaggaccaactaccgggccggctaccagggcgcccatgacctgctgctgtatgacaatgcccagatcggcgtgcgccaccccaacatcatctgtgactgctgcaagaagcacggcctgcggggcatgcgctggaagtgccgggtgtgcctggactatgacctgtgcacccagtgctacatgcacaacaagcatgagctggcccacgcctttgacagatatgaaacagcccacagcaggcctgtgaccctgagcccccggcagggcctgccccgcatccccctgcggggcatcttccagggcgccaaggtggtgcggggccctgactgggagtggggcagccaggatggaggagagggcaagccaggccgggtggtggacatccggggctgggatgtggagaccggccgctctgtggcctctgtgacctgggcagatggcaccaccaacgtgtacagagtgggccacaagggcaaggtggacctgaagtgtgtgggggaggccgccggcggcttctactacaaggaccacctgccccggctgggcaagccagctgagctgcagaggagagtgtctgctgacagccagcccttccagcacggggacaaggtgaagtgcctgctggacacagatgtgctgcgggagatgcaggagggccatggaggctggaaccccaggatggccgagcaccacagcttctgggtgggagatgtggtgcgggtgattggagacctggacacagtgaagaggctgcaggccggccacggggagtggacagatgacatggccccagccctgggccgggtgggcaaggtggtgaaggtgtttggagatggcaacctgcgggtggccgtggccggccagcgctggaccttcagccccagctgcctggtggcctacagaccagaagaagatgccaacctggatgtggccgagcgggcccgggagaacaagagcagcctgtctgtggccctggacaagctgcgggcccagaagagtgaccctgagcaccctggccgcctggtggtggaggtggccctgggcaatgctgcccgggccctggacctgctgcggcggcggcctgagcaggtggacaccaagaaccagggccgcacagccctgcaggtggccgcctacctgggccaggtggagctgatccggctgctgctgcaggcccgggccggcgtggacctgcctgatgatgagggcaacacagccctgcactatgctgccctgggcaaccagcctgaggccaccagggtgctgctgtctgctggctgcagagcagatgccatcaacagcacccagagcacagccctgcacgtggccgtgcagaggggcttcctggaggtggtgcgggccctgtgtgagcggggctgtgatgtgaacctgcctgatgcccacagcgacacccccctgcacagcgccatctctgctggcaccggggccagcggcatcgtggaggtgctgacagaggtgcccaacattgatgtgacagccaccaacagccagggcttcaccctgctgcaccacgccagcctgaagggccacgccctggccgtgaggaagatcctggcccgggcccggcagctggtggatgccaagaaggaggatggcttcaccgccctgcacctggccgccctgaacaaccaccgggaggtggcccagatcctgatccgggagggccgctgtgatgtgaatgtgaggaacaggaagctgcagagccccctgcacctggccgtgcagcaggcccacgtgggcctggtgcccctgctggtggatgctggctgcagcgtgaatgcagaagatgaggagggggacacagccctgcacgtggccctgcagaggcaccagctgctgcccctggtggctgatggagctggaggagaccccggccccctgcagctgctgagccggctgcaggccagcggcctgcccggcagcgctgagctgactgtgggcgctgctgtggcctgcttcctggccctggagggcgcagatgtgtcctacaccaaccaccggggccgcagccccctggacctggccgctgagggccgggtgctgaaggccctgcagggctgtgcccagcgcttccgggagcggcaggccggcggcggggccgcccctggcccccggcagaccctgggcacccccaacacagtgaccaacctgcacgtgggcgccgcccctggccctgaggccgcagaatgtctggtgtgcagcgagctggccctgctggtgctcttcagcccctgccagcacaggacagtgtgtgaagaatgtgcccggaggatgaagaagtgcatccgctgccaggtggtggtgtccaagaagctgcggccagatggcagcgaggtggccagcgctgccccagcccctggccccccccggcagctggtggaggagctgcagagccgctaccggcagatggaggagcgcatcacctgccccatctgcatcgacagccacatccggctggtgttccagtgtggccatggagcctgtgccccctgtggcagcgccctgagcgcctgccccatctgccggcagcccatccgggaccgcatccagatctttgtgtag

SEQ ID NO: 20110 - DNA, 2262 bp, synthetic construct
  source 1..2262: mol_type = other DNA; note = Synthetic coding sequence
atggaccctgacccccaggccggcgtgcaggtgggcatgagggtggtgcggggcgtggactggaagtggggccagcaggatggaggagagggcggcgtgggcaccgtggtggagctgggccgccacggcagccccagcaccccagacagaacagtggtggtgcagtgggaccagggcaccaggaccaactaccgggccggctaccagggcgcccatgacctgctgctgtatgacaatgcccagatcggcgtgcgccaccccaacatcatctgtgactgctgcaagaagcacggcctgcggggcatgcgctggaagtgccgggtgtgcctggactatgacctgtgcacccagtgctacatgcacaacaagcatgagctggcccacgcctttgacagatatgaaacagcccacagcaggcctgtgaccctgagcccccggcagggcctgccccgcatccccctgcggggcatcttccagggcgccaaggtggtgcggggccctgactgggagtggggcagccaggacggcaagccagctgagctgcagaggagagtgtctgctgacagccagcccttccagcacggggacaaggtgaagtgcctgctggacacagatgtgctgcgggagatgcaggagggccacggcggctggaaccccaggatggccgagttcatcggccagacaggcaccgtgcaccgcatcacagacagaggagatgtgcgggtgcagttcaaccacgagacccgctggaccttccaccctggggccctgaccaagcaccacagcttctgggtgggagatgtggtgcgggtcatcggggacctggacacagtgaagaggctgcaggccggccatggagagtggacagatgacatggccccagccctgggccgggtgggcaaggtggtgaaggtgtttggagatggcaacctgcgggtggccgtggccggccagcgctggaccttcagccccagctgcctggtggcctacagacctgaggaggatgccaacctggatgtggccgagcgggcccgggagaacaagagcagcctgtctgtggccctggacaagctgcgggcccagaagagtgaccctgagcaccctggccgcctggtggtggaggtggccctgggcaatgctgcccgggccctggacctgctgcggcggcggcctgagcaggtggacaccaagaaccagggccgcacagccctgcaggtggccgcctacctgggccaggtggagctgatccggctgctgctgcaggcccgggccggcgtggacctgcctgatgatgagggcaacacagccctgcactacgccgccctgggcaaccagcctgaggccaccagggtgctgctgtctgctggctgcagagcagatgccatcaacagcacccagagcacagccctgcacgtggccgtgcagaggggcttcctggaggtggtgcgggccctgtgtgagcggggctgtgatgtgaacctgcctgatgcccacagcgacacccccctgcacagcgccatctctgctggcactggagccagcggcatcgtggaggtgctgacagaggtgcccaacattgatgtgacagccaccaacagccagggcttcaccctgctgcaccacgccagcctgaagggccacgccctggccgtgaggaagatcctggcccgggcccggcagctggtggatgccaagaaggaggatggcttcaccgccctgcacctggccgccctgaacaaccaccgggaggtggcccagatcctgatccgggagggccgctgtgatgtgaatgtgaggaacaggaagctgcagagccccctgcacctggccgtgcagcaggcccacgtgggcctggtgcccctgctggtggatgctggctgcagcgtgaatgcagaagatgaggagggggacacagccctgcacgtggccctgcagaggcaccagctgctgcccctggtggctgatggagctggaggagaccccggccccctgcagctgctgagccggctgcaggccagcggcctgcccggcagcgctgagctgactgtgggcgctgctgtggcctgcttcctggccctggagggcgcagatgtgtcctacaccaaccaccggggccgcagccccctggacctggccgctgagggccgggtgctgaaggccctgcagggctgtgcccagcgcttccgggtgcgggcccaggatgaggaggtgcaccaggtgcctgggggccggcagcaggagacagccccccggcggctgtag

SEQ ID NO: 20111 - DNA, 1161 bp, synthetic construct
  source 1..1161: mol_type = other DNA; note = Synthetic coding sequence
atgggcaaggactactacaagatcctgggcatccccagcggggccaatgaagatgagatcaagaaggcctacaggaagatggccctgaagtaccacccagacaagaacaaggagcccaatgctgaggagaagttcaaggagattgctgaggcctatgatgtgctgagtgaccccaagaagaggggcctgtatgaccagtatggagaggagggcctgaagacaggaggcggcaccagcggcggcagcagcggcagcttccactacaccttccatggagacccccacgccacctttgccagcttcttcggcggcagcaacccctttgacatcttctttgccagcagccgcagcacccggcccttcagcggctttgatcctgatgacatggatgtggatgaagatgaggacccctttggagccttcggccgcttcggcttcaacggcctgagccggggcccccggcgggcccctgagcccctgtaccccaggaggaaggtgcaggacccccctgtggtgcatgagctgcgggtgtccctggaggagatctaccacggcagcaccaagaggatgaagatcacccggcggcggctgaacccagatggccgcacagtgaggacagaggacaagatcctgcacatcgtcatcaagaggggctggaaggagggcaccaagatcaccttccccaaggagggagatgccaccccagacaacatcccagctgacatcgtgtttgtgctgaaggacaagccccacgcccacttcagaagagatggcaccaacgtgctgtacagcgccctgatcagcctgaaggaggccctgtgtggctgcaccgtgaacatccccaccattgatggccgggtcatccccctgccctgcaatgatgtgatcaagccaggcaccgtgaagaggctgcggggggagggcctgcccttccccaaggtgcccacccagagaggagacctgattgtggagttcaaggtgcgcttcccagaccggctgaccccccagacccggcagatcctgaagcagcagtacccccagcacagcctgcacagcatgtgcacccagctggatgtgcactggaccctggccaccttcagcaagatgcagaagaaggccaccggcttccaggagaatgtgcctgtgcctgaccccttctag

SEQ ID NO: 20112 - DNA, 1008 bp, synthetic construct
  source 1..1008: mol_type = other DNA; note = Synthetic coding sequence
atgctgggcagcggcttcaaggccgagcggctgcgggtgaacctgcggctggtgatcaaccggctgaagctgctggagaagaagaagacagagctggcccagaaggccaggaaggagattgctgactacctggccgccggcaaggatgagcgggcccgcatccgggtggagcacatcatccgggaggactacctggtggaggccatggagatcctggagctgtactgtgacctgctgctggccaggtttggcctcatccagagcatgaaggagctggacagcggcctggccgagagcgtgtccaccctcatctgggccgccccccggctgcagagcgaggtggccgagctgaagatcgtggccgaccagctgtgtgccaagtacagcaaggagtatggcaagctgtgcaggaccaaccagattggaacagtgaatgaccggctgatgcacaagctgtctgtggaggccccacccaagatcctggtggagcgctacctgattgaaattgccaagaactacaacgtgccctatgagccagattctgtggtgatggccgaggcccctcctggggtggagacagacctgattgatgtgggcttcacagatgatgtgaagaagggcggccctggccggggcggcagcggcggcttcaccgcccctgtgggcggcccagatggcaccgtgcccatgcccatgcccatgcccatgcccatgcccagcgccaacacccccttctcctaccccctgcccaagggccctgtggatgacatcaatgctgacaagaacatcagcagcgcccagatcgtgggccctggccccaagccagaggccagcgccaagctgcccagcaggcctgctgacaactatgacaactttgtgctgcctgagctgcccagcgtgcctgacaccctgcccacagccagcgctggggccagcaccagcgcctctgaagatattgactttgatgacctgagccgccgctttgaggagctgaagaagaagacctag

SEQ ID NO: 20113 - DNA, 1101 bp, synthetic construct
  source 1..1101: mol_type = other DNA; note = Synthetic coding sequence
atgctgggcagcggcttcaaggccgagcggctgcgggtgaacctgcggctggtgatcaaccggctgaagctgctggagaagaagaagacagagctggcccagaaggccaggaaggagattgctgactacctggccgccggcaaggatgagcgggcccgcatccgggtggagcacatcatccgggaggactacctggtggaggccatggagatcctggagctgtactgtgacctgctgctggccaggtttggcctcatccagagcatgaaggagctggacagcggcctggccgagagcgtgtccaccctcatctgggccgccccccggctgcagagcgaggtggccgagctgaagatcgtggccgaccagctgtgtgccaagtacagcaaggagtatggcaagctgtgcaggaccaaccagattggaacagtgaatgaccggctgatgcacaagctgtctgtggaggccccacccaagatcctggtggagcgctacctgattgaaattgccaagaactacaacgtgccctatgagccagattctgtggtgatggccgaggcccctcctggggtggagacagacctgattgatgtgggcttcacagatgatgtgaagaagggcggccctggccggggcggcagcggcggcttcaccgcccctgtgggcggcccagatggcaccgtgcccatgcccatgcccatgcccatgcccatgcccagcgccaacacccccttctcctaccccctgcccaagggccccagcgacttcaacggcctgcccatgggcacctaccaggccttccccaacatccaccccccccagatcccagccaccccacccagctatgagagcgtggatgacatcaatgctgacaagaacatcagcagcgcccagatcgtgggccctggccccaagccagaggccagcgccaagctgcccagcaggcctgctgacaactatgacaactttgtgctgcctgagctgcccagcgtgcctgacaccctgcccacagccagcgctggggccagcaccagcgccagcgaggacatcgactttgatgacctgagcagaagatttgaggagctgaagaagaagacctag

SEQ ID NO: 20114 - DNA, 948 bp, synthetic construct
  source 1..948: mol_type = other DNA; note = Synthetic coding sequence
atggagaagtatgagaagctggccaagacaggagagggcagctatggagtggtgttcaagtgcaggaacaagaccagcggccaggtggtggccgtgaagaagtttgtggagagtgaagatgatcctgtggtgaagaagatcgccctgcgggagatccgcatgctgaagcagctgaagcaccccaacctggtgaacctgattgaggtgttccggaggaagaggaagatgcacctggtgtttgagtactgtgaccacaccctgctgaatgagctggagaggaaccccaacggggtggctgatggagtcatcaagtctgtgctgtggcagaccctgcaggccctgaacttctgccacatccacaactgcatccaccgggacatcaagccagagaacatcctgatcaccaagcagggcatcatcaagatctgtgactttggatttgcccagatcctgatccctggagatgcctacacagattatgtggccacccgctggtaccgggcccctgagctgctggtgggggacacccagtatggcagctctgtggacatctgggccatcggctgtgtgtttgctgagctgctgaccggccagcccctgtggccaggcaagagtgatgtggaccagctgtacctgatcatccgcaccctgggcaagctgatccccaggcaccagagcatcttcaagagcaatggcttcttccacggcatcagcatccctgagcctgaggacatggagaccctggaggagaagttcagtgatgtgcaccctgtggccctgaacttcatgaagggctgcctgaagatgaacccagatgaccggctgacctgcagccagctgctggagagcagctactttgacagcttccaggaggcccagatcaagaggaaggccagaaatgaaggaagaaacagaagacggcagcaggtgctgcccctgaagagctag

SEQ ID NO: 20115 - DNA, 948 bp, synthetic construct
  source 1..948: mol_type = other DNA; note = Synthetic coding sequence
atggccaatgaccccctggagggcttccacgaggtgaacctggccagccccaccagcccagacctgctgggcgtgtatgagagcggcacccaggagcagaccaccagccccagcgtcatctaccggccccaccccagcgccctgagctctgtgcccatccaggccaatgccctggatgtgtctgagctgcccacccagcctgtgtacagcagcccccggcggctgaactgtgccgagatcagcagcatctccttccacgtgacagatcctgccccctgcagcaccagcggcgtgacagctggcctgaccaagctgaccaccaggaaggacaactacaatgctgagcgggagttcctgcagggcgccaccatcacagaggcctgtgatggcagtgatgacatcttcggcctgagcacagacagcctgagccggctgcggagccccagcgtgctggaggtgcgggagaagggctatgaaaggctgaaggaggagctggccaaggcccagcgggagctgaagctgaaggatgaggagtgtgagcggctgagcaaggtgcgggaccagctgggccaggagctggaggagctgacagccagcctgtttgaggaggcccacaagatggtgcgggaggccaacatcaagcaggccacagctgagaagcagctgaaggaggcccagggcaagattgatgtgctgcaggccgaggtggccgccctgaagaccctggtgctgagcagcagccccaccagccccacccaggagcccctgcccggcggcaagacccccttcaagaagggccacaccaggaacaagagcaccagcagcgccatgagcggcagccaccaggacctgagcgtcatccagcccatcgtgaaggactgcaaggaggtgacccaccagggcctgagccccctgaccctgctgatcctggtgagcagccaccactag

SEQ ID NO: 20116 - DNA, 1074 bp, synthetic construct
  source 1..1074: mol_type = other DNA; note = Synthetic coding sequence
atggcccgggagaatggagagagcagcagctcctggaagaagcaggccgaggacatcaagaagatctttgagttcaaggagaccctgggcactggagccttcagcgaggtggtgctggccgaggagaaggccaccgggaagctgtttgctgtgaagtgcatccccaagaaggccctgaagggcaaggagagcagcattgaaaatgaaattgctgtgctgaggaagatcaagcatgaaaatattgtggccctggaggacatctatgagagccccaaccacctgtacctggtgatgcagctggtgtctggaggagagctgtttgaccgcatcgtggagaagggcttctacacagagaaggatgccagcaccctcatccggcaggtgctggatgctgtgtactacctgcacaggatgggcatcgtgcaccgggacctgaagccagagaacctgctgtactacagccaggatgaggagagcaagatcatgatcagtgactttggcctgagcaagatggagggcaaaggagatgtgatgagcacagcctgtggcaccccaggctacgtggcccctgaggtgctggcccagaagccctacagcaaggctgtggactgctggagcattggagtcatcgcctacatcctgctgtgtggctacccacccttctatgatgaaaatgacagcaagctgtttgagcagatcctgaaggccgagtatgaatttgacagcccctactgggatgacatcagtgacagcgccaaggacttcatccggaacctgatggagaaggaccccaacaagcgctacacctgtgagcaggccgcccggcacccctggattgctggggacacagccctgaacaagaacatccacgagagcgtgtctgcccagatcaggaagaactttgccaagagcaagtggaggcaggccttcaatgccacagctgtggtgcgccacatgaggaagctgcacctgggcagcagcctggacagcagcaatgcctctgtgagcagcagcctgagcctggccagccagaaggactgtgcctacgtggccaagccagagagcctgtcctag

SEQ ID NO: 20117 - DNA, 1158 bp, synthetic construct
  source 1..1158: mol_type = other DNA; note = Synthetic coding sequence
atggcccgggagaatggagagagcagcagctcctggaagaagcaggccgaggacatcaagaagatctttgagttcaaggagaccctgggcactggagccttcagcgaggtggtgctggccgaggagaaggccaccgggaagctgtttgctgtgaagtgcatccccaagaaggccctgaagggcaaggagagcagcattgaaaatgaaattgctgtgctgaggaagatcaagcatgaaaatattgtggccctggaggacatctatgagagccccaaccacctgtacctggtgatgcagctggtgtctggaggagagctgtttgaccgcatcgtggagaagggcttctacacagagaaggatgccagcaccctcatccggcaggtgctggatgctgtgtactacctgcacaggatgggcatcgtgcaccgggacctgaagccagagaacctgctgtactacagccaggatgaggagagcaagatcatgatcagtgactttggcctgagcaagatggagggcaaaggagatgtgatgagcacagcctgtggcaccccaggctacgtggcccctgaggtgctggcccagaagccctacagcaaggctgtggactgctggagcattggagtcatcgcctacatcctgctgtgtggctacccacccttctatgatgaaaatgacagcaagctgtttgagcagatcctgaaggccgagtatgaatttgacagcccctactgggatgacatcagtgacagcgccaaggacttcatccggaacctgatggagaaggaccccaacaagcgctacacctgtgagcaggccgcccggcacccctggattgctggggacacagccctgaacaagaacatccacgagagcgtgtctgcccagatcaggaagaactttgccaagagcaagtggaggcaggccttcaatgccacagctgtggtgcgccacatgaggaagctgcacctgggcagcagcctggacagcagcaatgcctctgtgagcagcagcctgagcctggccagccagaaggactgcctggcccccagcaccctgtgcagcttcatcagcagcagcagtggagtgtctggagtgggcgctgagcggcggccccggcccaccaccgtgacagctgtgcacagcggcagcaagtag

SEQ ID NO: 20118 - DNA, 888 bp, synthetic construct
  source 1..888: mol_type = other DNA; note = Synthetic coding sequence
atgaagaaggagcacgtgctgcactgccagttcagcgcctggtaccccttcttccggggcgtgaccatcaagagcgtcatcctgcccctgccccagaatgtgaaggactacctgctggatgatggcaccctggtggtgtctggaagagatgacccccccacccacagccagcctgacagtgatgatgaggccgaggagatccagtggagcgatgatgaaaatacagccaccctgacagcccctgagttccctgagtttgccaccaaggtgcaggaggccatcaacagcctgggcggcagcgtcttccccaagctgaactggagcgcccccagagatgcctactggatcgccatgaacagcagcctgaagtgcaagaccctgagtgacatcttcctgctcttcaagagcagtgacttcatcacccgggacttcacccagcccttcatccactgcacagatgacagcccagacccctgcatcgagtatgagctggtgctgaggaagtggtgtgagctgatccctggagctgagttccgctgctttgtgaaggagaacaagctgattgtggtgtttgacatctacagagacagccggggcaaggtgtggctgattgacttcaacccctttggagaggtgacagacagcctgctcttcacctgggaggagctgatcagcgagaacaacctgaatggagacttcagcgaggtggatgcccaggagcaggacagccctgccttccgctgcaccaacagcgaggtgacagtgcagcccagcccctacctgagctaccgcctgcccaaggactttgtggacctgagcactggagaagatgcccacaagctgattgacttcctgaagctgaagaggaaccagcaggaggatgactag

SEQ ID NO: 20119 - DNA, 3273 bp, synthetic construct
  source 1..3273: mol_type = other DNA; note = Synthetic coding sequence
atggagcagcccaagggcgtggactggacagtcatcatcctgacctgccagtacaaggacagcgtgcaggtgttccagcgggagctggaggtgcggcagaagcgggagcagatcccagctggcaccctgctgctggccgtggaggaccctgagaagagggtgggcagcggcggggccaccctgaatgccctgctggtggccgctgagcacctgagcgcccgggccggcttcacctggatctgtgtgggcgtgtccctgtggatccggggctgccaccccccaggccgcctgcctgaggcctctgtgcaccgggccttccccctgctgcaggtggtgaccagtgatgtgctgcacagcgcctggatcctgatcctgcacatgggccgggacttcccctttgatgactgtggccgggccttcacctgcctgcctgtggagaaccctgaggcccctgtggaggccctggtgtgcaacctggactgcctgctggacatcatgacctaccgcctgggccctggcagccccccaggagtgtgggtgtgcagcacagacatgctgctgtctgtgcctgccaaccctggcatctcctgggacagcttccggggggcccgggtcatcgccctgcccggcagccctgcctatgcccagaaccacggcgtgtacctgacagacccccagggcctggtgctggacatctactaccagggcacagaagctgagatccagagatgtgtgcggccagatggccgggtgcccctggtgtctggagtggtgttcttctctgtggagacagctgagcggctgctggccacccacgtgtccccacccctggatgcctgcacctacctgggcctggacagcggggcccggcctgtgcagctgagcctcttctttgacatcctgcactgcatggccgagaatgtgacccgggaggacttcctggtgggccggcccccagagctgggccagggagatgctgatgtggccggctacctgcagagcgcccgggcccagctgtggagggagctgcgggaccagcccctgaccatggcctacgtgagcagcggcagctacagctacatgaccagcagcgccagcgagttcctgctgagcctgaccctgcccggggcccctggggcccagatcgtgcacagccaggtggaggagcagcagctgctggccgccggcagctctgtggtgtcctgcctgctggagggccctgtgcagctgggccctggctctgtgctgcagcactgccacctgcagggccccatccacatcggggccggctgcctggtgacaggcctggacacagcccacagcaaggccctgcacggccgggagctgcgggacctggtgctgcagggccaccacacccggctgcacggcagccctggccacgccttcaccctggtgggccgcctggacagctgggagcggcagggcgccggcacctacctgaatgtgccctggagcgagttcttcaagaggactggagtgcgggcctgggacctgtgggaccctgagaccctgcctgctgagtactgcctgcccagcgcccggctcttccctgtgctgcaccccagccgggagctgggcccccaggacctgctgtggatgctggaccaccaggaggatggaggagaggccctgcgggcctggagggcctcctggaggctgtcctgggagcagctgcagccctgcctggaccgggccgccaccctggccagccggcgggacctcttcttccggcaggccctgcacaaggcccggcacgtgctggaggcccggcaggacctgagcctgcggcccctcatctgggccgctgtgcgggagggctgccccggccccctgctggccaccctggaccaggtggccgccggggccggggaccccggggtggccgcccgggccctggcctgtgtggctgatgtgctgggctgcatggccgagggccggggcggcctgcggagcggccctgctgccaaccctgagtggatgaggcccttctcctacctggagtgtggggacctggccgccggcgtggaggccctggcccaggagcgggacaagtggctgagcaggcctgccctgctggtgcgggccgcccggcactatgagggcgccggccagatcctgatccggcaggccgtgatgtctgcccagcactttgtgtccacagagcaggtggagctgcccggccctggccagtgggtggtggccgagtgcccagcccgggtggacttcagcggcggctggagcgacaccccacccctggcctatgagctgggcggcgctgtgctgggcctggccgtgcgggtggatggaagaagacccatcggggcccgggcccggcgcatccctgagcctgagctgtggctggccgtgggcccccggcaggatgagatgacagtgaagatcgtgtgccgctgcctggccgacctgcgggactactgccagccccacgcccctggggccctgctgaaggccgccttcatctgtgccggcatcgtgcacgtgcacagcgagctgcagctgagcaccagcagcatcctggccggcacagccctggccgccctgcagagagctgctggccgggtggtgggcacagaggccctgattcatgctgtgctgcacctggagcaggtgctgaccaccggcggcggctggcaggaccaggtgggcggcctgatgcctggcatcaaggtgggccgcagccgggcccagctgcccctgaaggtggaggtggaggaggtgacagtgcctgagggctttgtgcagaagctgaatgaccacctgctgctggtgtacaccgggaagacccggctggccaggaacctgctgcaggatgtgctgcgctcctggtacgcccggctgcctgctgtggtgcagaatgcccacagcctggtgcggcagacagaagaatgtgccgagggcttccggcagggcagcctgcccctgctgggccagtgcctgaccagctactgggagcagaagaagctgatggcccctggctgtgagcccctgactgtgcggaggatgatggatgtgctggcccctcatgtgcacggccagagcctggccggggccggcggcggcggcttcctgtacctgctgaccaaggagccccagcagaaggaggccctggaggccgtgctggccaagacagagggcctgggcaactacagcatccacctggtggaggtggacacccagggcctgagcctgaagctgctgggcacagaggccagcacctgctgccccttcccctag

SEQ ID NO: 20120 - DNA, 318 bp, synthetic construct
  source 1..318: mol_type = other DNA; note = Synthetic coding sequence
atgctggagctggcccaggaccggctgcagtttgaaacagtggaggtgtctgagcccagcatgctgcagaagatcctgaccacccggcggcgggagactggaggaaatgagcccctgcctgtgcccaccctgcagcaccacctggcccccccagctgaggccaggaaggtgcccagcgccagccaggtgcaggccatcaagtgcttcctgagcaagtgctggagcctgaacatcagcaccaaggagtatgcctacctgaagggcaccgtgctcttcaaccctgggaagggcaaggaaaatgactgcaaccaccactag

SEQ ID NO: 20121 - DNA, 1413 bp, synthetic construct
  source 1..1413: mol_type = other DNA; note = Synthetic coding sequence
atggccggggagaaccaccagtggcagggcagcatcctgtacaacatgctgatgtctgccaagcagaccagggctgcccctgaggcccctgagacccggctggtggaccagtgctggggctgcagctgtggagatgagcccggggtgggccgggagggcctgctgggcggcagaaatgtggccctgctgtaccgctgctgcttctgtgggaaggaccacccccggcagggcagcatcctgtacagcatgctgaccagcgccaagcagacctacgccgcccccaaggcccctgaggccaccctgggcccctgctggggctgcagctgtggcagtgaccccggggtgggccgggccggcctgcccggcggccggcctgtggccctgctgtaccgctgctgcttctgtggggaggaccacccccggcagggcagcatcctgtacagcctgctgaccagcagcaagcagacccacgtggccccagctgcccctgaggcccggcctggaggagcctggtgggacaggagctactttgcccagaggcctgggggcaaggaggccctgcccggcggccgggccacagccctgctgtaccgctgctgcttctgtggggaggaccacccccagcagggcagcaccctgtactgtgtgcccaccagcaccaaccaggcccaggccgcccctgaggagcggccccgggccccctggtgggacaccagcagcggggccctgcggcctgtggccctgaagagcccccaggtggtgtgtgaggccgccagcgctggcctgctgaagaccctgcgctttgtgaagtacctgccctgcttccaggtgctgcccctggaccagcagctggtgctggtgaggaactgctgggccagcctgctgatgctggagctggcccaggaccggctgcagtttgagaccgtggaggtgtctgagcccagcatgctgcagaagatcctgaccaccaggagaagagagaccggcggcaatgagcccctgcctgtgcccaccctgcagcaccacctggcccctcctgctgaggccaggaaggtgcccagcgccagccaggtgcaggccatcaagtgcttcctgagcaagtgctggagcctgaacatcagcaccaaggagtatgcctacctgaagggcaccgtgctcttcaacccagatgtgcccggcctgcagtgtgtgaagtacatccagggcctgcagtggggcacccagcagatcctgtctgagcacaccaggatgacccaccagggcccccatgaccgcttcatcgagctgaacagcaccctcttcctgctgcgcttcatcaatgccaacgtgattgctgagctgttcttccggcccatcattggaacagtgtccatggatgacatgatgctggagatgctgtgcaccaagatctag

SEQ ID NO: 20122 - DNA, 2028 bp, synthetic construct
  source 1..2028: mol_type = other DNA; note = Synthetic coding sequence
atgctgcgggccacagccccctgctggttccccccaggctacccagaggccaagaaggtggccgaggaggccgccctggaggccagccgccacctgggcggggagcagagccaggccggggcccctgagggcagcaagatgctgcgggccacagccccctgctggttccggcccggctacccagaggccaagaaggtggccaaggaggccgcccctgaggccagccgccacctgggcgctgagcagagccctgctggggcccctgagggcagcaagatgctgcgggccacagccccctgctggttccccccaggctacccagaggccaagaaggtggccgaggaggccgccctggaggcccctgagttccccctgcccagccaccagcctgcccagagctttggcctgtgggtgccccagatgcacaagcaggccagcgcctttgtggacatccaggccgagccccagaacagaggccctgctgtgcccccagcctggcccaagatggtgacagagagctgctacttccctgcccagaggggcagcgcctgccgcctgcctgctgccccccggctgacagagcggcccagcggcgtgcgcatcagcgcccccaggaagaggaagaccatcgcccacagcagcagcccctgcctggtgacaggctacacagatgccaagaggaccagggtggccagcagcagccagaggagccggggcagcaaggtgggccggcagcccgggaagaccaggaacagaagtggcatggcctgcaagaccacagccaccaccagcagcaagagaattgtgcggcgggccagcctgcccagcctgagcctgaagaagcccatcatcctgcggagcagcggctgccaggtgcccaccgtgctgcggcggggctacctgcagctgttcacagaagaatgtctgaagttctgtgccagcaagcaggaggccgaggagaaggccctgaatgaggagaaggtggcctatgactgcagccccaacaagaaccgctacctgaatgtggtgctgaacaccctgaagaggctgaagggcctgacccccagctccatgcctggcctgagccgggccgccctgtacagccggctgcaggagttcctgctgacccaggaccagctgaaggaaaatggctaccccttcccccaccctgagaggcctggaggagctgtgctcttcaccggccagggcaagggccctggggacagcagctgccgggtgtgctgccgctgtggcacagagtacctggtgagcagcagcggccgctgtgtgcgggaccagctgtgctactaccactggggccgggtgcgcagcagccaggtggccggcggccgggtgtcccagtacacctgctgtgccgccgcccctggctctgtgggctgccaggtggccaagcagcacgtgagagatggcaggaaggagagcctggatggctttgtggagaccttcaagaaggagctgagcagagatgcctacccaggcatctatgccctggactgtgagatgtgctacaccacccacggcctggagctgaccagggtgacagtggtggatgctgacatgagggtggtgtatgacacctttgtgaagccagacaatgaaattgtggactacaacacccgcttctctggagtgacagaagcagatgtggccaagaccagcatcaccctgccccaggtgcaggccatcctgctgtccttcttcagcgcccagaccatcctgattggccacagcctggagagtgacctgctggccctgaagctgatccacagcacagtggtggacacagctgtgctcttcccccactacctgggcttcccctacaagaggagcctgaggaacctggccgctgactacctggcccagatcatccaggacagccaggacggccacaacagcagtgaagatgccagcgcctgcctgcagctggtgatgtggaaggtgcggcagagggcccagatccagcccaggcacaggtctgccagccctgctgccctggcctgcccctag

SEQ ID NO: 20123 - DNA, 711 bp, synthetic construct
  source 1..711: mol_type = other DNA; note = Synthetic coding sequence
atgcacaccacccagaaggacaccacctacaccaagatctttgtgggcggcctgccctaccacaccacagatgccagcctgaggaagtactttgaggtgtttggagaaattgaggaggccgtggtgatcacagaccggcagacaggcaagagccggggctacggctttgtgaccatggctgacagagctgctgctgagcgggcctgcaaggaccccaaccccatcattgatggcaggaaggccaacgtgaacctggcctacctgggcgccaagccccgcatcatgcagcccggctttgcctttggagtgcagcagctgcacccagccctgatccagaggcccttcggcatcccagcccactacgtgtacccccaggcctttgtgcagcccggggtggtgatcccccacgtgcagcccacagctgctgctgccagcaccaccccctacatcgactacacaggagctgcctatgcccagtacagcgctgctgctgctgctgctgctgctgctgctgcctatgaccagtacccctatgctgccagccctgctgctgctggctacgtgacagctgggggctacggctatgctgtgcagcagcccatcacagctgctgcccctggaacagctgctgctgctgctgctgctgctgctgctgctgctgccttcggccagtaccagccccagcagctgcagacagacaggatgcagtag

SEQ ID NO: 20124 - DNA, 4389 bp, synthetic construct
  source 1..4389: mol_type = other DNA; note = Synthetic coding sequence
atggcccctgtgcatggagatgacagcctgagtgacagcggcagctttgtgagcagccgggcccggcgggagaagaagagcaagaagggccggcaggaggccctggagcggctgaagaaggccaaggccggggagaagtacaagtatgaggtggaggacttcaccggggtgtatgaggaggtggatgaggagcagtacagcaagctggtgcaggcccggcaggatgatgactggatcgtggatgatgatggcatcggctacgtggaggatggccgggagatctttgatgatgacctggaggatgatgccctggatgctgatgagaagggcaaggatggcaaggccaggaacaaggacaagagaaatgtgaagaagctggccgtgaccaagcccaacaacatcaagtccatgtttattgcctgtgccggcaagaagacagctgacaaggctgtggacctgagcaaggatggcctgctgggggacatcctgcaggacctgaacacagagaccccccagatcaccccacctcctgtgatgatcctgaagaagaagaggagcattggagccagccccaaccccttctctgtgcacacagccacagctgtgcccagcggcaagatcgccagccctgtgtccaggaaggagccccccctgacccctgtgcccctgaagagagctgagtttgctggagatgatgtgcaggtggagagcacagaggaggagcaggagagcggggccatggagtttgaagatggagactttgatgagcccatggaggtggaggaggtggacctggagcccatggccgccaaggcctgggacaaggagagcgagcctgctgaggaggtgaagcaggaggccgacagcgggaaaggaacagtgtcctacctgggcagcttcctgcctgatgtgtcctgctgggacatcgaccaggagggggacagcagcttctctgtgcaggaggtgcaggtggacagcagccacctgcccctggtgaagggagcagatgaggagcaggtgttccacttctactggctggatgcctatgaggaccagtacaaccagcccggggtggtgttcctgtttgggaaggtgtggattgaatctgctgagacccacgtgtcctgctgcgtgatggtgaagaacattgaaagaaccctgtacttcctgccccgggagatgaagattgacctgaacacaggcaaggagaccggcacccccatctccatgaaggatgtgtatgaggagtttgatgagaagatcgccaccaagtacaagatcatgaagttcaagagcaagcctgtggagaagaactatgcctttgagatcccagatgtgcctgagaagtctgagtacctggaggtgaagtacagcgctgagatgccccagctgccccaggacctgaagggggagaccttcagccacgtgtttggcaccaacaccagcagcctggagctgttcctgatgaacaggaagatcaagggcccctgctggctggaggtgaagagcccccagctgctgaaccagcctgtgtcctggtgcaaggtggaggccatggccctgaagccagacctggtgaatgtcatcaaggatgtgagccccccacccctggtggtgatggccttctccatgaagaccatgcagaatgccaagaaccaccagaatgagatcatcgccatggccgccctggtgcaccacagctttgccctggacaaggccgcccccaagccacccttccagagccacttctgtgtggtgtccaagcccaaggactgcatcttcccctatgccttcaaggaggtgattgagaagaagaatgtgaaggtggaggtggccgccacagagaggaccctgctgggcttcttcctggccaaggtgcacaagattgatcctgacatcatcgtgggccacaacatctacggctttgagctggaggtgctgctgcagaggatcaacgtgtgcaaggccccccactggagcaagattggccgcctgaagaggagcaacatgcccaagctgggcggccgcagcggctttggagagagaaatgccacctgtggccgcatgatctgtgatgtggagatcagcgccaaggagctgatccgctgcaagagctaccacctgtctgagctggtgcagcagatcctgaagacagagcgggtggtgatccccatggagaacatccagaacatgtacagcgagagcagccagctgctgtacctgctggagcacacctggaaggatgccaagttcatcctgcagatcatgtgtgagctgaatgtgctgcccctggccctgcagatcaccaacattgctggcaacatcatgagcaggaccctgatgggcggccgctcagaaagaaatgagttcctgctgctgcacgccttctatgagaacaactacatcgtgcctgacaagcagatcttcaggaagccccagcagaagctgggagatgaagatgaggagattgatggagacaccaacaagtacaagaagggcaggaagaaggccgcctatgctgggggcctggtgctggaccccaaggtgggcttctatgacaagttcatcctgctgctggacttcaacagcctgtaccccagcatcatccaggagttcaacatctgcttcaccaccgtgcagagggtggccagcgaggcccagaaggtgacagaagatggagagcaggagcagatccctgagctgcctgaccccagcctggagatgggcatcctgccccgggagatcaggaagctggtggagaggaggaagcaggtgaagcagctgatgaagcagcaggacctgaacccagacctgatcctgcagtatgacatccggcagaaggccctgaagctgacagccaacagcatgtatggctgcctgggcttctcctacagccgcttctacgccaagcccctggccgccctggtgacctacaagggccgggagatcctgatgcacaccaaggagatggtgcagaagatgaacctggaggtgatctacggggacacagacagcatcatgatcaacaccaacagcaccaacctggaggaggtgttcaagctgggcaacaaggtgaagtctgaggtgaacaagctgtacaagctgctggagattgatattgatggagtcttcaagagcctgctgctgctgaagaagaagaagtatgctgccctggtggtggagcccaccagtgatggcaactacgtgaccaagcaggagctgaagggcctggacatcgtgagaagagactggtgtgacctggccaaggacaccggcaacttcgtcatcggccagatcctgagtgaccagagccgggacaccatcgtggagaacatccagaagaggctgattgaaattggagaaaatgtgctgaatggatctgtgcctgtgtcccagtttgagatcaacaaggccctgaccaaggacccccaggactacccagacaagaagagcctgccccacgtgcacgtggccctgtggatcaacagccagggcggcaggaaggtgaaggccggggacacagtgtcctatgtgatctgccaggacggcagcaacctgacagccagccagagggcctatgcccctgagcagctgcagaagcaggacaacctgaccatcgacacccagtactacctggcccagcagatccaccctgtggtggcccgcatctgtgagcccattgatggcattgatgctgtgctgattgccacctggctgggcctggaccccacccagttccgggtgcaccactaccacaaggatgaggagaatgatgccctgctgggcggccctgcccagctgacagatgaggagaagtacagagactgtgagcgcttcaagtgcccctgccccacctgtggcacagagaacatctatgacaacgtgtttgatggcagcggcacagacatggagcccagcctgtaccgctgcagcaacatcgactgcaaggccagccccctgaccttcaccgtgcagctgagcaacaagctgatcatggacatccgccgcttcatcaagaagtactatgatggctggctgatctgtgaggagcccacctgcaggaacagaaccaggcacctgcccctgcagttcagcaggacaggccccctgtgcccagcctgcatgaaggccaccctgcagcctgagtacagcgacaagagcctgtacacccagctgtgcttctaccgctacatctttgatgctgaatgtgccctggagaagctgaccacagaccacgagaaggacaagctgaagaagcagttcttcacccccaaggtgctgcaggactacaggaagctgaagaacacagctgagcagttcctgagccgcagcggctacagcgaggtgaacctgagcaagctgtttgctggctgtgctgtgaagagctag

SEQ ID NO: 20125 - DNA, 2673 bp, synthetic construct
  source 1..2673: mol_type = other DNA; note = Synthetic coding sequence
atgtctgccaacaacagccccccatctgcccagaagtctgtgctgcccacagccatcccagctgtgctgcctgctgccagcccctgcagcagccccaagacaggcctgagcgcccggctgagcaatggcagcttcagcgcccccagcctgaccaacagccggggctctgtgcacacagtgtccttcctgctgcagatcggcctgacccgggagagcgtgaccatcgaggcccaggagctgagcctgtctgctgtgaaggacctggtgtgcagcatcgtgtaccagaagttcccagaatgtggcttcttcggcatgtatgacaagatcctgctcttcagacatgacatgaacagcgagaacatcctgcagctgatcaccagcgcagatgagatccacgagggggacctggtggaggtggtgctgagcgccctggccaccgtggaggacttccagatccggccccacaccctgtatgtgcacagctacaaggcccccaccttctgtgactactgtggggagatgctgtggggcctggtgcggcagggcctgaagtgtgagggctgcggcctgaactaccacaagagatgtgccttcaagatccccaacaactgcagcggcgtgaggaagaggcggctgagcaatgtgtccctgcccggccctggcctgtctgtgccccggcccctgcagccagaatatgtggccctgcccagcgaggagagccacgtgcaccaggagcccagcaagaggatccccagctggagcggccggcccatctggatggagaagatggtgatgtgccgggtgaaggtgccccacacctttgctgtgcacagctacacccggcccaccatctgccagtactgcaagaggctgctgaagggcctcttccggcagggcatgcagtgcaaggactgcaagttcaactgccacaagagatgtgccagcaaggtgccccgggactgcctgggggaggtgaccttcaacggggagcccagcagcctgggcacagacacagacatccccatggacatcgacaacaatgacatcaacagcgacagcagccggggcctggatgacacagaggagcccagccccccagaggacaagatgttcttcctggaccccagcgacctggatgtggagagagatgaggaggccgtgaagaccatcagccccagcaccagcaacaacatccccctgatgagggtggtgcagagcatcaagcacaccaagaggaagagcagcaccatggtgaaggagggctggatggtgcactacaccagccgggacaacctgaggaagaggcactactggaggctggacagcaagtgcctgaccctcttccagaatgaaagtggcagcaagtactacaaggagatccccctgtctgagatcctgcgcatcagcagcccccgggacttcaccaacatcagccagggcagcaacccccactgctttgagatcatcacagacaccatggtgtactttgtgggagaaaataatggagacagcagccacaaccctgtgctggccgccactggagtgggcctggatgtggcccagagctgggagaaggccatccggcaggccctgatgcctgtgaccccccaggcctctgtgtgcaccagccctggccagggcaaggaccacaaggacctgagcaccagcatctctgtgagcaactgccagatccaggagaatgtggacatcagcacagtgtaccagatctttgctgatgaggtgctgggcagcggccagtttggaattgtgtatggaggcaagcacaggaagacaggaagagatgtggccatcaaggtgattgacaagatgaggttccccaccaagcaggagagccagctgagaaatgaggtggccatcctgcagaacctgcaccaccctggcatcgtgaacctggagtgcatgtttgagaccccagagcgggtgtttgtggtgatggagaagctgcacggggacatgctggagatgatcctgagcagcgagaagagccggctgcctgagcgcatcaccaagttcatggtgacccagatcctggtggccctgaggaacctgcacttcaagaacatcgtgcactgtgacctgaagccagaaaatgtgctgctggccagcgctgagcccttcccccaggtgaagctgtgtgactttggatttgcccgcatcattggagagaagagcttcagaagatctgtggtgggcaccccagcctacctggcccctgaggtgctgcggagcaagggctacaacagaagcctggacatgtggagcgtgggcgtcatcatctacgtgtccctgagcggcaccttccccttcaatgaagatgaggacatcaatgaccagatccagaatgctgccttcatgtacccacccaacccctggagggagatcagcggggaggccatcgacctgatcaacaacctgctgcaggtgaagatgaggaagcgctacagcgtggacaagagcctgagccacccctggctgcaggactaccagacctggctggacctgcgggagtttgagacccgcatcggggagcgctacatcacccatgaaagtgatgatgcccgctgggagatccacgcctacacccacaacctggtgtaccccaagcacttcatcatggcccccaacccagatgacatggaggaggacccctag

SEQ ID NO: 20126 - DNA, 4407 bp, synthetic construct
  source 1..4407: mol_type = other DNA; note = Synthetic coding sequence
atggcccctgtgcatggagatgactgtgaaattggagccagcgccctgagtgacagcggcagctttgtgagcagccgggcccggcgggagaagaagagcaagaagggccggcaggaggccctggagcggctgaagaaggccaaggccggggagaagtacaagtatgaggtggaggacttcaccggggtgtatgaggaggtggatgaggagcagtacagcaagctggtgcaggcccggcaggatgatgactggatcgtggatgatgatggcatcggctacgtggaggatggccgggagatctttgatgatgacctggaggatgatgccctggatgctgatgagaagggcaaggatggcaaggccaggaacaaggacaagagaaatgtgaagaagctggccgtgaccaagcccaacaacatcaagtccatgtttattgcctgtgccggcaagaagacagctgacaaggctgtggacctgagcaaggatggcctgctgggggacatcctgcaggacctgaacacagagaccccccagatcaccccacctcctgtgatgatcctgaagaagaagaggagcattggagccagccccaaccccttctctgtgcacacagccacagctgtgcccagcggcaagatcgccagccctgtgtccaggaaggagccccccctgacccctgtgcccctgaagagagctgagtttgctggagatgatgtgcaggtggagagcacagaggaggagcaggagagcggggccatggagtttgaagatggagactttgatgagcccatggaggtggaggaggtggacctggagcccatggccgccaaggcctgggacaaggagagcgagcctgctgaggaggtgaagcaggaggccgacagcgggaaaggaacagtgtcctacctgggcagcttcctgcctgatgtgtcctgctgggacatcgaccaggagggggacagcagcttctctgtgcaggaggtgcaggtggacagcagccacctgcccctggtgaagggagcagatgaggagcaggtgttccacttctactggctggatgcctatgaggaccagtacaaccagcccggggtggtgttcctgtttgggaaggtgtggattgaatctgctgagacccacgtgtcctgctgcgtgatggtgaagaacattgaaagaaccctgtacttcctgccccgggagatgaagattgacctgaacacaggcaaggagaccggcacccccatctccatgaaggatgtgtatgaggagtttgatgagaagatcgccaccaagtacaagatcatgaagttcaagagcaagcctgtggagaagaactatgcctttgagatcccagatgtgcctgagaagtctgagtacctggaggtgaagtacagcgctgagatgccccagctgccccaggacctgaagggggagaccttcagccacgtgtttggcaccaacaccagcagcctggagctgttcctgatgaacaggaagatcaagggcccctgctggctggaggtgaagagcccccagctgctgaaccagcctgtgtcctggtgcaaggtggaggccatggccctgaagccagacctggtgaatgtcatcaaggatgtgagccccccacccctggtggtgatggccttctccatgaagaccatgcagaatgccaagaaccaccagaatgagatcatcgccatggccgccctggtgcaccacagctttgccctggacaaggccgcccccaagccacccttccagagccacttctgtgtggtgtccaagcccaaggactgcatcttcccctatgccttcaaggaggtgattgagaagaagaatgtgaaggtggaggtggccgccacagagaggaccctgctgggcttcttcctggccaaggtgcacaagattgatcctgacatcatcgtgggccacaacatctacggctttgagctggaggtgctgctgcagaggatcaacgtgtgcaaggccccccactggagcaagattggccgcctgaagaggagcaacatgcccaagctgggcggccgcagcggctttggagagagaaatgccacctgtggccgcatgatctgtgatgtggagatcagcgccaaggagctgatccgctgcaagagctaccacctgtctgagctggtgcagcagatcctgaagacagagcgggtggtgatccccatggagaacatccagaacatgtacagcgagagcagccagctgctgtacctgctggagcacacctggaaggatgccaagttcatcctgcagatcatgtgtgagctgaatgtgctgcccctggccctgcagatcaccaacattgctggcaacatcatgagcaggaccctgatgggcggccgctcagaaagaaatgagttcctgctgctgcacgccttctatgagaacaactacatcgtgcctgacaagcagatcttcaggaagccccagcagaagctgggagatgaagatgaggagattgatggagacaccaacaagtacaagaagggcaggaagaaggccgcctatgctgggggcctggtgctggaccccaaggtgggcttctatgacaagttcatcctgctgctggacttcaacagcctgtaccccagcatcatccaggagttcaacatctgcttcaccaccgtgcagagggtggccagcgaggcccagaaggtgacagaagatggagagcaggagcagatccctgagctgcctgaccccagcctggagatgggcatcctgccccgggagatcaggaagctggtggagaggaggaagcaggtgaagcagctgatgaagcagcaggacctgaacccagacctgatcctgcagtatgacatccggcagaaggccctgaagctgacagccaacagcatgtatggctgcctgggcttctcctacagccgcttctacgccaagcccctggccgccctggtgacctacaagggccgggagatcctgatgcacaccaaggagatggtgcagaagatgaacctggaggtgatctacggggacacagacagcatcatgatcaacaccaacagcaccaacctggaggaggtgttcaagctgggcaacaaggtgaagtctgaggtgaacaagctgtacaagctgctggagattgatattgatggagtcttcaagagcctgctgctgctgaagaagaagaagtatgctgccctggtggtggagcccaccagtgatggcaactacgtgaccaagcaggagctgaagggcctggacatcgtgagaagagactggtgtgacctggccaaggacaccggcaacttcgtcatcggccagatcctgagtgaccagagccgggacaccatcgtggagaacatccagaagaggctgattgaaattggagaaaatgtgctgaatggatctgtgcctgtgtcccagtttgagatcaacaaggccctgaccaaggacccccaggactacccagacaagaagagcctgccccacgtgcacgtggccctgtggatcaacagccagggcggcaggaaggtgaaggccggggacacagtgtcctatgtgatctgccaggacggcagcaacctgacagccagccagagggcctatgcccctgagcagctgcagaagcaggacaacctgaccatcgacacccagtactacctggcccagcagatccaccctgtggtggcccgcatctgtgagcccattgatggcattgatgctgtgctgattgccacctggctgggcctggaccccacccagttccgggtgcaccactaccacaaggatgaggagaatgatgccctgctgggcggccctgcccagctgacagatgaggagaagtacagagactgtgagcgcttcaagtgcccctgccccacctgtggcacagagaacatctatgacaacgtgtttgatggcagcggcacagacatggagcccagcctgtaccgctgcagcaacatcgactgcaaggccagccccctgaccttcaccgtgcagctgagcaacaagctgatcatggacatccgccgcttcatcaagaagtactatgatggctggctgatctgtgaggagcccacctgcaggaacagaaccaggcacctgcccctgcagttcagcaggacaggccccctgtgcccagcctgcatgaaggccaccctgcagcctgagtacagcgacaagagcctgtacacccagctgtgcttctaccgctacatctttgatgctgaatgtgccctggagaagctgaccacagaccacgagaaggacaagctgaagaagcagttcttcacccccaaggtgctgcaggactacaggaagctgaagaacacagctgagcagttcctgagccgcagcggctacagcgaggtgaacctgagcaagctgtttgctggctgtgctgtgaagagctag

SEQ ID NO: 20127 - DNA, 399 bp, synthetic construct
  source 1..399: mol_type = other DNA; note = Synthetic coding sequence
atggtggagcccttcctgggcacctggaagctggtgtccagtgaaaattttgaggactacatgaaggagctgggcgtgaactttgctgccaggaacatggccggcctggtgaagcccaccgtgaccatctctgtggatggcaagatgatgaccatcagaacagagagcagcttccaggacaccaagatctccttcaagctgggggaggagtttgatgagaccacagctgacaacaggaaggtgaagagcaccatcaccctggagaatggctccatgatccacgtgcagaagtggctgggcaaggagaccaccatcaagaggaagatcgtggatgagaagatggtggtggagtgcaagatgaacaacatcgtgtccacccgcatctatgagaaggtgtag

SEQ ID NO: 20128 - DNA, 555 bp, synthetic construct
  source 1..555: mol_type = other DNA; note = Synthetic coding sequence
atggacagaggagagcagggcctgctgaggacagatcctgtgcctgaggagggagaagatgtggccgccaccatcagcgccacagagaccctgtctgaggaggagcaggaggagctgcggcgggagctggccaaggtggaggaggagatccagaccctgagccaggtgctggccgccaaggagaagcacctggccgagatcaagaggaagctgggcatcaacagcctgcaggagctgaagcagaacatcgccaagggctggcaggatgtgacagccaccagcgcctacaagaagaccagcgagaccctgagccaggccggccagaaggccagcgctgccttcagctctgtgggcagcgtcatcaccaagaagctggaggatgtgaagaacagccccaccttcaagagctttgaggagaaggtggagaacctgaagagcaaggtgggcggcaccaagccagctggaggagactttggagaggtgctgaacagcgctgccaatgccagcgccaccaccacagagcccctgcctgagaagacccaggagagcctgtag

SEQ ID NO: 20129 - DNA, 675 bp, synthetic construct
  source 1..675: mol_type = other DNA; note = Synthetic coding sequence
atggactgccgggagatggacctgtatgaggactaccagagcccctttgattttgatgctggggtgaacaagagctacctgtacctgagccccagcggcaacagcagccccccaggcagccccaccctgcagaagtttggcctgctgaggacagatcctgtgcctgaggagggagaagatgtggccgccaccatcagcgccacagagaccctgtctgaggaggagcaggaggagctgcggcgggagctggccaaggtggaggaggagatccagaccctgagccaggtgctggccgccaaggagaagcacctggccgagatcaagaggaagctgggcatcaacagcctgcaggagctgaagcagaacatcgccaagggctggcaggatgtgacagccaccagcgcctacaagaagaccagcgagaccctgagccaggccggccagaaggccagcgctgccttcagctctgtgggcagcgtcatcaccaagaagctggaggatgtgaagaacagccccaccttcaagagctttgaggagaaggtggagaacctgaagagcaaggtgggcggcaccaagccagctggaggagactttggagaggtgctgaacagcgctgccaatgccagcgccaccaccacagagcccctgcctgagaagacccaggagagcctgtag

SEQ ID NO: 20130 - DNA, 285 bp, synthetic construct
  source 1..285: mol_type = other DNA; note = Synthetic coding sequence
cccagggctgcccggagccggggccctgctgtgtcccggccccgggcccccaggcctgagctgaccacagaagctggggagcccgcccggcgctgtgtgcccccctatgagcaccggcccggcatgcagtgtgctgtgaccaccccaccacccagctactacccctaccccaacctgcgctgggacaccagccacttcaagaagagcggcggcccccagaggaacaactacgtgatccaccctgagtttgtgtctgagacctacccagactaccgctgctggtag

SEQ ID NO: 20131 - DNA, 1110 bp, synthetic construct
  source 1..1110: mol_type = other DNA; note = Synthetic coding sequence
atgcctgtggtgaccacagatgctgagagcgagaccggcatccccaagagcctgagcaatgagccccccagcgagaccatggaggagattgagcacacctgcccccagccccggctgaccctgacagccccagccccctttgctgatgagaccaactgccagtgccaggcccctcatgagaagctgaccatcgcccaggcccggctgggcaccccagctgacaggcctgtgcgggtgtatgcagatggcatctttgacctcttccacagcggccacgcccgggccctgatgcaggccaagaccctcttccccaacagctacctgctggtgggcgtgtgcagtgatgacctgacccacaagttcaagggcttcaccgtgatgaatgaggccgagagatatgaggccctgcggcactgccgctacgtggatgaagtcatcagagatgccccctggaccctgaccccagagttcctggagaagcacaagattgactttgtggcccatgatgacatcccctacagcagcgctggcagtgatgatgtgtacaagcacatcaaggaggccggcatgtttgtgcccacccagaggacagagggcatcagcaccagtgacatcatcaccagaattgtgcgggactatgatgtgtatgcccggaggaacctgcagaggggctacacagccaaggagctgaatgtgtccttcatcaatgagaagcgctaccgcttccagaaccaggtggacaagatgaaggagaaggtgaagaatgtggaggagaggagcaaggagtttgtgaacagagtggaggagaagagccatgacctgatccagaagtgggaggagaagagccgggagttcatcggcaacttcctggagctgtttggaccagatggagcctggaagcagatgttccaggagaggagcagcaggatgctgcaggccctgagccccaagcagagccctgtgagcagccccaccaggagccgcagccccagccgcagccccagccccaccttctcctggctgcccctgaagaccagcccccccagcagccccaaggccgccagcgccagcatcagctccatgtctgaaggagatgaagatgagaagtag

SEQ ID NO: 20132 - DNA, 1056 bp, synthetic construct
  source 1..1056: mol_type = other DNA; note = Synthetic coding sequence
atggtgggccaccaggagtgcatcatggaggaggacaacagagccccccagctgtggaggaagaccctgacagccccagccccctttgctgatgagaccaactgccagtgccaggcccctcatgagaagctgaccatcgcccaggcccggctgggcaccccagctgacaggcctgtgcgggtgtatgcagatggcatctttgacctcttccacagcggccacgcccgggccctgatgcaggccaagaccctcttccccaacagctacctgctggtgggcgtgtgcagtgatgacctgacccacaagttcaagggcttcaccgtgatgaatgaggccgagagatatgaggccctgcggcactgccgctacgtggatgaagtcatcagagatgccccctggaccctgaccccagagttcctggagaagcacaagattgactttgtggcccatgatgacatcccctacagcagcgctggcagtgatgatgtgtacaagcacatcaaggaggccggcatgtttgtgcccacccagaggacagagggcatcagcaccagtgacatcatcaccagaattgtgcgggactatgatgtgtatgcccggaggaacctgcagaggggctacacagccaaggagctgaatgtgtccttcatcaatgagaagcgctaccgcttccagaaccaggtggacaagatgaaggagaaggtgaagaatgtggaggagaggagcaaggagtttgtgaacagagtggaggagaagagccatgacctgatccagaagtgggaggagaagagccgggagttcatcggcaacttcctggagctgtttggaccagatggagcctggaagcagatgttccaggagaggagcagcaggatgctgcaggccctgagccccaagcagagccctgtgagcagccccaccaggagccgcagccccagccgcagccccagccccaccttctcctggctgcccctgaagaccagcccccccagcagccccaaggccgccagcgccagcatcagctccatgtctgaaggagatgaagatgagaagtag

SEQ ID NO: 20133 - DNA, 600 bp, synthetic construct
  source 1..600: mol_type = other DNA; note = Synthetic coding sequence
atggctgacaagagcaagttcatcgagtacattgatgaggccctggagaagagcaaggagacagccctgagccacctgttcttcacctaccagggcatcccctaccccatcaccatgtgcaccagcgagaccttccaggccctggacacctttgaggcccggcatgatgacatcgtgctggccagctaccccaagtgtggcagcaactggatcctgcacatcgtgtctgagctgatctatgctgtgtccaagaagaagtacaagtacccagagttccctgtgctggagtgtggggacagcgagaagtaccagaacctggccgccggcatcaagcagattgctgagttcctgggcttcttcctgaccggggagcagatccagaccatctctgtgcagagcaccttccaggccatgagggccaagagccaggacacccacggggctgtgggccccttcctgttcaggaagggggaggtgggggactggaagaacctcttcagcgagatccagaaccaggagatggatgagaagttcaaggagtgcctggccggcaccagcctgggcgccaagctgaagtatgagagctactgccagggctag

SEQ ID NO: 20134 - DNA, 1527 bp, synthetic construct
  source 1..1527: mol_type = other DNA; note = Synthetic coding sequence
atgcgctgccccaagtctgctgtgaccatgagaaatgaggagctgctgctgagcaatggaacagccaacaagatgaatggagccctggaccacagcgaccagcctgaccctgatgccatcaagatgtttgtgggccagatccccaggtcctggagcgagaaggagctgaaggagctgtttgagccctatggagctgtgtaccagatcaacgtgctgcgggacaggagccagaaccccccccagagcaagggctgctgctttgtgaccttctacaccaggaaggccgccctggaggcccagaatgccctgcacaacatcaagaccctgcccggcatgcaccaccccatccagatgaagccagctgacagcgagaagagcaatgctgtggaggacaggaagctgttcatcggcatggtgtccaagaagtgcaatgaaaatgacatccgggtgatgttcagccccttcggccagatcgaggagtgccgcatcctgcggggcccagatggcctgagccggggctgtgcctttgtgaccttcagcacccgggccatggcccagaatgccatcaaggccatgcaccagagccagaccatggagggctgcagcagccccatcgtggtgaagtttgctgacacccagaaggacaaggagcagaggcggctgcagcagcagctggcccagcagatgcagcagctgaacacagccacctggggcaacctgaccggcctgggcggcctgaccccccagtacctggccctgctgcagcaggccaccagcagcagcaacctgggcgccttcagcggcatccagcagatggccggcatgaatgccctgcagctgcagaacctggccaccctggccgctgctgctgctgctgcccagaccagcgccaccagcaccaatgccaaccccctgagcaccaccagcagcgccctgggcgccctgaccagccctgtggccgccagcacccccaacagcacagctggggccgccatgaacagcctgaccagcctgggcaccctgcagggcctggccggggccaccgtgggcctgaacaacatcaatgccctggccggcatggccgccctgaatggaggcctgggcgccaccggcctgaccaacggcacagctggcaccatggatgccctgacccaggcctacagcggcatccagcagtatgctgctgctgccctgcccaccctgtacagccagagcctgctgcagcagcagagcgctgctggcagccagaaggagggccctgagggcgccaacctcttcatctaccacctgccccaggagtttggagaccaggacatcctgcagatgttcatgccctttggaaatgtcatcagcgccaaggtgttcatcgacaagcagaccaacctgagcaagtgcttcggctttgtgtcctatgacaaccctgtgtctgcccaggccgccatccaggccatgaatggcttccagatcggcatgaagaggctgaaggtgcagctgaagaggagcaagaatgacagcaagccctactag

SEQ ID NO: 20135 - DNA, 1215 bp, synthetic construct
  source 1..1215: mol_type = other DNA; note = Synthetic coding sequence
atgggcagcagccaggaggagggcctgcgctgccagcccagccagcctgaccatgatgctgatggccactgcggccctgacctggagggcgctgagcgggccagcgccaccccaggccccccaggcctgctgaacagccacaggcctgctgacagtgatgacaccaatgctgctggccccagcgctgccctgctggagggcctgctgctgggcggcggcaagcccagcccccacagcacccggcccggccccttcttctacatcggcggcagcaatggagccaccatcatcagcagctactgcaagagcaagggctggcagagaattcatgacagcagaagagatgactacaccctgaagtggtgtgaggtgaagagccgggacagctatggcagcttccgggagggggagcagctgctgtaccagctgcccaacaacaagctgctgaccaccaagattggcctgctgagcaccctgcggggccgggcccgggccatgagcaaggccagcaaggtgcctggaggagtgcaggcccggctggagaaggatgctgctgccccagccctggaggacctgccctggaccagccctggctacctgcggccccagagggtgctgaggatggaggagttcttccctgagacctaccgcctggacctgaagcatgagcgggaggccttcttcaccctgtttgatgagacccagatctggatctgcaagcccacagccagcaaccagggcaagggcatcttcctgctgaggaaccaggaggaggtggccgccctgcaggccaagaccaggtccatggaggatgaccccatccaccacaagacccccttccggggcccccaggcccgggtggtgcagcgctacatccagaaccccctgctggtggatggcaggaagtttgatgtgcgcagctacctgctgattgcctgcaccaccccctacatgatcttctttggacatggctacgcccggctgaccctgagcctgtatgacccccacagcagtgacctgggcggccacctgaccaaccagttcatgcagaagaagagccccctgtacatgctgctgaaggagcacacagtgtggagcatggagcacctgaaccgctacatcagtgacaccttctggaaggcccggggcctggccaaggactgggtgttcaccaccctgaaggtgcggcccctgtgcccccctgtgtgggagtag

SEQ ID NO: 20136 - DNA, 2022 bp, synthetic construct
  source 1..2022: mol_type = other DNA; note = Synthetic coding sequence
atggaccacagctgcacccgcttcatccacagaagaggcccccccaccaggacccgggccggcttcaagaggggcaagaggccccgcatccagcagaggccccgggcccgggtgtctggcaccatcccagccagccggctgcacccagccccagccagccagcccggcccctgcccagcccctggccactgccctgtgggccctgcccacgagcggcccatgggcagcagccaggaggagggcctgcgctgccagcccagccagcctgaccatgatgctgatggccactgcggccctgacctggagggcgctgagcgggccagcgccaccccaggccccccaggcctgctgaacagccacaggcctgctgacagtgatgacaccaatgctgctggccccagcgctgccctgctggagggcctgctgctgggcggcggcaagcccagcccccacagcaccaggcctggccccttcttctacatcggcggcagcaatggagccaccatcatcagcagctactgcaagagcaagggctggcagagaattcatgacagcagaagagatgactacaccctgaagtggtgtgaggtgaagagccgggacagctatggcagcttccgggagggggagcagctgctgtaccagctgcccaacaacaagctgctgaccaccaagattggcctgctgagcaccctgcggggccgggcccgggccatgagcaaggccagcaaggtgcctgggggcgtgcaggcccggctggagaaggatgctgctgccccagccctggaggacctgccctggaccagccctggctacctgcggccccagagggtgctgaggatggaggagttcttccctgagacctaccgcctggacctgaagcatgagcgggaggccttcttcaccctgtttgatgagacccagatctggatctgcaagcccacagccagcaaccagggcaagggcatcttcctgctgaggaaccaggaggaggtggccgccctgcaggccaagaccaggtccatggaggatgaccccatccaccacaagacccccttccggggcccccaggcccgggtggtgcagcgctacatccagaaccccctgctggtggatggcaggaagtttgatgtgcgcagctacctgctgattgcctgcaccaccccctacatgatcttcttcggccacggctacgcccggctgaccctgagcctgtatgacccccacagcagtgacctgggcggccacctgaccaaccagttcatgcagaagaagagccccctgtacatgctgctgaaggagcacacagtgtggagcatggagcacctgaaccgctacatcagtgacaccttctggaaggcccggggcctggccaaggactgggtgttcaccaccctgaagaagaggatgcagcagatcatggcccactgcttcctggccgccaagcccaagctggactgcaagctgggctactttgacctgattggctgtgacttcctgattgatgacaacttcaaggtgtggctgctggagatgaacagcaacccagccctgcacaccaactgtgaggtgctgaaggaggtgattcctggggtggtgattgagaccctggacctggtgctggagaccttcaggaagagcctgcggggccagaagatgctgcccctgctgagccagaggagatttgtgctgctgcacaatggagaggccgacccccggccccacctgggcggcagctgcagcctgcggcgctggccacccctgcccacccggcaggccaagagcagcggcccccccatgccccacgccccagaccagcccggggcccggcggcctgcccccccacccctggtgccccagaggccccggcccccaggccctgacctggacagcgcccatgatggagagccccaggcccctggaacagagcagagcggcactggaaacagacacccagcccaggagcccagccctggaacagccaaggaggagcgggaggagccagaaaatgcccggccctag

SEQ ID NO: 20137 - DNA, 2022 bp, synthetic construct; identical to SEQ ID NO: 20136
  source 1..2022: mol_type = other DNA; note = Synthetic coding sequence

SEQ ID NO: 20138 - DNA, 393 bp, synthetic construct
  source 1..393: mol_type = other DNA; note = Synthetic coding sequence
atgacagaggacagccagaggaacttccgctctgtgtactatgagaaggtgggcttccggggcgtggaggagaagaagagcctggagatcctgctgaaggatgaccggctggacacagagaagctgtgcaccttcagccagcgcttccccctgcccagcatgtaccgggccctggtgtggaaggtgctgctgggcatcctgcccccccaccacgagagccacgccaaggtgatgatgtacaggaaggagcagtacctggatgtgctgcacgccctgaaggtggtgcgctttgtgtctgatgccaccccccaggccgaggtgtacctgaggatgtaccagctggagagcggcaagctgcccaggagccccagcttccccctggagccagactag

SEQ ID NO: 20139 - DNA, 882 bp, synthetic construct; identical to SEQ ID NO: 19447
  source 1..882: mol_type = other DNA; note = Synthetic coding sequence

SEQ ID NO: 20140 - DNA, 801 bp, synthetic construct
  source 1..801: mol_type = other DNA; note = Synthetic coding sequence
atgacagaggacagccagaggaacttccgctctgtgtactatgagaaggtgggcttccggggcgtggaggagaagaagagcctggagatcctgctgaaggatgaccggctgggcatcctgcccccccaccacgagagccacgccaaggtgatgatgtacaggaaggagcagtacctggatgtgctgcacgccctgaaggtggtgcgctttgtgtctgatgccaccccccaggccgaggtgtacctgaggatgtaccagctggagagcggcaagctgcccaggagccccagcttccccctggagccagatgatgaggtgttcctggccatcgccaaggccatggaggagatggtggaggacagcgtggactgctactggatcaccaggagatttgtgaaccagctgaacaccaagtacagagacagcctgccccagctgcccaaggcctttgagcagtacctgaacctggaggatggccgcctgctgacccacctgaggatgtgcagcgctgcccccaagctgccctatgacctgtggttcaagcgctgctttgctggctgcctgcctgagagcagcctgcagagggtgtgggacaaggtggtgtctggcagctgcaagatcctggtgtttgtggccgtggagatcctgctgaccttcaagatcaaggtgatggccctgaacagcgctgagaagatcaccaagttcctggagaacatcccccaggacagcagtgatgccatcgtgtccaaggccatcgacctgtggcacaagcactgcggcacccctgtgcacagcagctag

SEQ ID NO: 20141 - DNA, 3672 bp, synthetic construct
  source 1..3672: mol_type = other DNA; note = Synthetic coding sequence
atgatgagcctgtctgtgcggccccagaggcggctgctgagcgcccgggtgaacagaagccagagctttgctggggtgctgggcagccatgagcggggccccagcctgtccttccgctccttccctgtgttcagccccccaggcccccccaggaagcccccagccctgagccgggtgtccaggatgttttctgtggcccaccctgctgccaaggtgccccagcctgagcggctggacctggtgtacacagccctgaagaggggcctgacagcctacctggaggtgcaccagcaggagcaggagaagctgcagggccagatccgggagagcaagaggaacagccggctgggcttcctgtatgacctggacaagcaggtgaagagcattgagcgcttcctgcggcggctggagttccacgccagcaagattgatgagctgtatgaggcctactgtgtgcagaggcggctgagagatggagcctacaacatggtgcgggcctacaccaccggcagccctggcagccgggaggcccgggacagcctggccgaggccacccggggccaccgggagtacacagagagcatgtgcctgctggagagcgagctggaggcccagctgggggagttccacctgaggatgaagggcctggccggctttgcccggctgtgtgtgggggaccagtatgagatctgcatgaagtatggccggcagcgctggaagctgcggggcagaattgagggcagcggcaagcaggtgtgggacagcgaggagaccatcttcctgcccctgctgacagagttcctgagcatcaaggtgacagagctgaagggcctggccaaccacgtggtggtgggctctgtgtcctgtgagaccaaggacctgtttgctgccctgccccaggtggtggccgtggacatcaatgacctgggcaccatcaagctgagcctggaggtgacctggagcccctttgacaaggatgaccagcccagcgctgccagctctgtgaacaaggccagcacagtgaccaagcgcttcagcacctacagccagagccccccagacacccccagcctgcgggagcaggccttctacaacatgctgcggcggcaggaggagctggagaatggaacagcctggagcctgagcagcgagagcagtgatgacagcagcagcccccagctgtctggaacagcccggcacagccctgccccccggcccctggtgcagcagcctgagcccctgcccatccaggtggccttcagaagacctgagacccccagcagcggccccctggatgaggagggcgctgtggcccctgtgctggccaatggacatgccccctacagcaggaccctgagccacatcagcgaggcctctgtggatgctgccctggccgaggcctctgtggaggccgtgggccctgagagcctggcctggggccccagcccccccacccacccagcccccacccatggagagcaccccagccctgtgcccccagccctggaccccggccacagcgccaccagcagcaccctgggcaccaccggctctgtgcccaccagcacagatcctgcccccagcgcccacctggacagcgtgcacaagagcacagacagcggccccagcgagctgcccggccccacccacaccaccaccggcagcacctacagcgccatcaccaccacccacagcgcccccagccccctgacccacaccaccaccggcagcacccacaagcccatcatcagcaccctgaccaccaccggccccaccctgaacatcatcggccctgtgcagaccaccaccagccccacccacaccatgcccagccccacccacaccacagccagccccacccacaccagcaccagccccacccacacccccaccagccccacccacaagacctccatgagcccccccaccaccaccagccccacccccagcggcatgggcctggtgcagacagccaccagccccacccaccccaccaccagccccacccaccccaccaccagccccatcctgatcaacgtgagccccagcaccagcctggagctggccaccctgagcagccccagcaagcacagcgaccccaccctgcctggaacagacagcctgccctgcagcccccctgtgagcaacagctacacccaggccgaccccatggcccccaggaccccccaccccagccctgcccacagcagcaggaagcccctgaccagccctgccccagaccccagcgagagcacagtgcagagcctgagccccacccccagcccccccaccccagccccccagcacagcgacctgtgcctggccatggctgtgcagacccctgtgcccacagctgctgggggcagcggggacaggagcctggaggaggccctgggcgccctgatggccgccctggatgactaccggggccagtttcctgagctgcagggcctggagcaggaggtgacccggctggagagcctgctgatgcagaggcagggcctgaccaggagccgggccagcagcctgagcatcaccgtggagcacgccctggagagcttctccttcctgaatgaagatgaagatgaagataatgatgtgcctggggaccggccccccagcagccctgaggccggggctgaagattccattgacagccccagcgcccggcccctgagcacaggctgcccagccctggatgctgccctggtgcgccacctgtaccactgcagccggctgctgctgaagctgggcaccttcggccccctgcgctgccaggaggcctgggccctggagcggctgctgcgggaggcccgggtgctggaggccgtgtgtgagttcagccgccgctgggagatcccagccagcagcgcccaggaggtggtgcagttcagcgccagcaggcctggcttcctgaccttctgggaccagtgcacagagcggctgagctgcttcctgtgccctgtggagcgggtgctgctgaccttctgcaaccagtacggggcccggctgagcctgcggcagcccggcctggccgaggccgtgtgtgtgaagttcctggaggatgccctgggccagaagctgccccggcggccccagcccggccctggagagcagctgactgtgttccagttctggagctttgtggagaccctggacagccccaccatggaggcctacgtgacagaaacagctgaggaggtgctgctggtgaggaacctgaacagtgatgaccaggccgtggtgctgaaggccctgcggctggcccctgagggccgcctgcggagagatggcctgcgggccctgagcagcctgctggtgcacggcaacaacaaggtgatggctgctgtgtccacccagctgcggagcctgagcctgggccccaccttccgggagcgggccctgctgtgcttcctggaccagctggaggatgaagatgtgcagaccagggtggccggctgcctggccctgggctgcatcaaggcccctgagggcatcgagcccctggtgtacctgtgccagacagacacagaagctgtgcgggaggccgcccggcagagcctgcagcagtgtggggaggagggccagagcgcccaccggcggctggaggagagcctggatgccctgccccgcatctttggacctggctccatggccagcacagccttctag

SEQ ID NO: 20142 - DNA, 123 bp, synthetic construct
  source 1..123: mol_type = other DNA; note = Synthetic coding sequence
atggctgatgaggagctggaggccctgcggcggcagaggctggccgagctgcaggccaagcatggagaccctggagatgctgcccagcaggaggccaagcacagcagcacagaggagaagtag

SEQ ID NO: 20143 - DNA, 414 bp, synthetic construct
  source 1..414: mol_type = other DNA; note = Synthetic coding sequence
atgaagcccccagctgcccagggcagccctgctgctgctgctgctgctgccccagccctggacagcgctgctgctgaggacctgagtgatgccctgtgtgaatttgatgctgtgctggccgactttgccagccccttccacgagcggcacttccactatgaggagcacctggagaggatgaagaggaggagcagcgcctctgtgtctgacagcagcggcttcagtgacagcgagagcgctgacagcctgtacagaaattccttctccttcagtgatgagaagctgaacagccccacagacagcaccccagccctgctgagcgccaccgtgaccccccagaaggccaagctgggggacaccaaggagctggaggccttcatcgctgacctggacaagaccctggcctccatgtag

SEQ ID NO: 20144 - DNA, 1593 bp, synthetic construct
  source 1..1593: mol_type = other DNA; note = Synthetic coding sequence
atgcccaacgtgctgctgccccccaaggagagcaacctcttcaagaggatcctgaagtgctatgagcagaagcagtacaagaatggcctgaagttctgcaagatgatcctgagcaaccccaagtttgctgagcacggggagaccctggccatgaagggcctgaccctgaactgcctgggcaagaaggaggaggcctatgaatttgtgaggaagggcctgagaaatgatgtgaagagccacgtgtgctggcacgtgtatggcctgctgcagaggagtgacaagaagtatgatgaggccatcaagtgctacagaaatgccctgaagctggacaaggacaacctgcagatcctgcgggacctgagcctgctgcagatccagatgagggacctggagggctaccgggagacccgctaccagctgctgcagctgcggcccacccagagggcctcctggattggctacgccatcgcctaccacctgctgaaggactatgacatggccctgaagctgctggaggagttccggcagacccagcaggtgccccccaacaagattgattatgagtacagcgagctgatcctgtaccagaaccaggtgatgagggaggccgacctgctgcaggagagcctggagcacatcgagatgtatgagaagcagatctgtgacaagctgctggtggaggagatcaagggggagatcctgctgaagctgggccgcctgaaggaggccagcgaggtgttcaagaacctgattgacagaaatgctgagaactggtgctactatgagggcctggagaaggccctgcagatcagcaccctggaggagcggctgcagatctatgaggagatcagcaagcagcaccccaaggccatcaccccccggcggctgcccctgaccctggtgcctggagagcgcttccgggagctgatggacaagttcctgcgggtgaacttcagcaagggctgccccccactcttcaccaccctgaagagcctgtactacaacacagagaaggtgtccatcatccaggagctggtgaccaactatgaggccagcctgaagacctgtgacttcttcagcccctatgaaaatggagagaaggagccccccaccaccctgctgtgggtgcagtacttcctggcccagcactttgacaagctgggccagtacagcctggccctggactacatcaatgctgccatcgccagcacccccaccctcatcgagctgttctacatgaaggccaagatctacaagcacatcggcaacctgaaggaggccgccaagtggatggatgaggcccagagcctggacacagctgaccgcttcatcaacagcaaatgtgccaagtacatgctgcgggccaacatgatcaaggaggccgaggagatgtgcagcaagttcacccgggagggcaccagcgccatggagaacctgaatgagatgcagtgcatgtggttccagacagagtgcatcagcgcctaccagaggctgggccgctatggagatgccctgaagaagtgccacgaggtggagcggcacagccccagcacctggaccactggaggcaaggagccccagatgcacccctag

SEQ ID NO: 20145 - DNA, 2595 bp, synthetic construct
  source 1..2595: mol_type = other DNA; note = Synthetic coding sequence
atgcccaacgtgctgctgccccccaaggagagcaacctcttcaagaggatcctgaagtgctatgagcagaagcagtacaagaatggcctgaagttctgcaagatgatcctgagcaaccccaagtttgctgagcacggggagaccctggccatgaagggcctgaccctgaactgcctgggcaagaaggaggaggcctatgaatttgtgaggaagggcctgagaaatgatgtgaagagccacgtgtgctggcacgtgtatggcctgctgcagaggagtgacaagaagtatgatgaggccatcaagtgctacagaaatgccctgaagctggacaaggacaacctgcagatcctgcgggacctgagcctgctgcagatccagatgagggacctggagggctaccgggagacccgctaccagctgctgcagctgcggcccacccagagggcctcctggattggctacgccatcgcctaccacctgctgaaggactatgacatggccctgaagctgctggaggagttccggcagacccagcaggtgccccccaacaagattgattatgagtacagcgagctgatcctgtaccagaaccaggtgatgagggaggccgacctgctgcaggagagcctggagcacatcgagatgtatgagaagcagatctgtgacaagctgctggtggaggagatcaagggggagatcctgctgaagctgggccgcctgaaggaggccagcgaggtgttcaagaacctgattgacagaaatgctgagaactggtgctactatgagggcctggagaaggccctgcagatcagcaccctggaggagcggctgcagatctatgaggagatcagcaagcagcaccccaaggccatcaccccccggcggctgcccctgaccctggtgcctggagagcgcttccgggagctgatggacaagttcctgcgggtgaacttcagcaagggctgccccccactcttcaccaccctgaagagcctgtactacaacacagagaaggtgtccatcatccaggagctggtgaccaactatgaggccagcctgaagacctgtgacttcttcagcccctatgaaaatggagagaaggagccccccaccaccctgctgtgggtgcagtacttcctggcccagcactttgacaagctgggccagtacagcctggccctggactacatcaatgctgccatcgccagcacccccaccctcatcgagctgttctacatgaaggccaagatctacaagcacatcggcaacctgaaggaggccgccaagtggatggatgaggcccagagcctggacacagctgaccgcttcatcaacagcaaatgtgccaagtacatgctgcgggccaacatgatcaaggaggccgaggagatgtgcagcaagttcacccgggagggcaccagcgccatggagaacctgaatgagatgcagtgcatgtggttccagacagagtgcatcagcgcctaccagaggctgggccgctatggagatgccctgaagaagtgccacgaggtggagcggcacttctttgagatcacagatgaccagtttgacttccacacctactgcatgaggaagatgaccctgcgggcctacgtggacctgctgcggctggaggacatcctgcggagacatgccttctacttcaaggccgcccggagcgccatcgagatctacctgaagctgtatgacaaccccctgaccaatgaaagcaagcagcaggagatcaacagcgagaacctgagcgccaaggagctgaagaagatgctgagcaagcagaggcgggcccagaagaaggccaagctggaggaggagaggaagcatgctgagcgggagcggcagcagaagaaccagaagaagaagagagatgaggaggaggaggaggccagcggcctgaaggaggagctgatccctgagaagctggagcgggtggagaaccccctggaggaggccgtgaagttcctgatccccctgaagaacctggtggccgacaacatcgacacccacctgctggcctttgagatctacttcaggaagggcaagttcctgctgatgctgcagagcgtgaagagggcctttgccatcaacagcaacaacccctggctgcacgagtgcctgatccgcttcagcaagtctgtgagcaaccacagcaacctgcctgacatcgtgtccaaggtgctgagccaggagatgcagaagatctttgtgaagaaggacctggagagcttcaatgaagacttcctgaagagaaatgccaccagcctgcagcacctgctgagcggggccaagatgatgtacttcctggacaagagccggcaggagaaggccatcgccatcgccacccggctggatgagaccatcaaggacaaggatgtgaagaccctcatcaaggtgtctgaggccctgctggatggcagctttggaaactgcagcagccagtatgaggagtacaggatggcctgccacaacctgctgcccttcaccagcgccttcctgcctgctgtgaatgaggtggacaaccccaacgtggccctgaaccacacagccaactatgatgtgctggccaatgagatctag

SEQ ID NO: 20146 - DNA, 1668 bp, synthetic construct; identical to SEQ ID NO: 18807
  source 1..1668: mol_type = other DNA; note = Synthetic coding sequence

SEQ ID NO: 20147 - DNA, 630 bp, synthetic construct
  source 1..630: mol_type = other DNA; note = Synthetic coding sequence
atggcccctgtgggcgtggagaagaagctgctgctgggccccaatggacctgctgtggccgccgccggggacctgaccagcgaggaggaggagggccagagcctgtggagcagcatcctgtctgaggtgtccacccgggcccggagcaagctgcccagcggcaagaacatcctggtgtttggagaagatggcagcggcaagaccaccctgatgaccaagctgcagggcgctgagcacggcaagaagggccggggcctggagtacctgtacctgtctgtgcatgatgaggacagagatgaccacacccgctgcaatgtgtggatcctggatggagacctgtaccacaagggcctgctgaagtttgctgtgtctgctgagagcctgcctgagaccctggtgatctttgtggccgacatgagccggccctggacagtgatggagagcctgcagaagtgggcctctgtgctgcgggagcacatcgacaagatgaagatccccccagagaagatgagggagctggagaggaagtttgtgaaggacttccaggactacatggagcctgaggagggctgccaggagggccccctgagcaacagagtggagcagatgaggcccaggaaccactggtag

SEQ ID NO: 20148 - DNA, 858 bp, synthetic construct
  source 1..858: mol_type = other DNA; note = Synthetic coding sequence
aactggaacctggcctcctggaaccccagcaacccagaatgtctgctgctggtggtgaaggagctggtgcagcagtaccaccagttccagtgcagccggctgcgggagagcagccggctgatgtttgagtaccagaccctgctggaggagccccagtatggagagaacatggagatctatgccggcaagaagaacaactggacaggagagttcagcgcccgcttcctgctgaagctgcctgtggacttcagcaacatccccacctacctgctgaaggatgtgaatgaagaccccggggaggatgtggccctgctgtctgtgtcctttgaggacacagaggccacccaggtgtaccccaagctgtacctgagccccagaattgaacatgccctgggcggcagcagcgccctgcacatcccagccttccctgggggcggctgcctgattgattatgtgccccaggtgtgccacctgctgaccaacaaggtgcagtatgtgatccagggctaccacaagagaagagagtacatcgccgccttcctgagccacttcggcaccggggtggtggagtatgatgctgagggcttcaccaagctgaccctgctgctgatgtggaaggacttctgcttcctggtgcacatcgacctgcccctcttcttcccccgggaccagcccaccctgaccttccagagcgtgtaccacttcaccaacagcggccagctgtacagccaggcccagaagaactacccctacagcccccgctgggatggaaatgagatggccaagagggccaaggcctacttcaagacctttgtgccccagttccaggaggccgcctttgccaacgggaagctgtag

SEQ ID NO: 20149 - DNA, 1152 bp, synthetic construct; identical to SEQ ID NO: 19282
  source 1..1152: mol_type = other DNA; note = Synthetic coding sequence

SEQ ID NO: 20150 - DNA, 1131 bp, synthetic construct; identical to SEQ ID NO: 19601
  source 1..1131: mol_type = other DNA; note = Synthetic coding sequence

SEQ ID NO: 20151 - DNA, 312 bp, synthetic construct
  source 1..312: mol_type = other DNA; note = Synthetic coding sequence
atgatccgggccttccccaccaccacccccaggagcctgcacctgttcaccagcagcaccttcctggcccgggccctgcccggggccttccccaccggggcctgtgaggagcggctgtctgtgcctgagagcacccccttcaccgctgtgctgaagtttgctgctgaggagttcaaggtgcctgctgccaccagcgccatcatcaccaatgatggcatcggcatcaacccagcccagacagctggaaatgtgttcctgaagcacggcagcgagctgcgcatcatcccccgggacagagtgggcagctgctag

SEQ ID NO: 20152 - DNA, 1968 bp, synthetic construct
  source 1..1968: mol_type = other DNA; note = Synthetic coding sequence
atggccacccctgtggtgaccaagacagcctggaagctgcaggagatcgtggcccacgccagcaatgtgagcagcctggtgctgggcaaggccagcggccgcctgctggccactggaggagatgactgccgggtgaacctgtggagcatcaacaagcccaactgcatcatgagcctgaccggccacaccagccctgtggagagcgtgcggctgaacaccccagaggagctgattgtggccggcagccagagcggcagcatccgggtgtgggacctggaggccgccaagatcctgcggaccctgatgggccacaaggccaacatctgcagcctggacttccacccctacggggagtttgtggccagcggcagccaggacaccaacatcaagctgtgggacatccggaggaagggctgtgtgttccgctaccggggccacagccaggccgtgcgctgcctgcgcttctccccagatggcaagtggctggccagcgctgctgatgaccacacagtgaagctgtgggacctgacagctgggaagatgatgtctgagttccctggccacactggacctgtgaatgtggtggagttccaccccaatgagtacctgctggccagcggcagcagtgacaggaccatccgcttctgggacctggagaagttccaggtggtgtcctgcattgaaggagagcccggccctgtgcgctctgtgctcttcaacccagatggctgctgcctgtacagcggctgccaggacagcctgcgggtgtatggctgggagcctgagcgctgctttgatgtggtgctggtgaactggggcaaggtggccgacctggccatctgcaatgaccagctgattggagtggccttcagccagagcaatgtgtcctcctatgtggtggacctgaccagggtgaccaggacaggcaccgtggcccgggaccctgtgcaggaccaccggcccctggcccagcccctgcccaaccccagcgcccccctgcggcgcatctatgagcggcccagcaccacctgcagcaagccccagagggtgaagcagaacagcgagagcgagcggcgcagccccagcagtgaagatgacagagatgagcgggagagcagagctgagatccagaatgctgaggactacaatgagatcttccagcccaagaacagcatcagcaggaccccaccccggcgctctgagcccttccctgcccccccagaagatgatgctgccacagccaaggaggccgccaagcccagccctgccatggatgtgcagtttcctgtgcccaacctggaggtgctgcccaggcctcctgtggtggccagcaccccagcccccaaggccgagcccgccatcatcccagccaccagaaatgagcccatcggcctgaaggccagtgacttcctgcctgctgtgaagatcccccagcaggccgagctggtggatgaagatgccatgagccagatcagaaaaggacatgacaccatgtgtgtggtgctgaccagccgccacaagaacctggacacagtgcgggctgtgtggaccatgggagacatcaagacctctgtggacagcgctgtggccatcaatgacctgtctgtggtggtggacctgctgaacatcgtgaaccagaaggccagcctgtggaagctggacctgtgcaccaccgtgctgccccagatcgagaagctgctgcagagcaaatatgagagctatgtgcagacaggctgcaccagcctgaagctgatcctgcagcgcttcctgcccctcatcacagacatgctggccgccccacccagcgtgggcgtggacatcagccgggaggagcggctgcacaagtgccgcctgtgctacaagcagctgaagagcatcagcggcctggtgaagagcaagagcggcctgagcggccgccacggcagcaccttccgggagctgcacctgctgatggccagcctggactag

SEQ ID NO: 20153 - DNA, 165 bp, synthetic construct
  source 1..165: mol_type = other DNA; note = Synthetic coding sequence
atgttcctgtctgctgtgttctttgccaagagcaagagcaatgagaccaagagccccctgcggggcaaggagaagaacaccctgcccctgaatggaggcctgaagatgaccctcatctacaaggagaagacagagggcggggacacagattctgagatcctgtag

SEQ ID NO: 20154 - DNA, 2457 bp, synthetic construct
  source 1..2457: mol_type = other DNA; note = Synthetic coding sequence
atgaagaagcagttcaacaggatgaggcagctggccaaccagacagtgggccgggcagagaagacagaggtgctgtctgaggacctgctgcaggtggagaagaggctggagctggtgaagcaggtgagccacagcacccacaagaagctgacagcctgcctgcagggccagcagggcgctgaggccgacaagaggagcaagaagctgcccctgaccaccctggcccagtgcctgatggagggcagcgccatcctgggagatgacaccctgctgggcaagatgctgaagctgtgtggggagacagaggacaagctggcccaggagctgatccactttgagctgcaggtggagagagatgtgattgagcccctcttcctgctggccgaggtggagatccccaacatccagaagcagaggaagcacctggccaagctggtgctggacatggacagcagcaggacccgctggcagcagaccagcaagagcagcggcctgagcagcagcctgcagcctgctggggccaaggcagatgccctgcgggaggagatggaggaggccgccaacagagtggagatctgccgggaccagctgtctgctgacatgtacagctttgtggccaaggagattgattatgccaactacttccagaccctgattgaggtgcaggccgagtaccacaggaagagcctgaccctgctgcaggccgtgctgccccagatcaaggcccagcaggaggcctgggtggagaagcccagctttgggaagcccctggaggagcacctgaccatcagcggccgggagatcgccttccccatcgaggcctgtgtgaccatgctgctggagtgtggcatgcaggaggagggcctcttccgggtggcccccagcgccagcaagctgaagaagctgaaggccgccctggactgctgcgtggtggatgtgcaggagtacagcgctgacccccacgccatcgccggggccctgaagagctacctgcgggagctgcctgagcccctgatgacctttgagctgtatgatgagtggatccaggccagcaatgtgcaggagcaggacaagaagctgcaggccctgtggaatgcctgtgagaagctgcccaaggccaaccacaacaacatccgctacctgatcaagttcctgagcaagctgtctgagtaccaggatgtgaacaagatgacccccagcaacatggccatcgtgctgggccccaacctgctgtggccccaggccgagggcaacatcacagagatgatgaccaccgtgtccctgcagatcgtgggcatcatcgagcccatcatccagcacgccgactggttcttccctggagaaattgagttcaacatcaccggcaactacggcagccctgtgcacgtgaaccacaatgccaactacagctccatgcccagcccagacatggaccctgctgaccggcggcagcctgagcaggcccggcggcccctgtctgtggccacagacaacatgatgctggagttctacaagaaggatggcctgaggaagatccagagcatgggcgtgcgggtgatggacaccaactgggtggcccggcggggcagcagcgctggcaggaaggtgtcctgtgccccacccagcatgcagcccccagcccccccagctgagctggccgcccccctgcccagccccctgcctgagcagcccctggacagccctgctgccccagccctgagccccagcggcctgggcctgcagcccggccctgagaggaccagcaccaccaagagcaaggagctgagccctggcagcgcccagaagggcagccctggcagcagccagggcacagcctgtgccggcacccagcccggggcccagcccggggcccagcccggggccagccccagccccagccagcccccagctgaccagagcccccacaccctgaggaaggtgtccaagaagctggcccccatcccccccaaggtgcccttcggccagcccggggccatggctgaccagagcgctggccagcccagccctgtgtccctgagccccaccccacccagcacccccagcccctacggcctgagctacccccagggctacagcctggccagcggccagctgagccctgctgctgccccacccctggccagccccagcgtcttcaccagcaccctgagcaagagccggcccacccccaagccccggcagaggcccaccctgcccccaccccagcccccaacagtgaacctgagcgccagcagcccccagagcacagaggcccccatgctggatggcatgagccctggagagagcatgagcacagacctggtgcactttgacatccccagcatccacatcgagctgggcagcaccctgcggctgagccccctggagcacatgagaagacacagcgtgacagacaagagggacagcgaggaggagagcgagagcacagccctgtag

SEQ ID NO: 20155 - DNA, 1014 bp, synthetic construct
  source 1..1014: mol_type = other DNA; note = Synthetic coding sequence
atgaccaacaacagcggcagcaaggccgagctggtggtgggcggcaagtacaagctggtgaggaagattggcagcggcagctttggagatgtgtacctgggcatcaccaccaccaatggagaagatgtggccgtgaagctggagagccagaaggtgaagcacccccagctgctgtatgagagcaagctgtacaccatcctgcagggcggcgtgggcatcccccacatgcactggtacggccaggagaaggacaacaacgtgctggtgatggacctgctgggccccagcctggaggacctcttcaacttctgcagccgccgcttcaccatgaagacagtgctgatgctggccgaccagatgatcagccgcatcgagtatgtgcacaccaagaacttcctgcaccgggacatcaagccagacaacttcctgatgggcaccggccgccactgcaacaagctgttcctgattgactttggcctggccaagaagtacagagacaacagaacccggcagcacatcccctaccgggaggacaagcacctgattggcaccgtgcgctatgccagcatcaatgcccacctgggcatcgagcagagcagaagagatgacatggagagcctgggctacgtgttcatgtacttcaacagaaccagcctgccctggcagggcctgcgggccatgaccaagaagcagaagtatgagaagatcagcgagaagaagatgagcacccctgtggaggtgctgtgcaagggcttccctgctgagtttgccatgtacctgaactactgccggggcctgcgctttgaggaggtgcctgactacatgtacctgcggcagctgttccgcatcctcttccgcaccctgaaccaccagtatgactacacctttgactggaccatgctgaagcagaaggccgcccagcaggccgccagcagcagcggccagggccagcaggcccagacccagacaggcaagcagacagagaagaacaagaacaacgtgaaggacaactag

SEQ ID NO: 20156 - DNA, 1608 bp, synthetic construct
  source 1..1608: mol_type = other DNA; note = Synthetic coding sequence
atgtctgagggggagagccagacagtgctgagcagcggcagtgaccccaaggtggagagcagcagcagcgcccctggcctgacctctgtgagcccccctgtgaccagcaccaccagcgctgccagccctgaggaggaggaggagagtgaagatgaaagtgagatcctggaggagagcccctgtggccgctggcagaagagaagagaggaggtgaaccagagaaatgtgcccggcattgattctgcctacctggccatggacacagaggagggcgtggaggtggtgtggaatgaggtgcagttcagcgagaggaagaactacaagctgcaggaggagaaggtgcgggctgtgtttgacaacctgatccagctggagcacctgaacatcgtgaagttccacaagtactgggccgacatcaaggagaacaaggcccgggtcatcttcatcacagagtacatgagcagcggcagcctgaagcagttcctgaagaagaccaagaagaaccacaagaccatgaatgagaaggcctggaagcgctggtgcacccagatcctgagcgccctgagctacctgcacagctgtgacccccccatcatccacggcaacctgacctgtgacaccatcttcatccagcacaacggcctcatcaagattggctctgtggccccagacaccatcaacaaccacgtgaagacctgccgggaggagcagaagaacctgcacttctttgccccagaatatggagaggtgaccaacgtgaccacagctgtggacatctacagctttggcatgtgtgccctggagatggctgtgctggagatccagggcaatggagagagcagctatgtgccccaggaggccatcagcagcgccatccagctgctggaggaccccctgcagcgggagttcatccagaagtgcctgcagagcgagcccgcccggcggcccacagcccgggagctgctcttccacccagccctgtttgaggtgcccagcctgaagctgctggccgcccactgcatcgtgggccaccagcacatgatcccagaaaatgccctggaggagatcaccaagaacatggacaccagcgctgtgctggccgagatcccagctggccctggccgggagcctgtgcagaccctgtacagccagagccctgccctggagctggacaagttcctggaggatgtgagaaatggcatctaccccctgacagccttcggcctgccccggccccagcagccccagcaggaggaggtgaccagccctgtggtgccccccagcgtgaagacccccaccccagagcctgctgaggtggagaccaggaaggtggtgctgatgcagtgcaacattgaatctgtggaggagggcgtgaagcaccacctgaccctgctgctgaagctggaggacaagctgaacagacacctgagctgtgacctgatgcccaatgaaaacatccctgagctggccgctgagctggtgcagctgggcttcatcagcgaggccgaccagagccggctgaccagcctgctggaggagaccctgaacaagttcaactttgccaggaacagcaccctgaacagcgctgctgtgacagtgagcagctag

SEQ ID NO: 20157 - DNA, 2169 bp, synthetic construct
  source 1..2169: mol_type = other DNA; note = Synthetic coding sequence
atggagaccagtgacatccagatcttctaccaggaggaccctgagtgccagaacctgtctgagaacagctgccccccatctgaggtgtctgacaccaacctgtacagccccttcaagcccaggaactaccagctggagctggccctgcctgccatgaagggcaagaacaccatcatctgtgcccccaccggctgcggcaagacctttgtgtccctgctgatctgtgagcaccacctgaagaagttcccccagggccagaagggcaaggtggtgttctttgccaaccagatccctgtgtatgagcagcagaagtctgtgttcagcaagtactttgagcggcacggctacagagtgacaggcatcagcggggccacagcagaaaatgtgcctgtggagcagatcgtggagaacaatgacatcatcatcctgaccccccagatcctggtgaacaacctgaagaagggcaccatccccagcctgagcatcttcaccctgatgatctttgatgagtgccacaacaccagcaagcagcacccctacaacatgatcatgttcaactacctggaccagaagctgggcggcagcagcggccccctgccccaggtgattggcctgacagcctctgtgggcgtgggagatgccaagaacacagatgaggccctggactacatctgcaagctgtgtgccagcctggatgccagcgtcatcgccaccgtgaagcacaacctggaggagctggagcaggtggtgtacaagccccagaagttcttcaggaaggtggagagccgcatcagtgacaagttcaagtacatcatcgcccagctgatgagggacacagagagcctggccaagaggatctgcaaggacctggagaacctgagccagatccagaaccgggagtttggcacccagaagtatgagcagtggatcgtgacagtgcagaaggcctgcatggtgttccagatgccagacaaggatgaggagagccgcatctgcaaggccctcttcctgtacaccagccacctgaggaagtacaatgatgccctgatcatcagcgagcacgccaggatgaaggatgccctggactacctgaaggacttcttcagcaatgtgcgggccgccggctttgatgaaattgagcaggacctgacccagagatttgaggagaagctgcaggagctggagagcgtgtcccgggaccccagcaatgaaaaccccaagctggaggacctgtgcttcatcctgcaggaggagtaccacctgaaccctgagaccatcaccatcctgtttgtgaagacccgggccctggtggatgccctgaagaactggattgagggcaaccccaagctgtccttcctgaagccaggcatcctgaccggccggggcaagaccaaccagaacacaggcatgaccctgcctgcccagaagtgcatcctggatgccttcaaggccagcggggaccacaacatcctgattgccacctctgtggctgatgagggcattgatattgcccagtgcaacctggtgatcctgtatgaatatgtgggcaatgtcatcaagatgatccagacccggggccggggccgggcccggggcagcaagtgcttcctgctgaccagcaatgctggggtgattgagaaggagcagatcaacatgtacaaggagaagatgatgaatgacagcatcctgcggctgcagacctgggatgaagctgtgttccgggagaagatcctgcacatccagacccatgagaagttcatccgggacagccaggagaagcccaagcctgtgcctgacaaggagaacaagaagctgctgtgcaggaagtgcaaggccctggcctgctacacagcagatgtgcgggtgattgaggagtgccactacacagtgctgggagatgccttcaaggaatgttttgtgtcccggccccaccccaagcccaagcagttcagcagctttgagaagagggccaagatcttctgtgcccggcagaactgcagccatgactggggcatccacgtgaagtacaagacctttgagatccctgtgatcaagattgagagctttgtggtggaggacatcgccaccggggtgcagaccctgtacagcaagtggaaggacttccactttgagaagatcccctttgatcctgctgagatgagcaagtag

SEQ ID NO: 20158 - DNA, 2643 bp, synthetic construct
  source 1..2643: mol_type = other DNA; note = Synthetic coding sequence
atgaccacagagcagaggaggagcctgcaggccttccaggactacatcaggaagaccctggaccccacctacatcctgagctacatggccccctggttccgggagggctacagcggcctgtatgaggccatcgagagctgggacttcaagaagattgagaagctggaggagtaccgcctgctgctgaagaggctgcagcctgagttcaagacccgcatcatccccacagacatcatcagtgacctgtctgagtgcctgatcaaccaggagtgtgaggagatcctgcagatctgcagcaccaagggcatgatggccggggctgagaagctggtggagtgcctgctgcggagtgacaaggagaactggcccaagaccctgaagctggccctggagaaggagaggaacaagttcagcgagctgtggatcgtggagaagggcatcaaggatgtggagacagaggacctggaggacaagatggagaccagtgacatccagatcttctaccaggaggaccctgagtgccagaacctgtctgagaacagctgccccccatctgaggtgtctgacaccaacctgtacagccccttcaagcccaggaactaccagctggagctggccctgcctgccatgaagggcaagaacaccatcatctgtgcccccaccggctgcggcaagacctttgtgtccctgctgatctgtgagcaccacctgaagaagttcccccagggccagaagggcaaggtggtgttctttgccaaccagatccctgtgtatgagcagcagaagtctgtgttcagcaagtactttgagcggcacggctacagagtgacaggcatcagcggggccacagcagaaaatgtgcctgtggagcagatcgtggagaacaatgacatcatcatcctgaccccccagatcctggtgaacaacctgaagaagggcaccatccccagcctgagcatcttcaccctgatgatctttgatgagtgccacaacaccagcaagcagcacccctacaacatgatcatgttcaactacctggaccagaagctgggcggcagcagcggccccctgccccaggtgattggcctgacagcctctgtgggcgtgggagatgccaagaacacagatgaggccctggactacatctgcaagctgtgtgccagcctggatgccagcgtcatcgccaccgtgaagcacaacctggaggagctggagcaggtggtgtacaagccccagaagttcttcaggaaggtggagagccgcatcagtgacaagttcaagtacatcatcgcccagctgatgagggacacagagagcctggccaagaggatctgcaaggacctggagaacctgagccagatccagaaccgggagtttggcacccagaagtatgagcagtggatcgtgacagtgcagaaggcctgcatggtgttccagatgccagacaaggatgaggagagccgcatctgcaaggccctcttcctgtacaccagccacctgaggaagtacaatgatgccctgatcatcagcgagcacgccaggatgaaggatgccctggactacctgaaggacttcttcagcaatgtgcgggccgccggctttgatgaaattgagcaggacctgacccagagatttgaggagaagctgcaggagctggagagcgtgtcccgggaccccagcaatgaaaaccccaagctggaggacctgtgcttcatcctgcaggaggagtaccacctgaaccctgagaccatcaccatcctgtttgtgaagacccgggccctggtggatgccctgaagaactggattgagggcaaccccaagctgtccttcctgaagccaggcatcctgaccggccggggcaagaccaaccagaacacaggcatgaccctgcctgcccagaagtgcatcctggatgccttcaaggccagcggggaccacaacatcctgattgccacctctgtggctgatgagggcattgatattgcccagtgcaacctggtgatcctgtatgaatatgtgggcaatgtcatcaagatgatccagacccggggccggggccgggcccggggcagcaagtgcttcctgctgaccagcaatgctggggtgattgagaaggagcagatcaacatgtacaaggagaagatgatgaatgacagcatcctgcggctgcagacctgggatgaagctgtgttccgggagaagatcctgcacatccagacccatgagaagttcatccgggacagccaggagaagcccaagcctgtgcctgacaaggagaacaagaagctgctgtgcaggaagtgcaaggccctggcctgctacacagcagatgtgcgggtgattgaggagtgccactacacagtgctgggagatgccttcaaggaatgttttgtgtcccggccccaccccaagcccaagcagttcagcagctttgagaagagggccaagatcttctgtgcccggcagaactgcagccatgactggggcatccacgtgaagtacaagacctttgagatccctgtgatcaagattgagagctttgtggtggaggacatcgccaccggggtgcagaccctgtacagcaagtggaaggacttccactttgagaagatcccctttgatcctgctgagatgagcaagtag

SEQ ID NO: 20159 - DNA, 2778 bp, synthetic construct
  source 1..2778: mol_type = other DNA; note = Synthetic coding sequence
atgaccacagagcagaggaggagcctgcaggccttccaggactacatcaggaagaccctggaccccacctacatcctgagctacatggccccctggttccgggaggaggaggtgcagtacatccaggccgagaagaacaacaagggccccatggaggccgccaccctcttcctgaagttcctgctggagctgcaggaggagggctggttccggggcttcctggatgccctggaccacgccggctacagcggcctgtatgaggccattgaatcctgggacttcaagaagattgagaagctggaggagtaccgcctgctgctgaagaggctgcagcctgagttcaagacccgcatcatccccacagacatcatcagtgacctgtctgaatgtctcatcaaccaggagtgtgaggagatcctgcagatctgcagcaccaagggcatgatggccggggctgagaagctggtggagtgcctgctgcggagtgacaaggagaactggcccaagaccctgaagctggccctggagaaggagaggaacaagttcagcgagctgtggatcgtggagaagggcatcaaggatgtggagacagaggacctggaggacaagatggagaccagtgacatccagatcttctaccaggaggaccctgagtgccagaacctgtctgagaacagctgcccccccagcgaggtgtctgacaccaacctgtacagccccttcaagcccaggaactaccagctggagctggccctgcctgccatgaagggcaagaacaccatcatctgtgcccccaccggctgtgggaagacctttgtgtccctgctgatctgtgagcaccacctgaagaagttcccccagggccagaagggcaaggtggtgttctttgccaaccagatccctgtgtatgagcagcagaagagcgtcttcagcaagtactttgaaagacatggctacagagtgacaggcatcagcggggccacagcagaaaatgtgcctgtggagcagatcgtggagaacaatgacatcatcatcctgaccccccagatcctggtgaacaacctgaagaagggcaccatccccagcctgagcatcttcaccctgatgatctttgatgagtgccacaacaccagcaagcagcacccctacaacatgatcatgttcaactacctggaccagaagctgggcggcagcagcggccccctgccccaggtgattggcctgacagcctctgtgggcgtgggagatgccaagaacacagatgaggccctggactacatctgcaagctgtgtgccagcctggatgcctctgtgattgccaccgtgaagcacaacctggaggagctggagcaggtggtgtacaagccccagaagttcttcaggaaggtggagagccgcatcagtgacaagttcaagtacatcatcgcccagctgatgagggacacagagagcctggccaagaggatctgcaaggacctggagaacctgagccagatccagaaccgggagtttggcacccagaagtatgagcagtggatcgtgacagtgcagaaggcctgcatggtgttccagatgccagacaaggatgaggagagccgcatctgcaaggccctcttcctgtacaccagccacctgaggaagtacaatgatgccctgatcatcagcgagcacgccaggatgaaggatgccctggactacctgaaggacttcttcagcaatgtgcgggctgctggctttgatgaaattgagcaggacctgacccagagatttgaggagaagctgcaggagctggagagcgtgtcccgggaccccagcaatgaaaaccccaagctggaggacctgtgcttcatcctgcaggaggagtaccacctgaaccctgagaccatcaccatcctgtttgtgaagacccgggccctggtggatgccctgaagaactggattgagggcaaccccaagctgtccttcctgaagccaggcatcctgaccggccggggcaagaccaaccagaacacaggcatgaccctgcctgcccagaagtgcatcctggatgccttcaaggccagcggggaccacaacatcctgattgccacctctgtggctgatgagggcatcgacatcgcccagtgcaacctggtgatcctgtatgaatatgtgggcaatgtcatcaagatgatccagacccggggccggggccgggcccggggcagcaagtgcttcctgctgaccagcaatgctggggtcatcgagaaggagcagatcaacatgtacaaggagaagatgatgaatgacagcatcctgcggctgcagacctgggatgaggccgtgttccgggagaagatcctgcacatccagacccatgagaagttcatccgggacagccaggagaagcccaagcctgtgcctgacaaggagaacaagaagctgctgtgcaggaagtgcaaggccctggcctgctacacagcagatgtgcgggtcatcgaggagtgccactacacagtgctgggagatgccttcaaggagtgctttgtgtcccggccccaccccaagcccaagcagttcagcagctttgagaagagggccaagatcttctgtgcccggcagaactgcagccatgactggggcatccacgtgaagtacaagacctttgagatccctgtgatcaagattgagagctttgtggtggaggacatcgccactggagtgcagaccctgtacagcaagtggaaggacttccactttgagaagatcccctttgatcctgctgagatgagcaagtag

SEQ ID NO: 20160 - DNA, 987 bp, synthetic construct
  source 1..987: mol_type = other DNA; note = Synthetic coding sequence
atggatggagaggacatcccagacttcagcagcctgaaggaggagacagcctactggaaggagctgagcctgaagtacaagcagagcttccaggaggccagagatgagctggtggagttccaggagggcagccgggagctggaggccgagctggaggcccagctggtgcaggccgagcagaggaacagagacctgcaggccgacaaccagaggctgaagtatgaggtggaggccctgaaggagaagctggagcaccagtatgcccagagctacaagcaggtgtctgtgctggaggatgacctgagccagacccgggccatcaaggagcagctgcacaagtatgtgcgggagctggagcaggccaatgatgacctggagcgggccaagagggccaccatcgtgtccctggaggactttgagcagaggctgaaccaggccattgaaagaaatgccttcctggagagcgagctggatgagaaggagagcctgctggtgtctgtgcagaggctgaaggatgaggcccgggacctgcggcaggagctggccgtgcgggagcggcagcaggaggtgaccaggaagagcgcccccagcagccccaccctggactgtgagaagatggacagcgctgtgcaggccagcctgagcctgcctgccacccctgtgggcaaaggaacagagaacaccttccccagccccaaggccatccccaatggatttggcaccagccccctgaccccatctgcccgcatcagcgccctgaacatcgtgggggacctgctgaggaaggtgggcgccctggagagcaagctggccgcctgcaggaactttgccaaggaccaggccagcaggaagagctacatctctggaaatgtgaactgtggggtgctgaatggaaatggcaccaagttcagccgcagcggccacaccagcttctttgacaagggccaggagaaggtgatcttccccaccctcttcatgggccagtag

SEQ ID NO: 20161 - DNA, 2898 bp, synthetic construct
  source 1..2898: mol_type = other DNA; note = Synthetic coding sequence
atggccctgctgtgtggcctgggccaggtgaccctgcgcatctgggtgtccctgcccagccagagtgaaaatggcatcggcttcctggccgcccgggccttcctgcggagcggcggcatggaggccctgaccacccagctgggccctggccgggagggcagcagcagccccaacagcaagcaggagctgcagccctacagcggcagcagcgccctgaagcccaaccaggtgggggagaccagcctgtatggagtgcccatcgtgtccctggtgattgatggccaggagcggctgtgcctggcccagatcagcaacaccctgctgaagaactacagctacaatgagatccacaacagaagagtggccctgggcatcacctgtgtgcagtgcacccctgtgcagctggagatcctgcggcgggccggggccatgcccatcagcagcagaagatgtggcatgatcaccaagcgggaggccgagcggctgtgcaagagcttcctgggggagcacaagccacccaagctgcctgaaaattttgcctttgatgtggtgcatgaatgtgcctggggcagccggggcagcttcatcccagcccgctacaacagcagccgggccaagtgcatcaagtgtggctactgcagcatgtacttcagccccaacaagttcatcttccacagccacaggaccccagatgccaagtacacccagccagatgctgccaacttcaacagctggaggaggcacctgaagctgagtgacaagagcgccacagatgagctgagccacgcctgggaggatgtgaaggccatgttcaacggcggcaccaggaagaggaccttcagcctgcagggcggcggcggcggcggggccaatggaggcagcggcggccagggcaaaggaggagctgggggcggcggcggcggcggccctggctgtggggctgagatggcccctggccccccaccccacaagagcctgcgctgtggggaggatgaagctgctggccccccaggccccccaccaccccacccccagaggggcctgggcctggccaccggggccagcggccctgctggccctgggggccctgggggcggggccggcgtgcgcagctaccctgtgattcctgtgcccagcaagggcttcggcctgctgcagaagctgcccccacccctcttcccccacccctacggcttccccacagccttcggcctgtgccccaagaaggatgatcctgtgctgggcgctggggagcccaagggcggccctggcactggaagtggcggcggcggggccggcaccggcggcggggccggcggccctggggccagccacctgcccccaggggccggggccggccctgggggcggggccatgttctggggccaccagcccagcggggccgccaaggatgctgctgctgtggccgctgctgctgctgctgccaccgtgtaccccaccttccccatgttctggccagctgctggcagcctgcctgtgcccagctacccagctgcccagagccaggccaaggctgtggccgctgctgtggccgctgctgctgctgctgctgctgctgctgctggcagcggggcccctgagcccctggatggagctgagcccgccaaggagagcggcctgggcgctgaggagcgctgccccagcgccctgagccggggccccctggatgaagatggaacagatgaggccctgcccccacccctggcccccctgcccccacctcctcctcctccagccaggaagggcagctatgtgtctgccttccggcctgtggtgaaggacacagagagcatcgccaagctgtatggcagcgcccgggaggcctacggggccggccctgcccggggccctggccctggggccggcagcggcggctacgtgtccccagacttcctgtctgagggcagcagcagctacaacagcgccagcccagatgtggacacagcagatgagcctgaggtggatgtggagagcaaccgcttcccagatgatgaagatgcccaggaggagacagagcccagcgcccccagcgctgggggcggcccagatggagagcagcccactggacctccttctgccaccagcagtggagcagatggccctgccaacagcccagatggcggcagcccccggccccggcggcggctgggccccccacctgctggccgcccagcctttggagacctggccgctgaggacctggtgagaagacctgagaggagccccccatctgggggcggcggctatgagctgcgggagccctgtggccccctgggcggccctgccccagccaaggtgtttgcccctgagagagatgaacatgtgaagtctgctgctgtggccctgggccctgctgccagctatgtgtgcaccccagaggcccacgagccagacaaggaggacaaccacagccctgcagatgacctggagaccaggaagagctacccagaccagaggagcatcagccagcccagccctgccaacacagacagaggagaagatggcctgaccctggatgtgacaggcacccacctggtggagaaggacatcgagaacctggcccgggaggagctgcagaagctgctgctggagcagatggagctgaggaagaagctggagcgggagttccagagcctgaaggacaacttccaggaccagatgaagcgggagctggcctaccgggaggagatggtgcagcagctgcagatcgtgcgggacaccctgtgcaatgagctggaccaggagaggaaggcccgctatgccatccagcagaagctgaaggaggcccatgatgccctgcaccacttcagctgcaagatgctgacccccaggcactgcaccggcaactgcagcttcaagccacccctgctgccctag

SEQ ID NO: 20162 - DNA, 1803 bp, synthetic construct
  source 1..1803: mol_type = other DNA; note = Synthetic coding sequence
atggccagcaaccacaagagcagcgctgcccggcctgtgtcccggggcggcgtgggcctgaccggccggccccccagcggcatccggcccctgagcggcaacatccgggtggccacagccatgcctcctggaacagcccggcccggcagccggggctgccccatcggcactggaggagtgctgagcagccagatcaaggtggcccacaggcctgtgacccagcagggcctgaccggcatgaagacaggcaccaagggcccccagaggcagatcctggacaagagctactacctgggcctgctgcggagcaagatcagcgagctgaccacagaggtgaacaagctgcagaagggcatcgagatgtacaaccaggagaacagcgtgtacctgtcctatgagaagagagctgagaccctggccgtggagatcaaggagctgcagggccagctggccgactacaacatgctggtggacaagctgaacaccaacacagagatggaggaggtgatgaatgactacaacatgctgaaggcccagaatgaccgggagacccagagcctggatgtgatcttcacagagcggcaggccaaggagaagcagatccgctctgtggaggaggagattgagcaggagaagcaggccacagatgacatcatcaagaacatgagctttgagaaccaggtgaagtacctggagatgaagaccaccaatgagaagctgctgcaggagctggacaccctgcagcagcagctggacagccagaacatgaagaaggagagcctggaggccgagatcgcccacagccaggtgaagcaggaggccgtgctgctgcacgagaagctgtatgagctggagagccaccgggaccagatgattgctgaggacaagagcatcggcagccccatggaggagcgggagaagctgctgaagcagatcaaggatgacaaccaggagatcgcctccatggagcggcagctgacagacaccaaggagaagatcaaccagttcatcgaggagatccggcagctggacatggacctggaggagcaccagggcgagatgaaccagaagtacaaggagctgaagaagcgggaggagcacatggacaccttcatcgagacctttgaggagaccaagaaccaggagctgaagaggaaggcccagatcgaggccaacatcgtggccctgctggagcactgcagcaggaacatcaacagaattgagcagatcagcagcatcaccaaccaggagctgaagatgatgcaggatgacctgaacttcaagagcacagaggtgcagaagagccagagcacagcccagaacctgaccagtgacatccagaggctgcagctggacctgcagaagatggagctgctggagagcaagatgacagaggagcagcacagcctgaagagcaagatcaagcagatgaccacagacctggagatctacaatgacctgcctgccctgaagagcagtggagaggagaagatcaagaagctgcaccaggagaggatgatcctgagcacccacagaaatgccttcaagaagatcatggagaagcagaacatcgagtatgaggccctgaagacccagctgcaggagaatgagacccacagccagctgaccaacctggagaggaagtggcagcacctggagcagaacaactttgccatgaaggagttcatcgccaccaagagccaggagagtgactaccagcccatcaagaagaatgtgaccaagcagattgctgagtacaacaagaccatcgtggatgccctgcacagcaccagcggcaactag

SEQ ID NO: 20163 - DNA, 582 bp, synthetic construct
  source 1..582: mol_type = other DNA; note = Synthetic coding sequence
atgctggtggccggaaatgacagagtgcaggccgtcatcacccagatggaggaggtgtgccagaccatcgaggacaacagccggcggcagaagcagctgctgaaccagagatttgagagcctgtgtgctgtgctggaggagaggaaaggagagctgctgcaggccctggcccgggagcaggaggagaagctgcagagggtgcggggcctcatccggcagtacggggaccacctggaggccagcagcaagctggtggagagcgccatccagagcatggaggagccccagatggccctgtacctgcagcaggccaaggagctgatcaacaaggtgggcgccatgagcaaggtggagctggccggccggcctgagcccggctatgaatccatggagcagttcaccgtgcgggtggagcacgtggccgagatgctgcggaccatcgacttccagcccggggccagcggggaggaggaggaggtggccccagatggagaggagggcagcgctggccctgaggaggagaggccagatggccccctgggcccctacagcgcctacgtgtccctgtgtggggccccctag

SEQ ID NO: 20164 - DNA, 1077 bp, synthetic construct
  source 1..1077: mol_type = other DNA; note = Synthetic coding sequence
atgaacttcaccgtgggcttcaagcccctgctgggagatgcccacagcatggacaacctggagaagcagctgatctgccccatctgcctggagatgttcagcaagcctgtggtgatcctgccctgccagcacaacctgtgcaggaaatgtgccaatgatgtgttccaggccagcaaccccctgtggcagagccggggcagcaccaccgtgagcagcggcggccgcttccgctgccccagctgcagacatgaggtggtgctggacagacatggagtgtatggcctgcagaggaacctgctggtggagaacatcatcgacatctacaagcaggagagcagccggcccctgcacagcaaggccgagcagcacctgatgtgtgaggagcacgaggaggagaagatcaacatctactgcctgagctgtgaggtgcccacctgcagcctgtgcaaggtgtttggagcccacaaggactgtgaggtggcccccctgcccaccatctacaagaggcagaagtctgagctgagtgatggcatcgccatgctggtggccggaaatgacagagtgcaggccgtcatcacccagatggaggaggtgtgccagaccatcgaggacaacagccggcggcagaagcagctgctgaaccagagatttgagagcctgtgtgctgtgctggaggagaggaagggggagctgctgcaggccctggcccgggagcaggaggagaagctgcagagggtgcggggcctcatccggcagtatggagaccacctggaggccagcagcaagctggtggagagcgccatccagagcatggaggagccccagatggccctgtacctgcagcaggccaaggagctgatcaacaaggtgggcgccatgagcaaggtggagctggccggccggcctgagcccggctatgagagcatggagcagttcaccgtgcgggtggagcacgtggccgagatgctgcggaccatcgacttccagcccggggccagcggggaggaggaggaggtggccccagatggagaggagggcagcgctggccctgaggaggagaggccagatggcccctag

SEQ ID NO: 20165 - DNA, 756 bp, synthetic construct
  source 1..756: mol_type = other DNA; note = Synthetic coding sequence
atggccgccagcaccatgagcatctgcagcagcgcctgcacagacagctggagggtggtggactgcccagagagctgctgtgagccctgctgctgtgccccagcccccagcctgaccctggtgtgcacccctgtgtcctgtgtgagcagcccctgctgccagacagcctgtgagcccagcgcctgccagagcggctacaccagcagctgcaccaccccctgctaccagcagagcagctgccagcctgactgctgcaccagcagcccctgccagcaggcctgctgcgtgcctgtgtgctgcgtgcctgtgtgctgcgtgcctgtgtgcaacaagcctgtgtgctttgtgcccacctgcagcgagagcagccccagctgctgccagcagagcagctgccagcccacctgctgcaccagcagcccctgccagcaggcctgctgcgtgcctgtgtgcagcaagtctgtgtgctacgtgcctgtgtgcagcggggccagcaccagctgctgccagcagagcagctgccagcctgcctgctgcacagccagctgctgccggcccagcagctctgtgtccctgctgtgccaccctgtgtgcaagagcacctgctgcgtgcctgtgcccagctgtggggccagcgccagcagctgccagcccagctgctgcaggacagccagctgtgtgtccctgctgtgcaggcctgtgtgcagcaggcctgcctgctacagcctgtgcagcggccagaagagcagctgctag

SEQ ID NO: 20166 - DNA, 1128 bp, synthetic construct
  source 1..1128: mol_type = other DNA; note = Synthetic coding sequence
atggccgccagcaccatgtctgtgtgcagcagtgacctgtcctatggcagccgggtgtgcctgcccggcagctgtgacagctgcagcgacagctggcaggtggatgactgcccagagagctgctgtgagcccccctgctgtgcccccagctgctgtgccccagccccctgcctgagcctggtgtgcacccctgtgtcccgggtgagcagcccctgctgccctgtgacctgtgagcccagcccctgccagagcggctgcaccagcagctgcacccccagctgctgccagcagagcagctgccagctggcctgctgtgccagcagcccctgccagcaggcctgctgcatgcctgtgtgctgcaagacagtgtgctgcaagcctgtgtactgtgtgcctgtgtgcagcggggacagcagctgctgccagcagagcagctgccagagcgcctgctgcaccagcagcccctgccagcaggcctgctgcgtgcccatctgctgcaagcctgtgtgcagcggcatcagcagcagctgctgccagcagagcagctgtgtgtcctgtgtgagcagcccctgctgccaggccgtgtgtgagcccagcccctgccagagcggctgcatcagcagctgcacccccagctgctgccagcagagcagctgccagcctgcctgctgcaccagcagcccctgccagcaggcctgctgcgtgcctgtgtgctgcaagcctgtgtgctgcgtgcccacctgcagtgatgacagcggcagctgctgccagcctgcctgctgcaccagcagccagagccagcagggctgctgcgtgcctgtgtgctgcaagcctgtgtgctgcgtgcctgtgtgcagcggggccagcagcagctgctgccagcagagcagctgccagcctgcctgctgcaccaccagctgctgccggcccagcagctctgtgtccctgctgtgcaggcctgtgtgccggcccacctgctgcgtgcctgtgcccagctgctgtgcccccaccagcagctgccaggccagctgctgcaggcctgccagctgtgtgtccctgctgtgcaggcctgcctgcagcaggcctgcctgctgcggccccaccagcacccagaagagcagctgctag

SEQ ID NO: 20167 - DNA, 1587 bp, synthetic construct
  source 1..1587: mol_type = other DNA; note = Synthetic coding sequence
atggccaccagggtggaggaggccgcccggggccggggcggcggcgctgaggaggccacagaggccggccggggcggcagaagaagaagcccccggcagaagtttgaaattggcaccatggaggaggccggcatctgtggcctgggcgtgaaggctgacatgctgtgcaacagccagagcaatgacatcctgcagcaccagggcagcaactgtggcggcaccagcaacaagcacagcctggaggaggatgagggcagtgacttcatcacagaaaatagaaacctggtgtccccagcctactgcacccaggagagccgggaggagatccctggaggagaggccaggacagaccccccagatggccagcaggacagcgagtgcaacagaaacaaggagaagaccctgggcaaggaggtgctgctgctgatgcaggccctgaacaccctgagcaccccagaggagaagctggccgccctgtgcaagaagtatgctgacctgctggaggagagccgctctgtgcagaagcagatgaagatcctgcagaagaagcaggcccagatcgtgaaggagaaggtgcacctgcagagcgagcacagcaaggccatcctggcccggagcaagctggagagcctgtgccgggagctgcagaggcacaacaagaccctgaaggaggagaacatgcagcaggcccgggaggaggaggagaggaggaaggaggccacagcccacttccagatcaccctgaatgagatccaggcccagctggagcagcacgacatccacaatgccaagctgcggcaggagaacatcgagctgggggagaagctgaagaagctgattgagcagtatgccctgcgggaggagcacatcgacaaggtgttcaagcacaaggagctgcagcagcagctggtggatgccaagctgcagcagaccacccagctgatcaaggaggctgatgagaagcaccagcgggagcgggagttcctgctgaaggaggccacagagagccgccacaagtatgagcagatgaagcagcaggaggtgcagctgaagcagcagctgagcctgtacatggacaagtttgaggagttccagaccaccatggccaagagcaatgagctgttcaccaccttccggcaggagatggagaagatgaccaagaagatcaagaagctggagaaggagaccatcatctggaggaccaagtgggagaacaacaacaaggccctgctgcagatggccgaggagaagacagtgcgggacaaggagtacaaggccctgcagatcaagctggagcggctggagaagctgtgccgggccctgcagacagaaagaaatgagctgaatgagaaggtggaggtgctgaaggagcaggtgtccatcaaggccgccatcaaggccgccaacagagacctggccacccctgtgatgcagccctgcacagccctggacagccacaaggagctgaacaccagcagcaagagggccctgggcgcccacctggaggccgagcccaagagccagaggtctgctgtgcagaagccacccagcacaggcagcgccccagccatcgagagcgtggactag

SEQ ID NO: 20168 - DNA, 399 bp, synthetic construct
  source 1..399: mol_type = other DNA; note = Synthetic coding sequence
atgagggccagcccctgcatcagccagcctgctgcctcctggcacccccggcccagcgccctgcggcccacagctggcagcggccctgacaccaggaccccaggcaccgtggaggatggcagcgccccctgcccagccttccgcagccctgctgtgagcccctgtggggaggagccctgctgcttccagatcagccctgctgaggagaccctggagctgggccgcctggtgtccccaggcaactgtgacaccctgagccccagggctgctggcttctacgcctgccacgtgcgcagcctcatcccctgccgcagcaccaagggccgctggcccctgacagccagcgctgctggcctgagcagacatgcccagtgtggccccagcctgggcctgggctag

SEQ ID NO: 20169 - DNA, 1944 bp, synthetic construct
  source 1..1944: mol_type = other DNA; note = Synthetic coding sequence
atggccgagttccgggtgcgggtgtccactggagaggccttcggggccggcacctgggacaaggtgtctgtgtccatcgtgggcaccagaggagagagcccccccctgcccctggacaacctgggcaaggagttcaccgctggagctgaggaggacttccaggtgaccctgcctgaagatgtgggccgggtgctgctgctgcgggtgcacaaggcccctcctgtgctgcccctgctgggccccctggccccagatgcctggttctgccgctggttccagctgaccccaccccggggcggccacctgctcttcccctgctaccagtggctggagggcgccggcaccctggtgctgcaggagggcacagccaaggtgtcctgggccgaccaccaccctgtgctgcagcagcagaggcaggaggagctgcaggcccggcaggagatgtaccagtggaaggcctacaaccctggctggccccactgcctggatgagaagacagtggaggacctggagctgaacatcaagtacagcacagccaagaatgccaacttctacctgcaggccggcagcgcctttgctgagatgaagatcaagggcctgctggacaggaagggcctgtggaggagcctgaatgagatgaagaggatcttcaacttccggaggaccccagctgctgagcacgcctttgagcactggcaggaggatgccttctttgccagccagttcctgaatggcctgaaccctgtgctgatccgccgctgccactacctgcccaagaacttccctgtgacagatgccatggtggcctctgtgctgggccctggcaccagcctgcaggccgagctggagaagggcagcctcttcctggtggaccacggcatcctgagcggcatccagaccaacgtcatcaacgggaagccccagttctctgctgcccccatgaccctgctgtaccagagccctggctgcggccccctgctgcccctggccatccagctgagccagaccccaggccccaacagccccatcttcctgcccacagatgacaagtgggactggctgctggccaagacctgggtgagaaatgctgagttctccttccacgaggccctgacccacctgctgcacagccacctgctgcctgaggtgttcaccctggccaccctgcggcagctgccccactgccaccccctcttcaagagcacaggcatcggcatcgagggcttcagcgagctgatccagaggaacatgaagcagctgaactacagcctgctgtgcctgcctgaggacatccgcacccggggcgtggaggacatccctggctactactacagagatgatggcatgcagatctggggcgctgtggagagatttgtgtctgagatcatcggcatctactaccccagtgatgagagcgtgcaggatgaccgggagctgcaggcctgggtgcgggagatcttcagcaagggcttcctgaaccaggagagcagcggcatccccagcagcctggagacccgggaggccctggtgcagtatgtgaccatggtgatcttcacctgcagcgccaagcatgctgctgtgtctgctggccagtttgacagctgtgcctggatgcccaacctgccccccagcatgcagctgcccccacccaccagcaagggcctggccacctgtgagggcttcatcgccaccctgccccctgtgaatgccacctgtgatgtgatcctggccctgtggctgctgagcaaggagcccggggaccagaggcccctgggcacctacccagatgagcacttcacagaggaggcccccaggaggagcatcgccaccttccagagccggctggcccagatcagccggggcatccaggagaggaaccagggcctggtgctgccctacacctacctggacccccccctgattgagaacagcgtgtccatctag

SEQ ID NO: 20170 - DNA, 2031 bp, synthetic construct
  source 1..2031: mol_type = other DNA; note = Synthetic coding sequence
atggccgagttccgggtgcgggtgtccactggagaggccttcggggccggcacctgggacaaggtgtctgtgtccatcgtgggcaccagaggagagagcccccccctgcccctggacaacctgggcaaggagttcaccgctggagctgaggaggacttccaggtgaccctgcctgaagatgtgggccgggtgctgctgctgcgggtgcacaaggcccctcctgtgctgcccctgctgggccccctggccccagatgcctggttctgccgctggttccagctgaccccaccccggggcggccacctgctcttcccctgctaccagtggctggagggcgccggcaccctggtgctgcaggagggcacagccaaggtgtcctgggccgaccaccaccctgtgctgcagcagcagaggcaggaggagctgcaggcccggcaggagatgtaccagtggaaggcctacaaccctggctggccccactgcctggatgagaagacagtggaggacctggagctgaacatcaagtacagcacagccaagaatgccaacttctacctgcaggccggcagcgcctttgctgagatgaagatcaagggcctgctggacaggaagggcctgtggaggagcctgaatgagatgaagaggatcttcaacttccggaggaccccagctgctgagcacgcctttgagcactggcaggaggatgccttctttgccagccagttcctgaatggcctgaaccctgtgctgatccgccgctgccactacctgcccaagaacttccctgtgacagatgccatggtggcctctgtgctgggccctggcaccagcctgcaggccgagctggagaagggcagcctcttcctggtggaccacggcatcctgagcggcatccagaccaacgtcatcaacgggaagccccagttctctgctgcccccatgaccctgctgtaccagagccctggctgcggccccctgctgcccctggccatccagctgagccagaccccaggccccaacagccccatcttcctgcccacagatgacaagtgggactggctgctggccaagacctgggtgagaaatgctgagttctccttccacgaggccctgacccacctgctgcacagccacctgctgcctgaggtgttcaccctggccaccctgcggcagctgccccactgccaccccctcttcaagctgctgatcccccacacccgctacaccctgcacatcaacaccctggcccgggagctgctgattgtgcccggccaggtggtggacaggagcactggaattggaattgagggcttcagcgagctgatccagaggaacatgaagcagctgaactacagcctgctgtgcctgcctgaggacatccgcacccggggcgtggaggacatccctggctactactacagagatgatggcatgcagatctggggcgctgtggagagatttgtgtctgagatcatcggcatctactaccccagtgatgaatctgtgcaggatgaccgggagctgcaggcctgggtgcgggagatcttcagcaagggcttcctgaaccaggagagcagcggcatccccagcagcctggagacccgggaggccctggtgcagtatgtgaccatggtgatcttcacctgcagcgccaagcacgccgctgtgtctgctggccagtttgacagctgtgcctggatgcccaacctgcccccatccatgcagctgcccccacccaccagcaagggcctggccacctgtgagggcttcatcgccaccctgccccctgtgaatgccacctgtgatgtgatcctggccctgtggctgctgagcaaggagcccggggaccagaggcccctgggcacctacccagatgagcacttcacagaggaggccccccggcgcagcatcgccaccttccagagccggctggcccagatcagccggggcatccaggagaggaaccagggcctggtgctgccctacacctacctggacccccccctgattgaaaattctgtgtccatctag

SEQ ID NO: 20171 - DNA, 1665 bp, synthetic construct
  source 1..1665: mol_type = other DNA; note = Synthetic coding sequence
atggccaccagcgctgacagccccagcagccccctgggcgctgaggacctgctgagtgacagcagcgagcccccaggcctgaaccaggtgagcagcgaggtgaccagccagctgtatgccagcctgcggctgagccggcaggccgaggccacagcccgggcccagctgtacctgcccagcaccagcccccctcatgagggcctggatggctttgcccaggagctgagccgcagcctgtctgtgggcctggagaagaacctgaagaagaaggatggcagcaagcacatctttgagatggagagcgtgcggggccagctgcagaccatgctgcagaccagccgggacacagcctacagagaccccctcatccctggggccggcagcgagcggcgggaggaggacagctttgacagcgacagcacagccaccctgctgaacacccggcccctgcaggacctgagccccagcagcagcgcccaggccctggaggagctgttcccccgctacaccagcctgcggcccggcccccccctgaaccccccagacttccagggcctgagagatgccctggacagcgagcacaccaggaggaagcactgtgagcggcacatccagagcctgcagaccagggtgctggagctgcagcagcagctggccgtggccgtggccgctgacaggaagaaggacaccatgattgagcagctggacaagaccctggcccgggtggtggagggctggaacagacatgaagctgagaggacagaggtgctgcggggcctgcaggaggagcaccaggccgctgagctgaccaggagcaagcagcaggagaccgtgacccggctggagcagagcctgtctgaggccatggaggccctgaaccgggagcaggagagcgcccggctgcagcagcgggagcgggagaccctggaggaggagcggcaggccctgaccctgcggctggaggccgagcagcagcgctgctgcgtgctgcaggaggagagagatgctgcccgggccggccagctgtctgagcaccgggagctggagaccctgcgggccgccctggaggaggagcggcagacctgggcccagcaggagcaccagctgaaggagcactaccaggccctgcaggaggagagccaggcccagctggagcgggagaaggagaagagccagcgggaggcccaggccgcctgggagacccagcaccagctggccctggtgcagagcgaggtgcggcggctggagggggagctggacacagcccggcgggagagagatgccctgcagctggagatgagcctggtgcaggcccgctatgagagccagaggatccagctggagagcgagctggccgtgcagctggagcagagggtgacagagcggctggcccaggcccaggagagcagcctgcggcaggccgccagcctgcgggagcaccacaggaagcagctgcaggacctgagcggccagcaccagcaggagctggccagccagctggcccagttcaaggtggagatggccgagcgggaggagcggcagcagcaggtggctgaagattatgagctgcggctgctgctgctggaccccccagcccctggcctgcggagccccaggagaagaagaggaggcagcggcctgtgcctgccctggccctggccctag

SEQ ID NO: 20172 - DNA, 2778 bp, synthetic construct
  source 1..2778: mol_type = other DNA; note = Synthetic coding sequence
atggccaccagcgctgacagccccagcagccccctgggcgctgaggacctgctgagtgacagcagcgagcccccaggcctgaaccaggtgagcagcgaggtgaccagccagctgtatgccagcctgcggctgagccggcaggccgaggccacagcccgggcccagctgtacctgcccagcaccagcccccctcatgagggcctggatggctttgcccaggagctgagccgcagcctgtctgtgggcctggagaagaacctgaagaagaaggatggcagcaagcacatctttgagatggagagcgtgcggggccagctgcagaccatgctgcagaccagccgggacacagcctacagagaccccctcatccctggggccggcagcgagcggcgggaggaggacagctttgacagcgacagcacagccaccctgctgaacacccggcccctgcaggacctgagccccagcagcagcgcccaggccctggaggagctgttcccccgctacaccagcctgcggcccggcccccccctgaaccccccagacttccagggcctgagagatgccctggacagcgagcacaccaggaggaagcactgtgagcggcacatccagagcctgcagaccagggtgctggagctgcagcagcagctggccgtggccgtggccgctgacaggaagaaggacaccatgattgagcagctggacaagaccctggcccgggtggtggagggctggaacagacatgaagctgagaggacagaggtgctgcggggcctgcaggaggagcaccaggccgctgagctgaccaggagcaagcagcaggagaccgtgacccggctggagcagagcctgtctgaggccatggaggccctgaaccgggagcaggagagcgcccggctgcagcagcgggagcgggagaccctggaggaggagcggcaggccctgaccctgcggctggaggccgagcagcagcgctgctgcgtgctgcaggaggagagagatgctgcccgggccggccagctgtctgagcaccgggagctggagaccctgcgggccgccctggaggaggagcggcagacctgggcccagcaggagcaccagctgaaggagcactaccaggccctgcaggaggagagccaggcccagctggagcgggagaaggagaagagccagcgggaggcccaggccgcctgggagacccagcaccagctggccctggtgcagagcgaggtgcggcggctggagggggagctggacacagcccggcgggagagagatgccctgcagctggagatgagcctggtgcaggcccgctatgagagccagaggatccagctggagagcgagctggccgtgcagctggagcagagggtgacagagcggctggcccaggcccaggagagcagcctgcggcaggccgccagcctgcgggagcaccacaggaagcagctgcaggacctgagcggccagcaccagcaggagctggccagccagctggcccagttcaaggtggagatggccgagcgggaggagcggcagcagcaggtggctgaagattatgagctgcggctggcccgggagcaggcccgggtgtgtgagctgcagagcggcaaccagcagctggaggagcagagggtggagctggtggagcggctgcaggccatgctgcaggcccactgggatgaggccaaccagctgctgagcaccaccctgcccccacccaaccccccagcccccccagctggccccagcagccctggcccccaggagcctgagaaggaggagaggagagtgtggaccatgccacccatggctgtggccctgaagcctgtgctgcagcagagccgggaggccagagatgagctgcccggggcccctcctgtgctgtgcagcagcagcagtgacctgagcctgctgctgggccccagcttccagagccagcacagcttccagcccctggagcccaagccagacctgaccagcagcacagctggggccttcagcgccctgggcgccttccacccagaccacagagctgagcggcccttcccagaagaagatcctggcccagatggagagggcctgctgaagcagggcctgcccccagcccagctggagggcctgaagaacttcctgcaccagctgctggagaccgtgccccagaacaatgaaaaccccagcgtggacctgctgccccccaagagcggccccctgactgtgcccagctgggaggaggccccccaggtgccccgcatccccccacctgtgcacaagaccaaggtgcccctggccatggccagcagcctcttccgggtgcctgagccccccagcagccacagccagggcagcggccccagcagcggcagccctgagagaggaggagatggcctgaccttcccccggcagctgatggaggtgtcccagctgctgcggctgtaccaggcccggggctggggcgccctgcctgctgaggacctgctgctgtacctgaagaggctggagcacagcggctacaagccaggcaggaaggaggagggcttcagcggctggaagctggactatggagagtggagcggcacagatggccgcggggacaacgtgcccaggaggaacacagacagccggctgggggagatccccaggaaggagatccccagccaggccgtgccccggcggctggccacagcccccaagacagagaagcccccagccaggaagaagagcggccacccagcccccagctccatgaggagcagaggaggagtgtggaggtag

SEQ ID NO: 20173 - DNA, 2961 bp, synthetic construct
  source 1..2961: mol_type = other DNA; note = Synthetic coding sequence
atgtacttctgctggggcgctgacagccgggagctgcagaggagaagaacagctggcagccctggagctgagctgctgcaggccgccagcggggagcggcacagcctgctgctgctgaccaaccaccgggtgctgagctgtggggacaacagccggggccagctgggcagaagaggagcccagagaggagagctgcctgagcccatccaggccctggagaccctcatcgtggacctggtgtcctgtgggaaggagcacagcctggccgtgtgccacaagggccgggtgtttgcctggggcgccggcagcgagggccagctgggcattggagagttcaaggagatctccttcacccccaagaagatcatgaccctgaatgacatcaagatcatccaggtgtcctgtggccactaccacagcctggccctgagcaaggacagccaggtgttctcctggggcaagaacagccacggccagctgggcctgggcaaggagttccccagccaggccagcccccagagggtgcgcagcctggagggcatccccctggcccaggtggccgccggcggggcccacagctttgccctgagcctgtgtggcaccagctttggctggggcagcaacagcgctggccagctggccctgagcggcagaaatgtgcctgtgcagagcaacaagcccctgtctgtgggcgccctgaagaacctgggcgtggtgtacatcagctgtggagatgcccacacagctgtgctgacccaggacggcaaggtgttcaccttcggggacaacagaagtggccagctgggctacagccccaccccagagaagaggggcccccagctggtggagagaattgatggcctggtgtcccagattgactgtggcagctaccacaccctggcctacgtgcacaccaccggccaggtggtgtcctttggccacggccccagcgacaccagcaagcccacccaccctgaggccctgacagagaactttgacatcagctgcctgatctctgcagaagattttgtggatgtgcaggtgaagcacatctttgctggcacctacgccaactttgtgaccacccaccaggacaccagcagcacccgggcccctgggaagaccctgcctgagatcagccgcatcagccagagcatggccgagaagtggattgctgtgaagagaagaagcacagagcacgagatggccaagtctgagatccgcatgatcttcagcagccctgcctgcctgacagccagcttcctgaagaagaggggcactggagagaccaccagcattgatgtggacctggagatggcccgggacaccttcaagaagctgaccaagaaggagtggatcagctccatgatcaccacctgcctggaggatgacctgctgcgggccctgccctgccacagcccccaccaggaggccctgagcgtcttcctgctgctgcctgaatgtcctgtgatgcatgacagcaagaactggaagaacctggtggtgccctttgccaaggctgtgtgtgagatgagcaagcagagcctgcaggtgctgaagaagtgctgggccttcctgcaggagagcagcctgaaccccctcatccagatgctgaaggccgccatcatcagccagctgctgcaccagaccaagacagagcaggaccactgcaatgtgaaggccctgctgggcatgatgaaggagctgcacaaggtgaacaaggccaactgccgcctgcctgagaacaccttcaacatcaatgagctgagcaacctgctgaacttctacatcgaccggggccggcagctgttccgggacaaccacctgatgtctgagaagaaggcctacatgctgatgcatgagaccatcctgcagaagaaggatgagttcccccccagcccccgcttcatcctgcgggtgagaagaagccggctggtgaaggatgccctgcggcagctgagccaggccgaggccacagacttctgcaaggtgctggtggtggagttcatcaatgagatctgcccagagagcggaggagtgagcagcgagttcttccactgcatgtttgaggagatgaccaagccagaatatggcatgttcatgtacccagagatgggcagctgcatgtggttccctgccaagcccaagccagagaagaagcgctacttcctgtttggcatgctgtgtggcctgagcctcttcaacctgaatgtggccaacctgcccttccccctggccctgtacaagaagctgctggaccagaagcccagcctggaggacctgaaggagctgagcccccggctgggcaagagcctgcaggaggtgctggatgatgctgctgatgacattggagatgccctgtgcatccgcttcagcatccactgggaccagaatgatgtggacctgatccccaacggcatcagcatccctgtggaccagaccaacaagagggactatgtgtccaagtacatcgactacatcttcaacgtgtctgtgaaggctgtgtatgaggagttccagaggggcttctacagagtgtgtgagaaggagatcctgcggcacttctacccagaggagctgatgacagccatcatcggcaacacagattatgactggaagcagtttgagcagaacagcaaatatgagcagggctaccagaagagccaccccaccatccagctgttctggaaggccttccacaagctgaccctggatgagaagaagaagttcctgttcttcctgaccggccgggaccggctgcacgcccggggcatccagaagatggagatcgtgttccgctgcccagagaccttcagcgagcgggaccaccccaccagcatcacctgccacaacatcctgagcctgcccaagtacagcaccatggagaggatggaggaggccctgcaggtggccatcaacaacaacagaggatttgtgagccccatgctgacccagagctag

SEQ ID NO: 20174 - DNA, 435 bp, synthetic construct
  source 1..435: mol_type = other DNA; note = Synthetic coding sequence
atgaccacccggcaggccaccaaggaccccctgctgcggggcgtgagccccacccccagcaagatccctgtgcgcagccagaagaggacccccttccccaccgtgaccagctgtgctgtggaccaggagaaccaggacccccggcgctgggtgcagaagccacccctgaacatccagaggcccctggtggacagcgctggcccccggcccaaggcccggcaccaggccgagaccagccagaggctggtgggcatcagccagcccaggaaccccctggaggagctgcggcccagcccccggggccagaatgtgggccctggccccccagcccagacagtgctggtgcctgcccctgggaagctgtttgccctgcggcgcagccccttccccccagccaagtgccacctggcccgctgccacggcctgtacctgtag

SEQ ID NO: 20175 - DNA, 327 bp, synthetic construct
  source 1..327: mol_type = other DNA; note = Synthetic coding sequence
atggctgacccccgggtgcggcagatcaagatcaagacaggagtggtgaagaggctggtgaaggagaaggtgatgtatgagaaggaggccaagcagcaggaggagaagattgagaagatgagagcagaagatggagagaactatgacatcaagaagcaggccgagatcctgcaggagagcaggatgatgatcccagactgccagaggcggctggaggccgcctacctggacctgcagaggatcctggagaatgagaaggacctggaggaggccgaggagtacaaggaggcccggctggtgctggacagcgtgaagctggaggcctag

SEQ ID NO: 20176 - DNA, 1341 bp, synthetic construct
  source 1..1341: mol_type = other DNA; note = Synthetic coding sequence
atgagagaatgtctgagcatccacatcggccaggccggcatccagattggagatgcctgctgggagctgtactgcctggagcacggcatccagcccaatggagtggtgctggacacccagcaggaccagctggagaatgccaagatggagcacaccaatgccagctttgacaccttcttctgtgagaccagggctgggaagcacgtgccccgggccctgtttgtggacctggagcccaccgtgattgatggcatcagaacaggccagcacaggagcctcttccaccctgagcagctgctgagcggcaaggaggatgctgccaacaactatgcccggggccgctacagcgtgggcagcgaggtgattgacctggtgctggagaggaccaggaagctggccgagcagtgtggcggcctgcagggcttcctgatcttccgcagctttggaggcggcaccggcagcggcttcaccagcctgctgatggagcggctgactggagagtacagcaggaagaccaagctggagttctctgtgtacccagccccccgcatcagcacagctgtggtggagccctacaacagcgtgctgaccacccacagcaccacagagcacacagactgcaccttcatggtggacaatgaagctgtgtatgacatctgccacaggaagctgggcgtggagtgccccagccacgccagcatcaaccggctggtggtgcaggtggtgagcagcatcacagccagcctgcgctttgagggccccctgaatgtggacctgattgagttccagaccaacctggtgccctacccccgcatccacttccccatgacagcctttgcccccatcgtgtctgctgacaaggcctaccacgagcagttctctgtgtctgacatcaccacagcctgctttgagagcagcaaccagctggtgaagtgtgacccccggctgggcaagtacatggcctgctgcctgctgtacagaggagatgtggtgcccaaggaggtgaatgctgccatcgccgccaccaagagccgccacagcgtgcagtttgtggactggtgccccaccggcttcaaggtgggcatcaacaaccggccccccaccgtgatgcctggaggagacctggccaaggtgcacaggagcatctgcatgctgagcaacaccacagccatcgtggaggcctgggcccggctggaccacaagtttgacctgatgtatgccaagagggccttcctgcactggtacctgcgggagggcatggaggaggccgagttcctggaggcccgggaggacctggccgccctggagcgggactatgaggaggtggcccagagcttctag

SEQ ID NO: 20177 - DNA, 873 bp, synthetic construct
  source 1..873: mol_type = other DNA; note = Synthetic coding sequence
atgggcagcagcaagaaggtgaccctgtctgtgctgagccgggagcagagcgagggcgtgggcgcccgggtgagaagaagcatcggccggcctgagctgaagaacctggaccccttcctgctgtttgatgagttcaagggcggccggcctgggggcttcccagaccacccccaccggggctttgaaacagtgtcctacctgctggagggcggctccatggcccacgaggacttctgtggccacacaggcaagatgaaccctggggacctgcagtggatgacagctggccggggcatcctgcacgccgagatgccctgcagcgaggagcccgcccacggcctgcagctgtgggtgaacctgcggagcagcgagaagatggtggagccccagtaccaggagctgaagtctgaggagatccccaagcccagcaaggatggagtgacagtggccgtcatctctggagaggccctgggcatcaagagcaaggtgtacaccaggacccccaccctgtacctggacttcaagctggaccccggggccaagcacagccagcccatccccaagggctggaccagcttcatctacaccatctctggagatgtgtacatcggcccagatgatgcccagcagaagattgagccccaccacacagctgtgctgggggagggggacagcgtgcaggtggagaacaaggaccccaagaggagccactttgtgctgattgctggggagcccctgcgggagcctgtgatccagcacggcccctttgtgatgaacaccaatgaggagatcagccaggccatcctggacttcagaaatgccaagaatggatttgagcgggccaagacctggaagagcaagattggcaactag

SEQ ID NO: 20178 - DNA, 873 bp, synthetic construct; identical to SEQ ID NO: 20177
  source 1..873: mol_type = other DNA; note = Synthetic coding sequence

SEQ ID NO: 20179 - DNA, 1200 bp, synthetic construct
  source 1..1200: mol_type = other DNA; note = Synthetic coding sequence
atggacttcttcagcagccacctgctggccgacagcagcagccctgccaccaacagcagccacacagatgcccacgagatcctggtgtctgacttcctggtgtctgatgagaacctgcagaagatggagaatgtgctggacctgtggagcagcggcctgaagaccaacatcatcagcgagctgagcaagtggaggctgaacttcatcgactggcacaggatggagatgaggaaggagaaggagaagcacgccgcccacctgaagcagctgtgcaaccagatcaatgagctgaaggagctgcagaagacctttgagatcagcatcggcaggaaggatgaggtgatcagcagcctgagccacgccatcggcaagcagaaggagaagattgagctgatgaggaccttcttccactggagaattggccacgtgcgggcccggcaggatgtgtatgagggcaagctggccgaccagtactaccagaggaccctgctgaagaaggtgtggaaggtgtggaggtctgtggtgcagaagcagtggaaggatgtggtggagcgggcctgccaggcccgggcagaggaggtgtgcatccagatcagcaatgactatgaggccaaggtggccatgctgagcggggccctggagaatgccaaggccgagatccagaggatgcagcacgagaaggagcactttgaagattccatgaagaaggccttcatgagaggagtgtgtgccctgaacctggaggccatgaccatcttccagaacagaaatgatgctggcatcgacagcaccaacaacaagaaggaggagtatggccctggggtgcagggcaaggagcacagcgcccacctggaccccagcgccccacccatgcccctgcctgtgaccagccccctgctgcccagccccccagctgctgtgggcggggccagcgccacagctgtgcccagcgctgcctccatgaccagcacccgggccgccagcgccagctctgtgcacgtgcctgtgtctgccctgggcgccggcagcgctgccacagctgccagcgaggagatgcagaccatcccccaggccacagctgccaagtaccccaggaccatccaccctgagagcagcaccagcgccagccgcagcctgggcaccaggtctgcccacacccagagcctgacctctgtgcacagcatcaaggtggtggactag

SEQ ID NO: 20180 - DNA, 729 bp, synthetic construct
  source 1..729: mol_type = other DNA; note = Synthetic coding sequence
atggctgctgtgaaggccagcaccagcaaggccacccggccctggtacagccaccctgtgtatgcccgctactggcagcactaccaccaggccatggcctggatgcagagccaccacaatgcctacaggaaggctgtggagagctgcttcaacctgccctggtacctgcccagcgccctgctgccccagagcagctatgacaatgaggccgcctacccccagagcttctatgaccaccacgtggcctggcaggactacccctgcagcagcagccacttccgccgcagcggccagcacccccgctacagcagccgcatccaggccagcaccaaggaggaccaggccctgagcaaggaggaggagatggagacagaaagtgatgctgaggtggagtgtgacctgagcaacatggagatcacagaggagctgcggcagtactttgctgagacagagcggcaccgggaggagcggcggcggcagcagcagctggatgctgagcggctggacagctatgtgaatgctgaccatgacctgtactgcaacaccaggagatctgtggaggcccccacagagaggcctggagagcggcggcaggccgagatgaagaggctgtatggagacagcgctgccaagatccaggccatggaggccgctgtgcagctgagctttgacaagcactgtgacaggaagcagcccaagtactggcctgtgatccccctgaagttctag

SEQ ID NO: 20181 - DNA, 1482 bp, synthetic construct
  source 1..1482: mol_type = other DNA; note = Synthetic coding sequence
atggagaggagcccagatgtgtccccaggccccagccgctccttcaaggaggagctgctgtgtgctgtgtgctatgaccccttcagagatgctgtgaccctgcgctgtggccacaacttctgccggggctgtgtgagccgctgctgggaggtgcaggtgagccccacctgccctgtgtgcaaggaccgggccagccctgctgacctgcggaccaaccacaccctgaacaacctggtggagaagctgctgcgggaggaggccgagggcgcccgctggaccagctaccgcttcagccgggtgtgccgcctgcaccggggccagctgagcctcttctgcctggaggacaaggagctgctgtgctgcagctgccaggccgaccccaggcaccagggccaccgggtgcagcctgtgaaggacacagcccatgacttccgggtgcgcagcctgattgctgaggagaggaggaacttcctgcccacccaccagtggatcgtgaccaagacccggctgcagaccagcagccccaacctgcagagccggcggcagggccaggtgcaggagcacggggcctgcacagctggggagggccagggcctgctgggccatgctgccctgctggatgccatggccgaggagacccggcagaagcagctgctggctgatgagaagatgaagcagctgacagaggagacagaggtgctggcccacgagattgaaaggctgcagatggagatgaaggaggatgatgtgtccttcctgatgaagcacaagagcaggaagagaagactcttctgcaccatggagcctgagcctgtgcagcccggcatgctgattgatgtgtgcaagtacctgggcagcctgcagtacagagtgtggaagaagatgctggcctctgtggagagcgtgcccttctcctttgaccccaacacagctgctggctggctgtctgtgtctgatgacctgacctctgtgaccaaccacggctacagagtgcaggtggagaaccctgagcgcttcagcagcgccccctgcctgctgggcagcagggtcttcagccagggcagccacgcctgggaggtggccctgggcggcctgcagagctggagggtgggcgtggtgcgggtgcggcaggacagcggggctgagggccacagccacagctgctaccatgacaccaggagcggcttctggtacgtgtgcaggacccagggcgtggagggggaccactgtgtgaccagtgaccctgccaccagccccctggtgctggccatcccccggcggctgcgggtggagctggagtgtgaggagggggagctgtccttctatgatgctgagcggcactgccacctgtacaccttccacgccaggtttggagaggtgcggccctacttctacctgggcggggcccggggggccggccccccagagcccctgcgcatctgccccctgcacatctctgtgaaggaggagctggatggatag

SEQ ID NO: 20182 - DNA, 1473 bp, synthetic construct
  source 1..1473: mol_type = other DNA; note = Synthetic coding sequence
atgaacctggccgagatctgtgacaatgccaagaagggccgggagtatgccctgctgggcaactatgacagctccatggtgtactaccagggcgtgatgcagcagatccagaggcactgccagagcgtgcgggaccctgccatcaagggcaagtggcagcaggtgcggcaggagctgctggaggagtatgagcaggtgaagagcatcgtgtccaccctggagagcttcaagattgacaagcccccagacttccctgtgtcctgccaggatgagcccttccgggaccctgctgtgtggcccccacctgtgcctgctgagcaccgggccccaccccagatccggcggcccaaccgggaggtgcggcccctgaggaaggagatggccggcgtgggcgcccggggccctgtgggccgggcccaccccatcagcaagtctgagaagcccagcaccagccgggacaaggactaccgggcccggggcagagatgacaagggcaggaagaacatgcaggatggagccagtgatggagagatgcccaagtttgatggagctggctatgacaaggacctggtggaggccctggagcgggacatcgtgtccaggaaccccagcatccactgggatgacattgctgacctggaggaggccaagaagctgctgcgggaggccgtggtgctgcccatgtggatgccagacttcttcaagggcatccggcggccctggaagggcgtgctgatggtgggccccccaggcaccgggaagaccatgctggccaaggctgtggccacagaatgtggcaccaccttcttcaacgtgagcagcagcaccctgaccagcaagtacagaggagagagcgagaagctggtgcggctgctgtttgagatggcccgcttctacgcccccaccaccatcttcattgatgaaattgacagcatctgcagcagaagaggcaccagtgatgagcacgaggccagccggcgggtgaagtctgagctgctgatccagatggatggagtgggcggggccctggagaatgatgaccccagcaagatggtgatggtgctggccgccaccaacttcccctgggacattgatgaggccctgcggcggcggctggagaagaggatctacatccccctgcccacagccaagggccgggcagagctgctgaagatcaacctgcgggaggtggagctggaccctgacatccagctggaggacattgctgagaagattgagggctacagcggggctgacatcaccaacgtgtgcagagatgccagcctgatggccatgagaagacgcatcaatggcctgagccctgaggagatccgggccctgagcaaggaggagctgcagatgcctgtgaccaagggggactttgagctggccctgaagaagatcgccaagtctgtgtctgctgctgacctggagaagtatgagaagtggatggtggagtttggaagtgcctag

SEQ ID NO: 20183 - DNA, 1473 bp, synthetic construct; identical to SEQ ID NO: 20182
  source 1..1473: mol_type = other DNA; note = Synthetic coding sequence

SEQ ID NO: 20184 - DNA, 1068 bp, synthetic construct
  source 1..1068: mol_type = other DNA; note = Synthetic coding sequence
atggacttcatcttccacgagaagcaggagggcttcctgtgtgcccagcactgcctgaacaacctgctgcagggcgagtacttcagccctgtggagctggccagcatcgcccaccagctggatgaggaggagaggatgaggatggccgagggcggcgtgaccagcgaggagtacctggccttcctgcagcagcccagcgagaacatggatgacaccggcttcttcagcatccaggtgatcagcaatgccctgaagttctggggcctggagatcatccacttcaacaaccctgagtaccagaagctgggcatcgaccccatcaatgaaagaagcttcatctgcaactacaagcagcactggttcaccatcaggaagtttgggaagcactggttcaacctgaacagcctgctggccggccctgagctgatcagtgacacctgcctggccaacttcctggcccggctgcagcagcaggcctacagcgtgtttgtggtgaagggggacctgcctgactgtgaggccgaccagctgctgcagatcatctctgtggaggagatggacacccccaagctgaatggcaagaagctggtgaagcagaaggagcaccgggtgtacaagacagtgctggagaaggtgtctgaggagagtgatgaaagtggcaccagtgaccaggatgaggaggacttccagagggccctggagctgagccggcaggagaccaacagagaagatgagcacctgcggagcaccatcgagctgtccatgcagggcagcagcggcaacaccagccaggacctgcccaagaccagctgtgtgaccccagccagcgagcagcccaagaagatcaaggaggactactttgagaagcaccagcaggagcagaagcagcagcagcagcagagcgacctgcccggccacagcagctacctgcacgagcggcccaccaccagcagccgggccattgaaagtgacctgagtgatgacatcagcgagggcaccgtgcaggccgctgtggacaccatcctggagatcatgaggaagaacctgaagatcaagggggagaagtag

SEQ ID NO: 20185 - DNA, 5910 bp, synthetic construct
  source 1..5910: mol_type = other DNA; note = Synthetic coding sequence
atggccgcccggagcgcccccagctgccacctgcggctggagtgggtgtatggctaccggggccaccagtgcaggaacaacctgtactacacagctgccaaggagatcgtgtactttgtggccggcgtgggcgtggtgtacagcccccgggagcaccggcagaagttctaccggggccacagtgatgacatcatcagcctggccctgcaccctgagcgggtgctggtggccaccggccaggtgggcaaggagccctacatctgcatctgggacagctacacagtgcagaccatctctgtgctgaaggatgtgcacacccatggaattgcctgcctggcctttgacctggatggccagaggctggtgtctgtgggcctggacagcaagaatgctgtgtgtgtgtgggactggaagaggggcaagatgctgtccatggcccctggccacacagaccgcatctttgacatctcctgggacctgtaccagcccaacaagctggtgtcctgtggggtgaagcacatcaagttctggagcctgtgtggaaatgccctgacccccaagaggggcgtgtttgggaagacaggagacctgcagaccatcctgtgcctggcctgtgccagagatgagctgacctacagcggggccctgaatggagacatctacgtgtggaagggcatcaacctgatccgcaccatccagggcgcccatgctgctggcatcttctccatgaatgcctgtgaggagggctttgccaccggcggcagagatggctgcatccggctgtgggacctgaccttcaagcccatcaccgtcatcgacctgcgggagacagaccagggctacaagggcctgtctgtgcgctctgtgtgctggaggggggaccacatcctggtgggcacccaggacagcgagatctttgagatcgtggtgcaggagaggaacaagcccttcctgatcatgcagggccactgtgagggggagctgtgggccctggccgtgcaccccaccaagcccctggccgtgacaggcagtgatgacagatctgtgcgcatctggagcctggtggaccacgccctgattgcccgctgcaacatggaggagcccatccgctgtgccgctgtgaatgctgatggcatccacctggccctgggcatgaaggatggcagcttcaccgtgctgcgggtgcgggacatgacagaggtggtgcacatcaaggacaggaaggaggccatccacgagctgaagtacagcccagatggcacctacctggccgtgggctgcaatgacagctctgtggacatctatggagtggcccagcgctacaagaaggtgggggagtgcctgggcagcctgtccttcatcacccacctggactggagcagtgacagccgctacctgcagaccaatgatggaaatggcaagaggctcttctacaggatgcctgggggcaaggaggtgaccagcacagaggagatcaagggcgtgcactgggcctcctggacctgtgtgtctggcctggaggtgaatggcatctggcccaagtacagcgacatcaatgacatcaacagcgtggatggcaactacatcggccaggtgctggtgacagcagatgattatggcatcatcaagctgttccgctacccctgcctgaggaagggggccaagttcaggaagtacatcggccacagcgcccacgtgaccaacgtgcgctggagccatgactaccagtgggtgatcagcattggaggagctgaccacagcgtcttccagtggaagttcatccctgagaggaagctgaaggatgctgtgcacatcgccccccaggagagcctggccgacagccacagtgatgaaagtgacagcgacctgagtgatgtgcctgagctggacagcgagattgagcaggagacccagctgacctaccgccggcaggtgtacaaggaggacctgccccagctgaaggagcagtgcaaggagaagcagaagagcgccaccagcaagaggcgggagcgggcccctggcaacagcatccggctgcactttgtgcacggctaccggggctatgactgccgcagcaacctcttctacacccagattggagagatcgtgtaccacgtggccgctgtgggcgtcatctacaaccggcagcagaacacccagcgcttctacctgggccatgatgatgacatcctgtgcctgaccatccaccccctgaaggactatgtggccaccggccaggtgggccgggaccccagcatccacatctgggacacagagaccatcaagcccctgagcatcctgaagggccaccaccagtatggagtgtctgctgtggacttcagcgcagatggcaagaggctggcctctgtgggcattgatgacagccacacagtggtgctgtgggactggaagaagggggagaagctgagcatcgcccggggcagcaaggacaagatctttgtggtgaagatgaacccctacgtgcctgacaagctgatcacagctggcatcaagcacatgaagttctggaggaaggccggcggcggcctgattggaaggaagggctacatcggcaccctgggcaagaatgacaccatgatgtgtgctgtgtatggctggacagaggagatggccttcagcggcaccagcactggagatgtgtgcatctggagggacatcttcctggtgaagacagtgaaggcccatgatggccctgtgttctccatgcacgccctggagaagggctttgtgactggaggcaaggatggcatcgtggccctgtgggatgacagctttgagcgctgcctgaagacctacgccatcaagagagctgccctggcccctggcagcaagggcctgctgctggaggacaaccccagcatccgggccatcagcctgggccacggccacatcctggtgggcaccaagaatggagagatcctggaggtggacaagagcggccccatcaccctgctggtgcagggccacatggagggggaggtgtggggcctggccacccacccctacctgcccatctgtgccaccgtgtctgatgacaagaccctgcgcatctgggacctgagccccagccactgcatgctggccgtgaggaagctgaagaagggcggccgctgctgctgcttctccccagatggcaaggccctggccgtgggcctgaatgatggcagcttcctgatggccaatgctgacaccctggaggacctggtgtccttccaccacaggaaggacatgatcagtgacatccgcttcagccctggcagcggcaagtacctggccgtggccagccatgacagcttcatcgacatctacaacgtgatgagcagcaagagggtgggcatctgcaagggggccaccagctacatcacccacatcgactgggacatccggggcaagctgctgcaggtgaacacaggagccaaggagcagctgttctttgaggccccccggggcaagaagcagaccatccccagcgtggaggtggagaagatcgcctgggcctcctggacctctgtgctgggcctgtgctgtgagggcatctggcctgtgattggagaggtgacagatgtgacagccagctgcctgaccagtgacaagatggtgctggccactggagatgacctgggctttgtgaagctgttccgctaccccaccaagggcaagtttgggaagttcaagcgctacgtggcccacagcacccacgtgaccaacgtgcgctggacctatgatgacagcatgctggtgaccctgggcggcacagacatgagcctgatggtgtggaccaatgagatggagggctaccgggagaagaggccctgtgacagcgaggagagtgacatcgacagcgaggaggatggcggctatgacagtgatgtgaccagagaaaatgagatctcctacaccatccgggccctgagcaccaacatccggcccatgctgggcatcaagccccacctgcagcagaaggagcccagcattgatgagcggccccctgtgtcccgggccccaccccagcctgagaagctgcagaccaacaacgtgggcaagaagaagaggcccatcgaggacctggtgctggagctgatcttcggctaccggggccgggactgcagaaataatgtgcactacctgaatgatggagatgacatcatctaccacacagcctctgtgggcatcctgcacaacgtggccaccggcagccagagcttctaccaggagcacaatgatgacatcctgtgcctgactgtgaaccagcaccccaagttcatcaacatcgtggccaccggccaggtgggggacagcgctgacatgtctgccacagcccccagcatccacatctgggatgccatgaacaagcagaccctgagcatcctgcgctgctaccacagcaagggcgtgtgcagcgtgtccttcagcgccaccgggaagctgctgctgtctgtgggcctggaccctgagcacaccatcaccatctggcgctggcaggagggcgccaagatcgccagccgggccggccacaaccagaggatctttgtggccgagttccggccagacagcgacacccagtttgtgtctgtgggcgtgaagcacgtgaagttctggaccctggccggccgggccctgctgagcaagaagggcctgctgagcaccctggaggatgccaggatgcagaccatgctggccatcgccttcggggccaacaacctgaccttcaccggcaccatctctggagatgtgtgtgtgtggaaggaccacatcctgtgccgcatcgtggcccgggcccacaacggccctgtgtttgccatgtacaccaccctgagagatggcctgattgtgactggaggcaaggagcggcccagcaaggagggcggcgctgtgaagctgtgggaccaggagctgcggcgctgccgggccttccggctggagaccggccaggccacagactgtgtgcgctctgtgtgccggggcaagggcaagatcctggtgggcaccagaaatgctgagatcatcgaggtgggggagaagaatgctgcctgcaacatcctggtgaatggccacgtggatggccccatctggggcctggccacccaccccagccgggacttcttcctgtctgctgctgaagatggcaccgtgcggctgtgggacattgctgacaagaagatgctgaacaaggtgaacctgggccatgctgccaggacagtgtgctacagccctgagggggacatggtggccatcggcatgaagaatggagagttcatcatcctgctggtgagcagcctgaagatctggggcaagaagagggaccggcgctgtgccatccatgacatccgcttctccccagacagccgctacctggccgtgggcagcagcgagaacagcgtggacttctatgacctgaccctgggccccaccctgaaccgcatctcctactgcaaggacatccccagctttgtgatccagatggacttctctgctgacagcagctacctgcaggtgagcagcggctgctacaagagacatgtgtatgaggtgcccagcggcaagcacctgatggaccatgctgccatcgaccgcatcacctgggccacctggaccagcatcctgggagatgaggtgctgggcatctggagcagacatgctgagaaggcagatgtgaactgtgcctgtgtgagccacagcggcatcagcctggtgactggagatgactttggcatggtgaagctgtttgacttcccctgcccagagaagtttgccaagcacaagcgcttcctgggccacagcccccacgtgaccaacatccgcttcaccagcggggacagacatgtggtgtctgctggaggagatgactgcagcctgtttgtgtggaagtgtgtgcacaccccccactag

SEQ ID NO: 20186 - DNA, 1146 bp, synthetic construct
  source 1..1146: mol_type = other DNA; note = Synthetic coding sequence
atgcccctgcaggtgtctgactacagctggcagcagaccaagacagctgtgttcctgagcctgcccctgaagggcgtgtgtgtgcgggacacagatgtgttctgcacagagaactacctgaaggtgaacttcccccccttcctgtttgaggccttcctgtatgcccccattgatgatgagagcagcaaggccaagattggaaatgacaccatcgtgttcaccctgtacaagaaggaggccgccatgtgggagaccctgtctgtgactggagtggacaaggagatgatgcagaggatccgggagaagagcatcctgcaggcccaggagcgggccaaggaggccacagaggccaaggccgccgccaagcgggaggaccagaagtatgccctgtctgtgatgatgaagattgaggaggaggagaggaagaagattgaggacatgaaggaaaatgaaagaatcaaggccaccaaggccctggaggcctggaaggagtaccagaggaaggccgaggagcagaagaagatccagcgggaggagaagctgtgccagaaggagaagcagatcaaggaggagaggaagaagatcaagtacaagagcctgaccaggaacctggccagcaggaacctggcccccaagggcaggaacagcgagaacatcttcacagagaagctgaaggaggacagcatcccagcccccaggtctgtgggcagcatcaagatcaacttcacccccagggtcttccccacagccctgcgggagagccaggtggccgaggaggaggagtggctgcacaagcaggccgaggcccggcgggccatgaacacagacattgctgagctgtgtgacctgaaggaggaggagaagaaccctgagtggctgaaggacaagggcaacaagctgtttgccacagagaactacctggccgccatcaatgcctacaacctggccatccggctgaacaacaagatgcccctgctgtacctgaacagagctgcctgccacctgaagctgaagaacctgcacaaggccatcgaggacagcagcaaggagttctgcagcctggagggcatcgagtgccaggccagcgagcccaagctgagccaccacatccccagcgacctgcacgtgtacatccagatggcctag

SEQ ID NO: 20187 - DNA, 1344 bp, synthetic construct
  source 1..1344: mol_type = other DNA; note = Synthetic coding sequence
atggccggggccggcggcggcaatgacatccagtggtgcttcagccaggtgaagggagctgtggatgatgatgtggccgaggccgacatcatcagcacagtggagttcaaccacagcggggagctgctggccactggagacaagggcggccgggtggtgatcttccagcaggagcaggagaacaagatccagagccacagcagaggagagtacaacgtgtacagcaccttccagagccatgagcctgagtttgactacctgaagagcctggagattgaggagaagatcaacaagatccgctggctgccccagaagaatgctgcccagttcctgctgagcaccaatgacaagaccatcaagctgtggaagatcagcgagcgggacaagaggcctgagggctacaacctgaaggaggaggatggccgctacagagaccccaccaccgtgaccaccctgcgggtgcctgtgttccggcccatggacctgatggtggaggccagcccccggcgcatctttgccaatgcccacacctaccacatcaacagcatcagcatcaacagcgactatgagacctacctgtctgcagatgacctgcgcatcaacctgtggcacctggagatcacagaccgctccttcaacatcgtggacatcaagccagccaacatggaggagctgacagaggtgatcacagctgctgagttccaccccaacagctgcaacacctttgtgtacagcagcagcaagggcaccatccggctgtgtgacatgagggccagcgccctgtgtgacagacacagcaagctgtttgaggagcctgaggaccccagcaacagaagcttcttcagcgagatcatcagcagcatcagtgatgtgaagttcagccacagcggccgctacatgatgacccgggactacctgtctgtgaagatctgggacctgaacatggagaacagacctgtggagacctaccaggtgcatgagtacctgcggagcaagctgtgcagcctgtatgaaaatgactgcatctttgacaagtttgagtgctgctggaatggaagtgacagcgtggtgatgacaggcagctacaacaacttcttcaggatgtttgacaggaacaccaagagggacatcaccctggaggccagccgggagaacaacaagcccaggacagtgctgaagcccaggaaggtgtgtgccagcggcaagaggaagaaggatgagatctctgtggacagcctggacttcaacaagaagatcctgcacacagcctggcaccccaaggagaacatcatcgctgtggccaccaccaacaacctgtacatcttccaggacaaggtgaactag

SEQ ID NO: 20188 - DNA, 1413 bp, synthetic construct
  source 1..1413: mol_type = other DNA; note = Synthetic coding sequence
atggacctgcgggaccaggagctggtgaagatcgtgggcatccgctatgaggtgggcccccccaccctgtgctgcctgaagctggccttcattgatcctgccaccgggaagctgatggacaagagcttcagcatccgctaccatgacatgccagatgtgattgacttcctggtgctgcggcagttctatgatgaggcccggcagaggaactggcagagctgtgaccgcttccgcagcatcattgatgatgcctggtggtttggaacagtgctgagccaggagccctaccagccccagtacccagacagccacttccagtgctacatcgtgcgctgggacaacacagaaattgagaagctgagcccctgggacatggagcccatcccagacaacgtggaccccccagaggagctgggcgccagcatctctgtgaccacagatgagctggagaagctgctgtacaagccccaggccggggagtggggccagaagagcagagatgaagaatgtgaccgcatcatctctggaattgaccagctgctgaacctggacattgctgctgcctttgctggccctgtggacctgtgcacctaccccaagtactgcaccgtggtggcctaccccacagacctgtacaccatccgcatgaggctggtgaaccgcttctaccgccgcctgagcgccctggtgtgggaggtgcgctacatcgagcacaatgcccggaccttcaatgaacctgagagcgtcatcgcccggagcgccaagaagatcacagaccagctgctgaagttcatcaagaaccagcactgcaccaacatcagcgagctgagcaacaccagtgaaaatgatgagcagaatgctgaggacctggatgacagcgacctgcccaagaccagcagcggcagaagaagagactacagagacatcatcgacacccccatggactttggcaccgtgcgggagaccctggatgctggcaactatgacagccccctggagttctgcaaggacatccgcctcatcttcagcaatgccaaggcctacacccccaacaagaggagcaagatctacagcatgaccctgcggctgagcgccctgtttgaggagaagatgaagaagatcagcagtgacttcaagattggccagaagttcaatgagaagctgcggcgcagccagcgcttcaagcagaggcagaactgcaagggggacagccagcccaacaagagcatccggaacctgaagcccaagaggctgaagagccagaccaagatcatccctgagctggtgggcagccccacccagagcaccagcagcaggacagcctacctgggcacccacaagaccagcgctggcatcagcagcggcgtgaccagcggcctcttccgcttcagccgcatcatcaggaaggagtag

SEQ ID NO: 20189 - DNA, 516 bp, synthetic construct
  source 1..516: mol_type = other DNA; note = Synthetic coding sequence
atgtgtggccgggcccctcctcctgagatcaccggccgggagcccggctaccacctggtggagcagagctgctggctgaagcccctgcccaggaacctgggccacagcctcttctggacagtgtggaagcccaggcctgtgtcccagctggtggcccagcaggtgacccagcagtttgtgccccccacccagagcaagaaggagaagaaggacaaggtggagaaggagaagtctgagaaggagaccaccagcaagaagaacagccacaagaagacccggccccggctgaagaatgtggacaggagcagcgcccagcacctggaggtgacagtgggggacctgaccgtcatcatcacagacttcaaggagaagaccaagagccccccagccagcagcgctgccagcgctgaccagcacagccagagcggcagcagcagtgacaacacagagcggggcatgagccgcagcagcagccccagaggagaggccagcagcctgaatggagagagccactag

SEQ ID NO: 20190 - DNA, 417 bp, synthetic construct
  source 1..417: mol_type = other DNA; note = Synthetic coding sequence
atgggagacaagaagagccccaccaggaagcccaggcctgtgtcccagctggtggcccagcaggtgacccagcagtttgtgccccccacccagagcaagaaggagaagaaggacaaggtggagaaggagaagtctgagaaggagaccaccagcaagaagaacagccacaagaagacccggccccggctgaagaatgtggacaggagcagcgcccagcacctggaggtgacagtgggggacctgaccgtcatcatcacagacttcaaggagaagaccaagagccccccagccagcagcgctgccagcgctgaccagcacagccagagcggcagcagcagtgacaacacagagcggggcatgagccgcagcagcagccccagaggagaggccagcagcctgaatggagagagccactag

SEQ ID NO: 20191 - DNA, 1047 bp, synthetic construct
  source 1..1047: mol_type = other DNA; note = Synthetic coding sequence
atgggccactgctgctgcaagccctacaactgcctgcagtgcctggacaagaccaatgaaagtgccctggtgaaggagaaggagctgagcattgagctggccaacatcagagatgaggtggccttccacacagccaagtgtgagaagctgcagaaggagaaggaggagctggagaggagatttgaagatgaggtgaagaggctgggctggcagcagcaggccgagctgcaggagctggaggagcggctgcagctgcagtttgaagctgagatggcccggctgcaggaggagcacggggaccagctgctgagcatccgctgccagcaccaggagcaggtggaggacctgacagccagccatgatgctgccctgctggagatggagaacaaccacacagtggccatcaccatcctgcaggatgaccatgaccacaaggtgcaggagctgatgagcacccatgagctggagaagaaggagctggaggagaactttgagaagctgcggctgagcctgcaggaccaggtggacaccctgaccttccagagccagagcctgcgggaccgggccaggagatttgaggaggccctgaggaagaacacagaggagcagctggagatcgccctggccccctaccagcacctggaggaggacatgaagagcctgaagcaggtgctggagatgaagaaccagcagatccacgagcaggagaagaagatcctggagctggagaagctggccgagaagaacatcatcctggaggagaagatccaggtgctgcagcagcagaatgaagacctgaaggccagaattgaccagaacacagtggtgacccggcagctgtctgaagaaaatgccaacctgcaggagtatgtggagaaggagacccaggagaagaagaggctgagcaggaccaatgaggagctgctgtggaagctgcagacaggagaccccaccagccccatcaagctgagccccaccagccctgtgtaccggggcagcagcagcggccccagcagccctgcccgggtgtccaccacccccaggtag

SEQ ID NO: 20192 - DNA, 2664 bp, synthetic construct
  source 1..2664: mol_type = other DNA; note = Synthetic coding sequence
atgaacagcggcggcggcctgcccccaccttctgctgctgccagccccagcagcagcagcctggccgctgctgtggccgtggtggcccctcctggggtgggcggcgtgcctggaggagctgctgtgggcgtgaagctgaagtactgccgctactatgccaaggacaagacctgcttctacggggaggagtgccagttcctgcatgaagatcctgctgctggagctgcccctggcctgggcctgcacagcaacagcgtgcccctggccctggccggggcccctgtggccggcttccccccaggagctgtggccggcggcggggccggccccccacctggccccaagaagccagacctgggggaccccggcaccggggctgctgctgggggcggcggcagcagcggcggcctggatggcccccggctggccatccctggcatggatggaggagccctgacagacaccagcctgacagacagctacttcagcaccagcttcatcggcgtgaatggcttcggcagccctgtggagaccaagtaccccctgatgcagaggatgaccaacagcagcagcagccccagcctgctgaatgattctgccaagccctacagcgcccatgaccccctgaccagccctgccagcagcctcttcaatgactttggagccctgaacatcagccagaggaggaagcccaggaagtaccgcctgggcatgctggaggagcggctggtgcccatgggcagcaaggccaggaaggccaagaaccccatcggctgcctggccgaccgctgcaagagcggcgtgcccatcaacatggtgtggtggaacagagtgacagagaacaacctgcagacccccaaccccacagccagcgagttcatccccaagggcggcagcaccagccggctgagcaatgtgtcccagagcaacatgtctgccttcagccaggtgttcagccaccccagcatgggcagccctgccacagctggcctggcccctggcatgagcctgtctgctggcagcagccccctgcacagccccaagatcaccccccacaccagccctgcccccaggagaagaagccacacccccaacccagccagctacatggtgcccagcagcgccagcacctctgtgaacaaccctgtgtcccagacccccagcagcggccaggtgatccagaaggagaccgtgggcggcaccacctacttctacacagacaccaccccagcccccctgaccggcatggtgttccccaactaccacatctacccacccacagccccccacgtggcctacatgcagcccaaggccaatgcccccagcttcttcatggctgatgagctgcggcaggagctgatcaacagacacctgatcaccatggcccagattgaccaggccgacatgcctgctgtgcccacagaggtggacagctaccacagcctcttccccctggagcccctgcccccacccaaccgcatccagaagagcagcaactttggctacatcaccagctgctacaaggctgtgaacagcaaggatgacctgccctactgcctgcggcgcatccacggcttccggctggtgaacaccaagtgcatggtgctggtggacatgtggaagaagatccagcacagcaacatcgtgaccctgcgggaggtgttcaccaccaaggcctttgctgagcccagcctggtgtttgcctatgacttccacgccggcggggagaccatgatgagccgccacttcaatgaccccaatgctgatgcctacttcaccaagaggaagtggggccagcacgagggccccctgccccggcagcacgccggcctgctgcctgagagcctcatctgggcctacatcgtgcagctgagcagcgccctgcggaccatccacacagctggcctggcctgccgggtgatggaccccaccaagatcctgatcaccgggaagacccggctgcgggtgaactgtgtgggcgtgtttgatgtgctgacctttgacaacagccagaacaacaaccccctggccctgatggcccagtaccagcaggccgacctgatcagcctgggcaaggtggtgctggccctggcctgcaacagcctggccggcatccagcgggagaacctgcagaaggccatggagctggtgaccatcaactacagcagtgacctgaagaacctgatcctgtacctgctgacagaccagaacaggatgaggtctgtgaatgacatcatgcccatgattggagcccgcttctacacccagctggatgctgcccagatgagaaatgatgtgattgaggaggacctggccaaggaggtgcagaatggccgcctcttccggctgctggccaagctgggcaccatcaatgaaagacctgagttccagaaggaccccacctggagcgagactggagaccgctacctgctgaagctgttccgggaccacctgttccaccaggtgacagaagctggggccccctggattgacctgagccacatcatcagctgcctgaacaagctggatgctggggtgcctgagaagatcagcctcatcagcagagatgagaagtctgtgctggtggtgacctacagcgacctgaagcgctgctttgagaacaccttccaggagctgattgctgctgccaacggccagctgtag

SEQ ID NO: 20193 - DNA, 1710 bp, synthetic construct
  source 1..1710: mol_type = other DNA; note = Synthetic coding sequence
atggccaccctggtggtgaacaagctgggcgccggcgtggacagcggccggcagggcagccggggcacagctgtggtgaaggtgctggagtgtggggtgtgtgaagatgtgttcagcctgcagggcgacaaggtgccccggctgctgctgtgtggccacacagtgtgccacgactgcctgacccggctgcccctgcacggccgggccatccgctgcccctttgaccggcaggtgacagacctgggggacagcggcgtgtggggcctgaagaagaactttgccctgctggagctgctggagcggctgcagaatggccccatcggccagtacggggctgctgaggagagcatcggcatcagcggggagagcatcatccgctgtgatgaagatgaggcccacctggcctctgtgtactgcaccgtgtgtgccacccacctgtgcagtgaatgttcccaggtgacccacagcaccaagaccctggccaagcaccggcgggtgcccctggccgacaagccccatgagaagaccatgtgcagccagcaccaggtgcacgccatcgagtttgtgtgcctggaggagggctgccagaccagccccctgatgtgctgcgtgtgcaaggagtatggcaagcaccagggccacaagcacagcgtgctggagcctgaggccaaccagatccgggccagcatcctggacatggcccactgcatccgcaccttcacagaggagatcagtgactacagcaggaagctggtgggcatcgtgcagcacatcgagggcggggagcagatcgtggaggatggcatcggcatggcccacacagagcacgtgcccggcacagcagaaaatgcccggagctgcatccgggcctacttctatgacctgcacgagaccctgtgccggcaggaggagatggccctgtctgtggtggatgcccacgtgcgggagaagctgatctggctgcggcagcagcaggaggacatgaccatcctgctgtctgaggtgtctgctgcctgcctgcactgtgagaagaccctgcagcaggatgactgccgggtggtgctggccaagcaggagatcacccggctgctggagaccctgcagaagcagcagcagcagttcacagaggtggccgaccacatccagctggatgccagcatccctgtgaccttcaccaaggacaacagagtgcacatcggccccaagatggagatccgggtggtgaccctgggcctggatggagctgggaagaccaccatcctcttcaagctgaagcaggatgagttcatgcagcccatccccaccatcggcttcaacgtggagaccgtggagtacaagaacctgaagttcaccatctgggatgtgggcggcaagcacaagctgcggcccctgtggaagcactactacctgaacacccaggccgtggtgtttgtggtggacagcagccaccgggaccgcatcagcgaggcccacagcgagctggccaagctgctgacagagaaggagctgagagatgccctgctgctgatctttgccaacaagcaggatgtggccggggccctgtctgtggaggagatcacagagctgctgagcctgcacaagctgtgctgcggccgctcctggtacatccagggctgtgatgcccggagcgtcttccagatcatctgtgaccagtacaccgggaaggaggtggtgacagagaagggctag

SEQ ID NO: 20194 - DNA, 2061 bp, synthetic construct
  source 1..2061: mol_type = other DNA; note = Synthetic coding sequence
atgggccgcatccaccaggccatggtgaccagcctgaatgaagataatgaatctgtgacagtggagtggattgaaaatggagacaccaagggcaaggagattgacctggagagcatcttcagcctgaacccagacctggtgcctgatgaggagattgagcccagccctgagaccccacctcctccagccagcagcgccaaggtgaacaagatcgtgaagaacagaagaacagtggccagcatcaagaatgacccccccagccgggacaacagagtggtgggcagcgcccgggcccggcccagccagtttcctgagcagagcagcagcgcccagcagaatggatctgtgtctgacatcagccctgtgcaggccgccaagaaggagtttggaccacccagcaggaggaagagcaactgtgtgaaggaggtggagaagctgcaggagaagcgggagaagaggcggctgcagcagcaggagctgcgggagaagagggcccaggatgtggatgccaccaaccccaactatgagatcatgtgcatgatccgggacttccggggcagcctggactaccggcccctgaccacagctgaccccattgatgagcaccgcatctgtgtgtgtgtgaggaagaggcccctgaacaagaaggagacccagatgaaggacctggatgtgatcaccatccccagcaaggatgtggtgatggtgcatgagcccaagcagaaggtggacctgacccgctacctggagaaccagaccttccgctttgattatgcctttgatgattctgccccaaatgagatggtgtaccgcttcaccgcccggcccctggtggagaccatctttgagcggggcatggccacctgctttgcctacggccagacaggcagcggcaagacccacaccatgggcggggacttcagcggcaagaaccaggactgcagcaagggcatctatgccctggccgccagagatgtgttcctgatgctgaagaagcccaactacaagaagctggagctgcaggtgtatgccaccttctttgagatctacagcggcaaggtgtttgacctgctgaacaggaagaccaagctgcgggtgctggaggatggcaagcagcaggtgcaggtggtgggcctgcaggagcgggaggtgaagtgtgtggaggatgtgctgaagctgattgacatcggcaacagctgcaggaccagcggccagaccagcgccaatgcccacagcagccgcagccatgctgtgttccagatcatcctgcggaggaagggcaagctgcacggcaagttcagcctgattgacctggccggaaatgaaagaggagctgacaccagcagcgctgaccggcagacccggctggagggcgctgagatcaacaagagcctgctggccctgaaggagtgcatccgggccctgggcaggaacaagccccacacccccttccgggccagcaagctgacccaggtgctgcgggacagcttcatcggggagaacagcaggacctgcatgattgccaccatcagccctggcatggccagctgtgagaacaccctgaacaccctgcgctatgccaacagagtgaaggagctgactgtggaccccacagctgctggagatgtgcggcccatcatgcaccacccccccaaccagattgatgacctggagacccagtggggcgtgggcagcagcccccagagagatgacctgaagctgctgtgtgagcagaatgaggaggaggtgagcccccagctgttcaccttccatgaagctgtgtcccagatggtggagatggaggagcaggtggtggaggaccacagagctgtgttccaggagagcatccgctggctggaggatgagaaggccctgctggagatgacagaggaggtggactatgatgtggacagctatgccacccagctggaggccatcctggagcagaagattgacatcctgacagagctgcgggacaaggtgaagagcttccgggccgccctgcaggaggaggagcaggccagcaagcagatcaaccccaagaggccccgggccctgtag

SEQ ID NO: 20195 - DNA, 618 bp, synthetic construct
  source 1..618: mol_type = other DNA; note = Synthetic coding sequence
atgtctgtggaccccatgacctatgaggcccagttcttcggcttcaccccccagacctgcatgctgcgcatctacatcgccttccaggactacctgtttgaggtgatgcaggccgtggagcaggtgatcctgaagaagctggatggcatcccagactgtgacatcagccctgtgcagatcaggaagtgcacagagaagttcctgtgcttcatgaagggccactttgacaacctcttcagcaagatggagcagctgttcctgcagctgatcctgcgcatccccagcaacatcctgctgcctgaggacaagtgcaaggagaccccctacagcgaggaggacttccagcacctgcagaaggagattgagcagctgcaggagaagtacaagacagagctgtgcaccaagcaggccctgctggccgagctggaggagcagaagatcgtgcaggccaagctgaagcagaccctgaccttctttgatgagctgcacaacgtgggccgggaccacggcaccagtgacttccgggagagcctggtgtccctggtgcagaacagcaggaagctgcagaacatccgggacaacgtggagaaggagagcaagaggctgaagatctcctag

SEQ ID NO: 20196 - DNA, 1866 bp, synthetic construct
  source 1..1866: mol_type = other DNA; note = Synthetic coding sequence
atggtgctgtgccctgtgattggcaagctgctgcacaagagggtggtgctggccagcgccagcccccggcggcaggagatcctgagcaatgccggcctgcgctttgaggtggtgcccagcaagttcaaggagaagctggacaaggccagctttgccaccccctacggctacgccatggagacagccaagcagaaggccctggaggtggccaacagactctaccagaaggacctgcgggccccagatgtggtgattggagctgacaccatcgtgacagtgggcggcctcatcctggagaagcctgtggacaagcaggatgcctacaggatgctgagccggctgagcggccgggagcacagcgtcttcaccggggtggccatcgtgcactgcagcagcaaggaccaccagctggacaccagggtgtctgagttctatgaggagaccaaggtgaagttcagcgagctgtctgaggagctgctgtgggagtatgtgcacagcggggagcccatggacaaggccggcggctacggcatccaggccctgggcggcatgctggtggagagcgtgcacggggacttcctgaatgtggtgggcttccccctgaaccacttctgcaagcagctggtgaagctgtactacccacccaggcctgaggacctgcggcgctctgtgaagcatgacagcatcccagctgctgacacctttgaggacctgagtgatgtggagggcggcggcagcgagcccacccagagagatgctggcagcagagatgagaaggccgaggccggggaggccggccaggccacagctgaggccgagtgccacaggacccgggagaccctgccccccttccccacccggctgctggagctgattgagggcttcatgctgagcaagggcctgctgacagcctgcaagctgaaggtgtttgacctgctgaaggatgaggccccccagaaggctgctgacatcgccagcaaggtggatgccagcgcctgtggcatggagcggctgctggacatctgtgccgccatgggcctgctggagaagacagagcagggctacagcaacacagaaacagccaacgtgtacctggccagtgatggagagtacagcctgcacggcttcatcatgcacaacaatgacctgacctggaacctcttcacctacctggagtttgccatccgggagggcaccaaccagcaccaccgggccctgggcaagaaggcagaagatctcttccaggatgcctactaccagagccctgagacccggctgcgcttcatgagggccatgcacggcatgaccaagctgacagcctgccaggtggccacagccttcaacctgagccgcttcagcagcgcctgtgatgtgggcggctgcaccggggccctggcccgggagctggcccgggagtaccccaggatgcaggtgacagtgtttgacctgcctgacatcatcgagctggccgcccacttccagcccccaggcccccaggccgtgcagatccactttgctgctggggacttcttccgggaccccctgcccagcgctgagctgtatgtgctgtgccgcatcctgcatgactggccagatgacaaggtgcacaagctgctgagccgggtggccgagagctgcaagccaggggccggcctgctgctggtggagaccctgctggatgaggagaagagggtggcccagagggccctgatgcagagcctgaacatgctggtgcagacagagggcaaggagaggagcctgggggagtaccagtgcctgctggagctgcacggcttccaccaggtgcaggtggtgcacctgggcggcgtgctggatgccatcctggccaccaaggtggccccctag

SEQ ID NO: 20197 - DNA, 2541 bp, synthetic construct; identical to SEQ ID NO: 18854
  source 1..2541: mol_type = other DNA; note = Synthetic coding sequence

SEQ ID NO: 20198 - DNA, 1818 bp, synthetic construct
  source 1..1818: mol_type = other DNA; note = Synthetic coding sequence
atggtgctgtgccctgtgattggcaagctgctgcacaagagggtggtgctggccagcgccagcccccggcggcaggagatcctgagcaatgccggcctgcgctttgaggtggtgcccagcaagttcaaggagaagctggacaaggccagctttgccaccccctacggctacgccatggagacagccaagcagaaggccctggaggtggccaacagactctaccagacagtgggcggcctcatcctggagaagcctgtggacaagcaggatgcctacaggatgctgagccggctgagcggccgggagcacagcgtcttcaccggggtggccatcgtgcactgcagcagcaaggaccaccagctggacaccagggtgtctgagttctatgaggagaccaaggtgaagttcagcgagctgtctgaggagctgctgtgggagtatgtgcacagcggggagcccatggacaaggccggcggctacggcatccaggccctgggcggcatgctggtggagagcgtgcacggggacttcctgaatgtggtgggcttccccctgaaccacttctgcaagcagctggtgaagctgtactacccacccaggcctgaggacctgcggcgctctgtgaagcatgacagcatcccagctgctgacacctttgaggacctgagtgatgtggagggcggcggcagcgagcccacccagagagatgctggcagcagagatgagaaggccgaggccggggaggccggccaggccacagctgaggccgagtgccacaggacccgggagaccctgccccccttccccacccggctgctggagctgattgagggcttcatgctgagcaagggcctgctgacagcctgcaagctgaaggtgtttgacctgctgaaggatgaggccccccagaaggctgctgacatcgccagcaaggtggatgccagcgcctgtggcatggagcggctgctggacatctgtgccgccatgggcctgctggagaagacagagcagggctacagcaacacagaaacagccaacgtgtacctggccagtgatggagagtacagcctgcacggcttcatcatgcacaacaatgacctgacctggaacctcttcacctacctggagtttgccatccgggagggcaccaaccagcaccaccgggccctgggcaagaaggcagaagatctcttccaggatgcctactaccagagccctgagacccggctgcgcttcatgagggccatgcacggcatgaccaagctgacagcctgccaggtggccacagccttcaacctgagccgcttcagcagcgcctgtgatgtgggcggctgcaccggggccctggcccgggagctggcccgggagtaccccaggatgcaggtgacagtgtttgacctgcctgacatcatcgagctggccgcccacttccagcccccaggcccccaggccgtgcagatccactttgctgctggggacttcttccgggaccccctgcccagcgctgagctgtatgtgctgtgccgcatcctgcatgactggccagatgacaaggtgcacaagctgctgagccgggtggccgagagctgcaagccaggggccggcctgctgctggtggagaccctgctggatgaggagaagagggtggcccagagggccctgatgcagagcctgaacatgctggtgcagacagagggcaaggagaggagcctgggggagtaccagtgcctgctggagctgcacggcttccaccaggtgcaggtggtgcacctgggcggcgtgctggatgccatcctggccaccaaggtggccccctag

SEQ ID NO: 20199 - DNA, 696 bp, synthetic construct
  source 1..696: mol_type = other DNA; note = Synthetic coding sequence
atgacagtgggcaagagcagcaagatgctgcagcacatcgactacaggatgcgctgcatcctgcaggacggccgcatcttcatcggcaccttcaaggcctttgacaagcacatgaacctgatcctgtgtgactgtgatgagttcaggaagatcaagcccaagaacagcaagcaggccgagcgggaggagaagagggtgctgggcctggtgctgctgcggggggagaacctggtgtccatgacagtggagggccccccacccaaggacaccggcatcgcccgggtgcccctggccggggctgctgggggccctggcatcggccgggccgccggccggggcatcccagctggggtgcccatgccccaggccccagctggcctggccggccctgtgcggggcgtgggcggccccagccagcaggtgatgaccccccagggccggggcaccgtggccgctgctgctgctgctgccacagccagcattgctggggcccccacccagtacccacctggccggggcggccccccaccacccatgggccgcggggcccctcctcctggcatgatgggccccccacctggcatgaggcctcccatgggcccccccatgggcatccccccaggccggggcacccccatgggcatgcctcctcctggcatgaggcctcctcctcctggcatgaggggcctgctgtag

SEQ ID NO: 20200 - DNA, 855 bp, synthetic construct
  source 1..855: mol_type = other DNA; note = Synthetic coding sequence
atgtggaggggcctggccctggcccgggccatcggctgtgccgcccggggccggggccagtgggccgtgcgggctgctgactgtgcccagagcggccgccaccctggccctgctgtggtgtgtggcagaagactcatctctgtgctggagcagatccgccactttgtgatgatgcctgagatcaacaccaaccacctggacaagcagcaggtgcagctgctggccgagatgtgcatcctgattgatgaaaatgacaacaagatcggggctgagaccaagaagaactgccacctgaatgaaaacatcgagaagggcctgctgcaccgggccttcagcgtcttcctgttcaacacagagaacaagctgctgctgcagcagaggagtgatgccaagatcaccttccctggctgcttcaccaacacctgctgcagccaccccctgagcaacccagctgagctggaggagagtgatgccctgggcgtgcggcgggccgcccagaggcggctgaaggccgagctgggcatccccctggaggaggtgcccccagaggagatcaactacctgacccgcatccactacaaggcccagagtgatggcatctggggcgagcacgagattgactacatcctgctggtgaggaagaatgtgaccctgaacccagaccccaatgagatcaagagctactgctacgtgtccaaggaggagctgaaggagctgctgaagaaggccgccagcggggagatcaagatcaccccctggttcaagatcatcgccgccaccttcctgttcaagtggtgggacaacctgaaccacctgaaccagtttgtggaccacgagaagatctacaggatgtag

SEQ ID NO: 20201 - DNA, 180 bp, synthetic construct; identical to SEQ ID NO: 18361
  source 1..180: mol_type = other DNA; note = Synthetic coding sequence

SEQ ID NO: 20202 - DNA, 3039 bp, synthetic construct
  source 1..3039: mol_type = other DNA; note = Synthetic coding sequence
atggaggagtatgagaagttctgtgagaagagcctggcccgcatccaggaggccagcctgagcacagagagcttcctgcctgcccagagcgagagcatcagcctcatccgcttccatggagtggccatcctgagccccctgctgaacatcgagaagaggaaggagatgcagcaggagaagcagaaggccctggatgtggaggccaggaagcaggtgaacaggaagaaggccctgctgaccagggtgcaggagatcctggacaacgtgcaggtgaggaaggccccaaatgccagtgactttgaccagtgggagatggagaccgtgtacagcaacagcgaggtgaggaacctgaatgtgcctgccaccttccccaacagcttccccagccacacagagcacagcacagctgccaagctggacaagattgctggcatcctgcccctggacaatgaagaccagtgcaagacagatggcatcgacctggcccgggacagcgagggcttcaacagccccaagcagtgtgacagcagcaacatcagccacgtggagaatgaggccttccccaagaccagcagcgccaccccccaggagaccctcatcagtgatggccccttctctgtgaatgagcagcaggacctgcccctgctggccgaggtgatcccagacccctacgtgatgagcctgcagaacctgatgaagaagagcaaggagtacatcgagcgggagcagagcagaagaagcctgcggggcagcatcaacagaattgtgaatgaaagccacctggacaaggagcatgatgctgtggaggtggccgactgtgtgaaggagaagggccagctgaccgggaagcactgtgtgtctgtcatcccagacaagcccagcctgaacaagagcaatgtgctgctgcagggcgccagcacccaggccagctccatgtccatgcctgtgctggccagcttcagcaaggtggacatccccatcagaacaggccaccccaccgtgctggagagcaacagcgacttcaaggtgatccccacctttgtgacagagaacaacgtcatcaagagcctgaccggcagctatgccaagctgcccagccctgagcccagcatgagccccaagatgcacagaagaagaagcaggaccagcagcgcctgccacatcctgatcaacaaccccatcaatgcctgtgagctgagccccaagggcaaggagcaggccatggacctgatcatccaggacacagatgagaacaccaacgtgcctgagatcatgcccaagctgcccacagacctggccggcgtgtgcagcagcaaggtgtatgtgggcaagaacaccagcgaggtgaaggaggatgtggtgctgggcaagagcaaccaggtgtgccagagcagcggcaaccacctggagaacaaggtgacccacggcctggtgacagtggagggccagctgaccagtgatgagcggggggcccacatcatgaacagcacctgtgccgccatgcccaagctgcacgagccctatgccagcagccagtgcatcgccagccccaactttggaacagtgtctggcctgaagccagcctccatgctggagaagaactgcagcctgcagacagagctgaacaagagctatgatgtgaagaaccccagccccctgctgatgcagaaccagaacacccggcagcagatggacacccccatggtgtcctgtggaaatgagcagttcctggacaacagctttgagaaggtgaagaggcggctggacctggacattgatggcctgcagaaggagaactgcccctacgtgatcaccagcggcatcacagagcaggagcggcagcacctgcctgagaagcgctaccccaagggcagcggctttgtgaacaagaacaagatgctgggcaccagcagcaaggagagcgaggagctgctgaagagcaagatgctggcctttgaggagatgaggaagaggctggaggagcagcacgcccagcagctgagcctgctgattgctgagcaggagcgggagcaggagcggctgcagaaggagattgaggagcaggagaagatgctgaaggagaagaaggccatgacagctgaggccagcgagctggacatcaacaatgctgtggagctggagtggaggaagatcagtgacagcagcctgctggagaccatgctgagccaggccgacagcctgcacaccagcaacagcaacagcagcggcttcaccaacagcgccatgcagtacagctttgtgtctgccaatgaggcccccttctacctgtggggcagcagcaccagcggcctgaccaagctgtctgtgacccggcccttcggccgggccaagacccgctggagccaggtgttcagcctggagatccaggccaagttcaacaagatcacagctgtggccaagggcttcctgacccggcggctgatgcagacagacaagctgaagcagctgcggcagacagtgaaggacaccatggagttcatccgctccttccagagcgaggcccccctgaagaggggcatcgtgtctgcccaggatgccagcctgcaggagcgggtgctggcccagctgcgggccgccctgtatggcatccatgacatcttctttgtgatggatgctgctgagaggatgagcatcctgcaccacgaccgggaggtgaggaaggagaagatgctgcggcagatggacaagatgaagagcccccgggtggccctgtctgctgccacccagaagagcctggacaggaagaagtacatgaaggctgctgagatgggcatgcccaacaagaagttcctggtgaagcagaaccccagcgagaccagggtgctgcagcccaaccagggccagaatgcccctgtgcaccggctgctgagccggcagggcacccccaagacctctgtgaagggcgtggtgcagaaccggcagaagcccagccagagccgggtgcccaacagagtgcctgtgtctggagtgtatgccggcaagatccagaggaagaggcccaacgtggccaccatctag

SEQ ID NO: 20203 - DNA, 267 bp, synthetic construct
  source 1..267: mol_type = other DNA; note = Synthetic coding sequence
atggccagcgccagcgcccggggcaaccaggacaaggatgcccacttccccccacccagcaagcagagcctgctcttctgccccaagagcaagctgcacatccacagagctgagatcagcaagatcatgagggagtgccaggaggagagcttctggaagagggccctgcccttcagcctggtgtccatgctggtgacccagggcctggtgtaccagggctacctggccgccaacagcagatttggcagcctgcccaaggtggcctag

SEQ ID NO: 20204 - DNA, 738 bp, synthetic construct; identical to SEQ ID NO: 18499
  source 1..738: mol_type = other DNA; note = Synthetic coding sequence

SEQ ID NO: 20205 - DNA, 1551 bp, synthetic construct
  source 1..1551: mol_type = other DNA; note = Synthetic coding sequence
atgagctacccagcagatgattatgagagcgaggccgcctatgacccctatgcctaccccagcgactatgacatgcacactggagaccccaagcaggacctggcctatgaaaggcagtatgagcagcagacctaccaggtgattcctgaggtgatcaagaacttcatccagtacttccacaagacagtgtctgacctgattgaccagaaggtgtatgagctgcaggccagccgggtgtccagtgatgtgattgaccagaaggtgtatgagatccaggacatctatgagaacagctggaccaagctgacagagcgcttcttcaagaacaccccctggccagaggccgaggccatcgccccccaggtgggcaatgatgctgtgttcctgatcctgtacaaggagctgtactaccgccacatctatgccaaggtgtccttccagagcttcagccagtaccgctgcaagacagccaagaagtctgaggaggagattgacttcctgcggagcaaccccaagatctggaatgtgcacagcgtgctgaatgtgctgcacagcctggtggacaagagcaacatcaaccggcagctggaggtgtacaccagcggcggggaccctgagagcgtggccggggagtatggccgccacagcctgtacaagatgctgggctacttcagcctggtgggcctgctgcggctgcacagcctgctgggggactactaccaggccatcaaggtgctggagaacatcgagctgaacaagaagtccatgtacagccgggtgcctgagtgccaggtgaccacctactactacgtgggctttgcctacctgatgatgaggcgctaccaggatgccatccgggtgtttgccaacatcctgctgtacatccagaggaccaagtccatgttccagaggaccacctacaagtatgagatgatcaacaagcagaatgagcagatgcacgccctgctggccatcgccctgaccatgtaccccatgagaattgatgagagcatccacctgcagctgcgggagaagtacggggacaagatgctgaggatgcagaagggggacccccaggtgtatgaggagctgttctcctacagctgccccaagttcctgagccctgtggtgcccaactatgacaacgtgcaccccaactaccacaaggagcccttcctgcagcagctgaaggtgttcagtgatgaggtgcagcagcaggcccagctgagcaccatccgctccttcctgaagctgtacaccaccatgcctgtggccaagctggccggcttcctggacctgacagagcaggagttccgcatccagctgctggtgttcaagcacaagatgaagaacctggtgtggaccagcggcatcagcgccctggatggagagttccagagcgccagcgaggtggacttctacatcgacaaggacatgatccacatcgctgacaccaaggtggccaggagatatggagacttcttcatccggcagatccacaagtttgaggagctgaacagaaccctgaagaagatgggccagaggccctag

SEQ ID NO: 20206 - DNA, 2502 bp, synthetic construct
  source 1..2502: mol_type = other DNA; note = Synthetic coding sequence
ctgagcagaagagtgccctgtgtgagaagaggctgccggccccccctgccccccctgcccggcagccagagccgggcctggagccgggaccgggaggcccccctggaccccggccggcctgcccagagcggcagaagacccaccagccgctctgtgagccacgcctgctcctggaatggaggcagcctggaccccctggagggcaccccagccctgctgcggtctgctgagcggctgatgaggaaggtgaagaagctgcggctggacaaggaaaatacaggctcctggaggagcttcagcctgaacagcgagggcgctgagcgcatcaccagctatgacttccacagcgagagcggcctcttcctgttccaggccagcaacagcctcttccactgcagagatggcggcaagaatggcttcatggtgagccccatgaagcccctggagatcaagacccagtgcagcggccccaggatggaccccaagatctgcccagctgaccctgccttcttctccttcatcaacaacagcgacctgtgggtggccaacatcgagaccggggaggagcggcggctgaccttctgccaccagggcctgagcaatgtgctggatgaccccaagtctgctggggtggccaccttcgtcatccaggaggagtttgaccgcttcaccggctactggtggtgccccacagcctcctgggagggcagcgagggcctgaagaccctgcgcatcctgtatgaggaggtggatgaaagtgaggtggaggtgattcatgtgcccagccctgccctggaggagaggaagacagacagctaccgctaccccaggacaggcagcaagaaccccaagatcgccctgaagctggccgagttccagacagacagccagggcaagatcgtgtccacccaggagaaggagctggtgcagcccttcagcagcctcttccccaaggtggagtacatcgcccgggccggctggaccagagatggcaagtatgcctgggccatgttcctggaccggccccagcagtggctgcagctggtgctgctgcccccagccctcttcatccccagcacagaaaatgaggagcagaggctggccagcgcccgggctgtgcccagaaatgtgcagccctacgtggtgtatgaggaggtgaccaacgtgtggatcaacgtgcatgacatcttctaccccttcccccagagcgagggggaggatgagctgtgcttcctgcgggccaatgaatgcaagacaggcttctgccacctgtacaaggtgacagctgtgctgaagagccagggctatgactggagcgagcccttcagccctggagaagatgagttcaagtgccccatcaaggaggagatcgccctgaccagcggggagtgggaggtgctggcccggcacggcagcaagatctgggtgaatgaggagaccaagctggtgtacttccagggcaccaaggacacccccctggagcaccacctgtatgtggtgtcctatgaggccgccggggagatcgtgcggctgaccaccccaggcttcagccacagctgcagcatgagccagaactttgacatgtttgtgagccactacagctctgtgtccaccccaccctgtgtgcacgtgtacaagctgagcggcccagatgatgaccccctgcacaagcagccccgcttctgggcctccatgatggaggccgccagctgccccccagactatgtgcccccagagatcttccacttccacaccaggagtgatgtgcggctgtatggcatgatctacaagccccacgccctgcagcccgggaagaagcaccccaccgtgctgtttgtgtatggaggcccccaggtgcagctggtgaacaacagcttcaagggcatcaagtacctgcggctgaacaccctggccagcctgggctatgctgtggtggtgattgatggccggggcagctgccagaggggcctgcgctttgaaggagccctgaagaaccagatgggccaggtggagattgaggaccaggtggagggcctgcagtttgtggccgagaagtatggcttcatcgacctgagccgggtggccatccacggctggagctatggaggcttcctgagcctgatgggcctcatccacaagccccaggtgttcaaggtggccatcgccggggcccctgtgacagtgtggatggcctatgacaccggctacacagagcgctacatggatgtgcctgagaacaaccagcacggctatgaagctggctctgtggccctgcacgtggagaagctgcccaatgagcccaaccggctgctgatcctgcacggcttcctggatgaaaatgtgcacttcttccacaccaacttcctggtgtcccagctgatccgggccggcaagccctaccagctgcagatctacccaaatgaaagacacagcatccgctgcccagagagcggggagcactatgaggtgaccctgctgcacttcctgcaggagtacctgtag

SEQ ID NO: 20207 - DNA, 5073 bp, synthetic construct
  source 1..5073: mol_type = other DNA; note = Synthetic coding sequence
atggactgcctgctggagctgagcgccacagacaccaagattgaggagagcagcagccagagctttgtggccagcgagaaccaggtgggcgctgctgagagcaagatcatggagaagaggcctgaggaggagagcgaggacagcaagatggacagcttcctggacatgcagctgacagaggacctggacagcctcatccagaatgcctttgagaagctgaacagcagcccagatgaccaggtgtacagcttcctgcccagccaggatgtgaacagcttcaatgacagcagcgagttcatcaacccagacagcagcaacatgacccccatcttcagcacccagaacatgaacctgaatggagagaacctggagaacagcggcagcaccctgagcctgaaccccctgcccagccacagcgtgctgaatgaaagcaagtgcttcatcaaggacaacaccctggccctggagagcaactacccagaggacagcctgctgagcagcagcctgaatgtggccagtgacagcattgctggctgcagcagcctgaaccagaagcagaaggagctgctggagagtgaatgtgtggaggcccagttcagcgaggcccctgtggacctggatgccagcgagccccaggcctgcctgaacctgcccggcctggacctgcccggcactggaggagaccagaagagcaccagggtgtctgatgtgttcctgcccagcgagggcttcaacttcaagccccacaagcaccctgagctgcccaccaagggcaaggatgtgtcctactgccctgtgctggcccccctgcccctgctgctgcccccacctcctcctccacccatgtggaaccccatgatcccagcctttgacctcttccagggcaaccacggctttgtggcccctgtggtgaccacagctgcccactggaggtctgtgaactacaccttcccccccagcgtcatcagccacaccagccccaccaaggtgtggaggaacaaggatggcaccagcgcctaccaggtgcaggagacccctgtgtcccaggtggtgaggaagaagaccagctatgtgggcctggtgctggtgctgctgcggggcctgcccggcagcggcaagagcttcctggcccggaccctgcaggaggacaaccccagcggggtcatcctgagcacagatgactacttctacatcaatggccagtaccagtttgatgtgaagtacctgggggaggcccacgagtggaaccagaacagagccaaggaggcctttgagaagaagatcagccccatcatcatcgacaacaccaacctgcaggcctgggagatgaagccctacgtggccctgagccagaagcacaagtacaaggtgctcttccgggagccagacacctggtggaagttcaagcccaaggagctggcccggaggaacatccatggagtgtccaaggagaagatcaccaggatgctggagcactaccagagatttgtgtctgtgcccatcatcatgagcagctctgtgcctgagaagattgagcgcatcgagctgtgtgcctacagctgtgaggacaggagcaccagccccagagatgatgaggacatcatcagcgagaaggaggagaacatcctgagcctgagcctgaagcacctggagttcacagaggagaagaacctggatgtgaccaaggagaccatgctgcctgaaaatgtggcctacctgagcaatgctgacctgaacaagaggaggaaggagatcagtgacatgaaccccagcatccagagcgccctgatcctggagaccccccacatgtacttcagtgacagcgagagcaagctgcaggccacagacaagtcagaaaatgagcagatcgagatggtggccgtgaagggctacagcaagacagacacagacagctccatggagcgggtgagccccagcacctgctgcagcgagaacaaccaggaggactgtgacctggccaacagcggccccctgcagaatgagaagagcagccctggagaaattgtggaggagcgggccaccgtgaccaagaaggccttcggcaagcagaagagcaagagcaccctggagaagttccccaggcatgagctgagcaactttgtgggggactggcctgtggacaagaccatcggccagaggaccaagaggaacaggaagacagagaagaccagctctgtgcagagcgacaagaagtacaactacccccagagccacaagctggtgaacagcgtgtctgtgaacacagactgtgtgcagcagaggggcagcccccatgaatctgtggaggatggcaggaagagccagtgtgatgatgccagcgagcccctgaacagctacaagtatgatgcctacaagaacatcgacaagaacagcttcaacatcatgggagactggcccagcagtgacagcctggcccagcgggagcacaggagcaggatgcccaagacaggcctgtctgagcccaacctggagatcggcaccaatgacaagatgaatgagatcagcctgagcacagcccacgaggcctgctggggcaccagcagccagaagctgaagaccctgggcagcagcaacctgggcagcagcgagatgctgctgtctgagatgacctgtgagagccagacctgcctgagcaagaagagccacggccagcacaccagcctgcccctgaccttcaccaacagcgcccccaccgtgtctggagtggtggagccccagaccctggccgagtgccaggagcagatgcccaagagggaccccgggaaggaggtgggcatgtgcacccagacagagccccaggactttgccctgctgtggaagattgagaagaacaagatcagcatcagtgacagcatcaaggtgctgaccggccgcctggatggcttcaagcccaaggtgttcaacatcaacaccaagagtgatgtgcaggaggccatcccctacagagtgatgtatgacaagagcacctttgtggaggagagcgagctgaccagcgcagatgaaagtgagaacctgaacatcctgtgcaagctgtttggcagcttcagcctggaggccctgaaggacctgtatgagcgctgcaacaaggacatcatctgggccaccagcctgctgctggacagcgagaccaagctgtgtgaggacacagaatttgagaacttccagaagagctgtgatggcagccagatcggccccttcagcctgggcctgaacctgaaggagatcatcagccagaggggcaccctggagaacagcaacagccctgtgcctgagttcagccatggaattggcatcagcaatgctgacagccagagcacctgtgatgctgagcggggcaacagcgagcaggccgagatgagagctgtgaccccagagaaccacgagagcatgaccagcatcttccccagcgctgctgtgggcctgaagaacaacaatgacatcctgcccaacagccaggaggagctgctgtacagcagcaagcagagcttccctggcatcctgaaggccaccacccccaaggacatgtctgaaacagagaagaacctggtggtgacagagaccggggacaacatccacagccccagccacttcagtgacatcttcaactttgtgagcagcaccagcaacctggagctgaatgaggagatctacttcacagacagcctggagatcaagagaaatgaaaacttccccaaggactatgtgaagttcagtgatgaggaggagttcatgaatgaagatgagaaggagatgaaggagatcctgatggccggcagcagcctgtctgctggggtgtctggagaggacaagacagagatcctgaaccccaccccagccatggccaagagcctgaccatcgactgcctggagctggccctgcccccagagctggccttccagctgaatgagctgtttggacctgtgggcattgattctggcagcctgactgtggaggactgtgtggtgcacatcgacctgaacctggccaaggtgatccacgagaagtggaaggagagcgtgatggagcggcagaggcaggaggaggtgtcctgtgggaagttcatgcaggaccccagcctggtgggccacacaggcctggacaaccctgagcagaagagcagccagaggacaggcaagaagctgctgaagaccctgacagccagcgagatgctgcccctgctggaccactggaacacccagaccaagaaggtgtccctgcgggagatcatgtctgaggagatcgccctgcaggagaagcacaacctgaagcgggagaccctgatgtttgagaaggactgtgccaccaagctgaaggagaagcagctgttcaagatcttccctgccatcaaccagaacttcctggtggacatcttcaaggaccacaactacagcctggagcacacagtgcagttcctgaactgtgtgctggagggggaccctgtgaagacagtggtggcccaggagtttgtgcaccagaatgaaaatgtgaccagccacacaggccagaagagcaaggagaagaagcccaagaagctgaaggagacagaggagaccccatctgagctgtccttccaggactttgagtacccagactatgatgactacagagctgaggccttcctgcaccagcagaagaggatggagtgctacagcaaggccaaggaggcctaccgcatcggcaagaagaatgtggccaccttctacgcccagcagggcaccctgcacgagcagaagatgaaggaggccaaccacctggccgccatcgagatctttgagaaggtgaatgccagcctgctgccccagaatgtgctggacctgcacggcctgcacgtggatgaggccctggagcacctgatgagggtgctggagaagaagacagaggagttcaagcagaatggaggcaagccctacctgagcgtcatcaccggccggggcaaccacagccagggcggcgtggcccgcatcaagccagctgtgatcaagtacctgatcagccacagcttccgcttcagcgagatcaagccaggctgcctgaaggtgatgctgaagtag

SEQ ID NO: 20208 - DNA, 477 bp, synthetic construct
  source 1..477: mol_type = other DNA; note = Synthetic coding sequence
atgggcagcggcagcagccgcagcagcaggaccctgcggaggagaagaagccctgagagcctgcctgctggccctggagctgctgccctggagggcggcacccggcggcgggtgcctgtggccgctgctgaggtgcctggagctgctgctgaggaggcccctggccgggaccccagccctgtggcccccccagatggaagagatgagaccctgcggctgctggatgagctgctggccgagagcgctgcctggggccccccagagcccgccccccggcggcctgcccggctgcggcccacagctgtggccggcagcgctgtgtgtgccgagcagagcacagagggccaccctggcagcggaaatgtgtctgaggcccctggcagcggcaggaagaagccagagaggcctgctgccatctcctatgaccacagcgaggagggcctgatggccagcattgaaagagagtactgcaggtag

SEQ ID NO: 20209 - DNA, 738 bp, synthetic construct; identical to SEQ ID NO: 18315
  source 1..738: mol_type = other DNA; note = Synthetic coding sequence

SEQ ID NO: 20210 - DNA, 1014 bp, synthetic construct
  source 1..1014: mol_type = other DNA; note = Synthetic coding sequence
atggagcagccctggcccccacctggcccctggagcctgcccagggctgagggggaggccgaggaggagagtgactttgatgtgttccccagcagcccccgctgcccccagctgcccggcggcggggcccagatgtacagccacggcatcgagctggcctgccagaagcagaaggagtttgtgaagagctctgtggcctgcaagtggaacctggccgaggcccagcagaagctgggcagcctggccctgcacaacagcgagagcctggaccaggagcacgccaaggcccagacagctgtgtctgagctgcggcagcgggaggaggagtggaggcagaaggaggaggccctggtgcagcgggagaagatgtgcctgtggagcacagatgccatcagcaaggatgtgttcaacaagagcttcatcaaccaggacaagaggaaggacacagaagatgaggacaagtctgagagcttcatgcagaagtatgagcagaagatccgccacttcggcatgctgagccgctgggatgacagccagcgcttcctgagtgaccacccctacctggtgtgtgaggagacagccaagtacctgatcctgtggtgcttccacctggaggccgagaagaagggggccctgatggagcagatcgcccaccaggccgtggtgatgcagttcatcatggagatggccaagaactgcaatgtggacccccggggctgcttccgcctcttcttccagaaggccaaggccgaggaggagggctactttgaggccttcaagaatgagctggaggccttcaagagccgggtgcggctgtacagccagagccagagcttccagcccatgacagtgcagaaccacgtgccccacagcggcgtgggcagcatcggcctgctggagagcctgccccagaacccagactacctgcagtacagcatcagcacagccctgtgcagcctgaacagcgtggtgcacaaggaggatgatgagcccaagatgatggacacagtgtag

SEQ ID NO: 20211 - DNA, 927 bp, synthetic construct
  source 1..927: mol_type = other DNA; note = Synthetic coding sequence
atggagcagccctggcccccacctggcccctggagcctgcccagggctgagggggaggccgaggaggagagtgactttgatgtgttccccagcagcccccgctgcccccagctgcccggcggcggggcccagatgtacagccacggcatcgagctggcctgccagaagcagaaggagtttgtgaagagctctgtggcctgcaagtggaacctggccgaggcccagcagaagctgggcagcctggccctgcacaacagcgagagcctggaccaggagcacgccaaggcccagacagctgtgtctgagctgcggcagcgggaggaggagtggaggcagaaggaggaggccctggtgcagcgggagaagatgtgcctgtggagcacagatgccatcagcaaggatgtgttcaacaagagcttcatcaaccaggacaagaggaaggacacagaagatgaggacaagtctgagagcttcatgcagaagtatgagcagaagatccgccacttcggcatgctgagccgctgggatgacagccagcgcttcctgagtgaccacccctacctggtgtgtgaggagacagccaagtacctgatcctgtggtgcttccacctggaggccgagaagaagggggccctgatggagcagatcgcccaccaggccgtggtgatgcagttcatcatggagatggccaagaactgcaatgtggacccccggggctgcttccgcctcttcttccagaaggccaaggccgaggaggagggctactttgaggccttcaagaatgagctggaggccttcaagagccgggtgcggctgtacagccagagccagagcttccagcccatgacagtgcagaaccacgtgccccacagcggcgtgggcagcatcggcctgctggagagcctgccccaggccccccgcttctag

SEQ ID NO: 20212 - DNA, 4227 bp, synthetic construct; identical to SEQ ID NO: 19164
  source 1..4227: mol_type = other DNA; note = Synthetic coding sequence

SEQ ID NO: 20213 - DNA, 528 bp, synthetic construct
  source 1..528: mol_type = other DNA; note = Synthetic coding sequence
atgatcctgaatgtgctggagtatggcagccagcaggtggccgacctgaccctgaacctggatgactacattgatgctgagcacctgggggacttccacaggacctacaagaacagcgaggagctgcggagccgcatcgtgtctggcatcatcacccccatccacgagcagtgggagaaggccaacgtgagcagcccccaccgggagttccccccagccacagcccgggaggtggaccccctgcgcatccccccccaccacccccacaccagccggcagcccccctggtgtgaccccctgggcccctttgtggtgggcggggaggacctggaccccttcggcccccggcggggcggcatgattgtggaccccctgcggagcggcttcccccgggccctgattgaccccagcagcggcctgcccaaccggctgcccccaggagctgtgcccccaggggccaggtttgaccccttcggccccatcggcaccagccccccaggccccaggccagaccggcggggccagtag

SEQ ID NO: 20214 - DNA, 552 bp, synthetic construct
  source 1..552: mol_type = other DNA; note = Synthetic coding sequence
atggccggcctggaggtgctgtttgccagcgctgccccagccatcacctgccggcaggatgccctggtgtgcttcctgcactgggaggtggtgacccacggctacttcggcctgggcgtgggggaccagcccggccccaatgacaagaagtctgagctgctgcctgctggctggaacaacaacaaggacctgtatgtgctgcgctatgagtacaaggatggcagcaggaagctgctggtgaaggccatcaccgtggagagctccatgatcctgaatgtgctggagtatggcagccagcaggtggccgacctgaccctgaacctggatgactacattgatgctgagcacctgggggacttccacaggacctacaagaacagcgaggagctgcggagccgcatcgtgtctggcatcatcacccccatccacgagcagtgggagaaggccaacgtgagcagcccccaccgggagttccccccagccacagcccgggaggtggaccccctgcgcatccccccccaccacccccacaccagccggcagcccccatag

SEQ ID NO: 20215 - DNA, 888 bp, synthetic construct; identical to SEQ ID NO: 18344
  source 1..888: mol_type = other DNA; note = Synthetic coding sequence

SEQ ID NO: 20216 - DNA, 888 bp, synthetic construct; identical to SEQ ID NO: 18344
  source 1..888: mol_type = other DNA; note = Synthetic coding sequence

SEQ ID NO: 20217 - DNA, 414 bp, synthetic construct
  source 1..414: mol_type = other DNA; note = Synthetic coding sequence
atgggcctgcgggccggcggcaccctgggccgggccggggccggccgcggggcccctgagggccctggccccagcggcggggcccagggcggcagcatccacagcggcagaattgctgctgtgcacaacgtgcccctgtctgtgctgatccggcccctgcccagcgtgctggaccctgccaaggtgcagagcctggtggacaccatcagagaagatcctgattctgtgccccccattgatgtgctgtggatcaagggggcccagggcggggactacttctacagctttggaggctgccacagatatgctgcctaccagcagctgcagcgggagaccatcccagccaagctggtgcagagcaccctgagtgacctgcgggtgtacctgggcgccagcaccccagacctgcagtag

SEQ ID NO: 20218 - DNA, 1731 bp, synthetic construct
  source 1..1731: mol_type = other DNA; note = Synthetic coding sequence
atgaagtgccactatgaggccctgggcgtgagaagagatgccagcgaggaggagctgaagaaggcctacaggaagctggccctgaagtggcacccagacaagaacctggacaatgctgctgaggccgctgagcagttcaagctgatccaggccgcctatgatgtgctgagtgacccccaggagcgggcctggtatgacaaccaccgggaggccctgctgaagggcggctttgatggagagtaccaggatgacagcctggacctgctgcgctacttcaccgtgacctgctacagcggctatggagatgatgagaagggcttctacacagtgtacagaaatgtgtttgagatgattgccaaggaggagctggagagcgtgctggaggaggaggtggatgacttccccacctttggagacagccagagcgactatgacacagtggtgcaccccttctacgcctactggcagagcttctgcacccagaagaactttgcctggaaggaggagtatgacacccggcaggccagcaaccgctgggagaagagggccatggagaaggagaacaagaagatccgggacaaggccaggaaggagaagaatgagctggtgcggcagctggtggccttcatcaggaagagggacaagagggtgcaggcccacaggaagctggtggaggagcagaatgctgagaaggccaggaaggccgaggagatgaggcggcagcagaagctgaagcaggccaagctggtggagcagtaccgggagcagagctggatgaccatggccaacctggagaaggagctgcaggagatggaggcccgctatgagaaggagtttggagatggcagtgatgaaaatgagatggaggagcacgagctgaaggatgaagaagatggcaaggacagtgatgaagcagaagatgctgagctgtatgatgacctgtactgcccagcctgtgacaagagcttcaagacagagaaggccatgaagaaccacgagaagagcaagaagcaccgggagatggtggccctgctgaagcagcagctggaggaggaggaggagaacttcagccggccccagattgatgagaaccccctggatgacaacagcgaggaggagatggaggatgcccccaagcagaagctgagcaagaagcagaagaagaagaagcagaagccagcccaggatgtgcctgggaaggacagctacctgcctgctgcccacttccagatggcctggggcaagaagtgtgtgctgggggagaggagagatggagagagcgagcacaagtgtgccaagatgctgctggagaaccggcagaactatgatgacaacttcaacgtgaatggacctggagagggcgtgaaggtggaccctgaggacaccaacctgaaccaggacagcgccaaggagctggaggacagcccccaggagaatgtgtctgtgacagagatcatcaagccctgtgatgaccccaagtctgaggccaagtctgtgcccaagcccaagggcaagaagaccaaggacatgaagaagcctgtgcgggtgcctgctgagccccagaccatgtctgtgctgatcagctgcaccacctgccacagcgagttccccagcaggaacaagctgtttgaccacctgaaggccactggacatgcccgggcccccagcagcagcagcctgaacagcgccaccagcagccagagcaagaaggagaagaggaagaacagatag

SEQ ID NO: 20219 - DNA, 798 bp, synthetic construct
  source 1..798: mol_type = other DNA; note = Synthetic coding sequence
atgctggccctgactgtgctggagacctgtgtgaagaactgtggccaccgcttccacgtgctggtggccagccaggactttgtggagagcgtgctggtgaggaccatcctgcccaagaacaacccccccaccatcgtgcatgacaaggtgctgaacctgatccagagctgggcagatgccttccgcagcagcccagacctgactggagtggtgaccatctatgaggacctgcggaggaagggcctggagttccccatgacagacctggacatgctgagccccatccacaccccccagaggacagtgttcaacagcgagacccagagcggccaggacagcgtgggcacagacagcagccagcaggaggacagcggccagcacgccgcccccctgcctgccccacccatcctgagcggggacacccccatcgcccccaccccagagcagatcggcaagctgcggtctgagctggagatggtgtctggaaatgtgcgggtgatgtctgagatgctgacagagctggtgcccacccaggccgagcctgctgacctggagctgctgcaggagctgaacagaacctgccgggccatgcagcagagggtgctggagctgatcccccagatcgccaatgagcagctgacagaggagctgctgattgtgaatgacaacctgaacaacgtgttcctgcggcatgagcgggaccggggcctgactgtgctgccccggctggtgagcaacagctggccccaggccgtgctgcccccctggccacccaaggccctggtgctgcaggcctag

SEQ ID NO: 20220 - DNA, 6273 bp, synthetic construct
  source 1..6273: mol_type = other DNA; note = Synthetic coding sequence
atggatgaggtggagcaggaccagcacgaggcccggctgaaggagctgtttgacagctttgacaccactggaacaggcagcctgggccaggaggagctgacagacctgtgccacatgctgagcctggaggaggtggcccctgtgctgcagcagaccctgctgcaggacaacctgctgggccgggtgcactttgaccagttcaaggaggccctgatcctgatcctgagcaggaccctgagcaatgaggagcacttccaggagccagactgcagcctggaggcccagcccaagtatgtgcggggcggcaagagatatggaagaagaagcctgcctgagttccaggagagcgtggaggagttccctgaggtgaccgtcatcgagcccctggatgaggaggcccggcccagccacatcccagctggggactgcagcgagcactggaagacccagaggtctgaggagtatgaagctgagggccagctgcgcttctggaacccagatgacctgaatgccagccagagcggcagcagccccccccaggactggattgaggagaagctgcaggaggtgtgtgaggacctgggcatcaccagagatggccacctgaacaggaagaagctggtgtccatctgtgagcagtatggcctgcagaatgtggatggagagatgctggaggaggtgttccacaacctggaccctgatggcaccatgtctgtggaggacttcttctacggcctcttcaagaatggcaagagcctgacccccagcgccagcaccccctaccggcagctgaagaggcacctgtccatgcagagctttgatgagagcggccgccgcaccaccaccagcagcgccatgaccagcaccatcggcttccgggtcttcagctgcctggatgatggcatgggccacgcctctgtggagcgcatcctggacacctggcaggaggagggcatcgagaacagccaggagatcctgaaggccctggacttcagcctggatggcaacatcaacctgacagagctgaccctggccctggagaatgagctgctggtgaccaagaacagcatccaccaggccgccctggccagcttcaaggccgagatccgccacctgctggagcgggtggaccaggtggtgcgggagaaggagaagctgcggagtgacctggacaaggccgagaagctgaagagcctgatggccagcgaggtggatgaccaccacgccgccattgaaagaagaaatgagtacaacctgaggaagctggatgaggagtacaaggagagaattgctgccctgaagaatgagctgaggaaggagcgggagcagatcctgcagcaggccggcaagcagaggctggagctggagcaggagattgagaaggccaagacagaggagaactacatccgggaccggctggccctgagcctgaaggagaacagccggctggagaatgagctgctggagaatgctgagaagctggccgagtatgagaacctgaccaacaagctgcagaggaacctggagaatgtgctggccgagaagtttggagacctggaccccagcagcgctgagttcttcctgcaggaggagcggctgacccagatgagaaatgaatatgaaaggcagtgccgggtgctgcaggaccaggtggatgagctgcagagcgagctggaggagtaccgggcccagggccgggtgctgcggctgcccctgaagaacagccccagcgaggaggtggaggccaacagcggcggcatcgagcctgagcacggcctgggcagcgaggagtgcaaccccctgaacatgagcattgaagctgagctggtgattgagcagatgaaggagcagcaccaccgggacatctgctgcctgcggctggagctggaggacaaggtgcgccactatgagaagcagctggatgaaacagtggtgtcctgcaagaaggcccaggagaacatgaagcagagacatgaaaatgagacccacaccctggagaagcagatcagtgacctgaagaatgaaattgctgagctgcagggccaggccgctgtgctgaaggaggcccaccacgaggccacctgcagacatgaggaggagaagaagcagctgcaggtgaagctggaggaggagaagacccacctgcaggagaagctgcggctgcagcacgagatggagctgaaggcccggctgacccaggcccaggccagctttgagcgggagcgggagggcctgcagagcagcgcctggacagaggagaaggtgcggggcctgacccaggagctggagcagttccaccaggagcagctgaccagcctggtggagaagcacaccctggagaaggaggagctgaggaaggagctgctggagaagcaccagcgggagctgcaggagggccgggagaagatggagacagagtgcaacagaaggaccagccagatcgaggcccagttccagagcgactgccagaaggtgacagagcgctgtgagagcgccctgcagagcctggagggccgctaccggcaggagctgaaggacctgcaggagcagcagcgggaggagaagagccagtgggagtttgagaaggatgagctgacccaggagtgtgccgaggcccaggagctgctgaaggagaccctgaagcgggagaagaccaccagcctggtgctgacccaggagcgggagatgctggagaagacctacaaggagcacctgaacagcatggtggtggagcggcagcagctgctgcaggacctggaggacctgagaaatgtgtctgagacccagcagagcctgctgagtgaccagatcctggagctgaagagcagccacaagcgggagctgcgggagcgggaggaggtgctgtgccaggccggggccagcgagcagctggccagccagaggctggagcggctggagatggagcatgaccaggagcggcaggagatgatgagcaagctgctggccatggagaacatccacaaggccacctgtgaaacagctgaccgggagcgggcagagatgagcacagagatcagccggctgcagagcaagatcaaggagatgcagcaggccaccagccccctgtccatgctgcagagcggctgccaggtgattggagaggaggaggtggagggagatggagccctgagcctgctgcagcagggcgagcagctgctggaggagaatggagatgtgctgctgagcctgcagagggcccacgagcaggccgtgaaggaaaatgtgaagatggccacagagatcagccggctgcagcagaggctgcagaagctggagcccggcctggtgatgagcagctgcctggatgagcccgccacagagttcttcggcaacacagctgagcagacagagcagttcctgcagcagaacagaaccaagcaggtggagggcgtgacccggcggcacgtgctgagtgacctggaggatgatgaggtgcgggacctgggcagcacaggcaccagctctgtgcagaggcaggaggtgaagattgaggagagcgaggcctctgtggagggcttcagcgagctggagaacagcgaggagaccaggacagagagctgggagctgaagaaccagatcagccagctgcaggagcagctgatgatgctgtgtgccgactgtgaccgggccagcgagaagaagcaggacctgctgtttgatgtgtctgtgctgaagaagaagctgaagatgctggagcgcatccctgaggccagccccaagtacaagctgctgtatgaagatgtgtcccgggagaatgactgcctgcaggaggagctgaggatgatggagaccaggtatgatgaggccctggagaacaacaaggagctgacagctgaggtgttccggctgcaggatgagctgaagaagatggaggaggtgacagagaccttcctgagcctggagaagagctatgatgaggtgaagattgaaaatgaaggcctgaatgtgctggtgctgcggctgcagggcaagattgagaagctgcaggagagcgtggtgcagagatgtgactgctgcctgtgggaggccagcctggagaacctggagattgaaccagatggcaacatcctgcagctgaaccagaccctggaggagtgtgtgccccgggtgcgctctgtgcaccacgtgattgaggagtgcaagcaggagaaccagtacctggagggcaacacccagctgctggagaaggtgaaggcccatgaaattgcctggctgcacggcaccatccagacccaccaggagcggccccgggtgcagaaccaggtgatcctggaggagaacaccaccctgctgggcttccaggacaagcacttccagcaccaggccaccatcgccgagctggagctggagaagaccaagctgcaggagctgaccaggaagctgaaggagcgggtgaccatcctggtgaagcagaaggatgtgctgagccacggggagaaggaggaggagctgaaggccatgatgcatgacctgcagatcacctgcagcgagatgcagcagaaggtggagctgctgcgctatgagagcgagaagctgcagcaggagaacagcatcctgagaaatgagatcaccaccctgaatgaggaggacagcatcagcaacctgaagctgggcaccctgaatggcagccaggaggagatgtggcagaagacagagaccgtgaagcaggagaatgctgctgtgcagaagatggtggagaacctgaagaagcagatcagcgagctgaagatcaagaaccagcagctggacctggagaacacagagctgagccagaagaacagccagaaccaggagaagctgcaggagctgaaccagaggctgacagagatgctgtgccagaaggagaaggagcccggcaacagcgccctggaggagcgggagcaggagaagttcaacctgaaggaggagctggagcgctgcaaggtgcagagcagcaccctggtgagcagcctggaggccgagctgtctgaggtgaagatccagacccacatcgtgcagcaggagaaccacctgctgaaggatgagctggagaagatgaagcagctgcaccgctgcccagacctgagtgacttccagcagaagatcagctctgtgctgagctacaatgagaagctgctgaaggagaaggaggccctgtctgaggagctgaacagctgtgtggacaagctggccaagagcagcctgctggagcaccgcatcgccaccatgaagcaggagcagaagtcctgggagcaccagagcgccagcctgaagagccagctggtggccagccaggagaaggtgcagaacctggaggacacagtgcagaatgtgaacctgcagatgagcaggatgaagagtgacctgcgggtgacccagcaggagaaggaggccctgaagcaggaggtgatgagcctgcacaagcagctgcagaatgccggcggcaagtcctgggcccctgagatcgccacccaccccagcggcctgcacaaccagcagaagaggctgtcctgggacaagctggaccacctgatgaatgaggagcagcagctgctgtggcaggagaatgaaaggctgcagaccatggtgcagaacaccaaggccgagctgacccacagccgggagaaggtgcggcagctggagagcaacctgctgcccaagcaccagaagcacctgaaccccagcggcaccatgaaccccacagagcaggagaagctgagcctgaagagagaatgtgaccagttccagaaggagcagagccctgccaacaggaaggtgtcccagatgaacagcctggagcaggagctggagaccatccacctggagaatgaaggcctgaagaagaagcaggtgaagctggatgagcagctgatggagatgcagcacctgcggagcacagccacccccagccccagcccccacgcctgggacctgcagctgctgcagcagcaggcctgccccatggtgccccgggagcagttcctgcagctgcagaggcagctgctgcaggccgagcgcatcaaccagcacctgcaggaggagctggagaacagaaccagcgagaccaacaccccccagggcaaccaggagcagctggtgacagtgatggaggagaggatgattgaggtggagcagaagctgaagctggtgaagaggctgctgcaggagaaggtgaaccagctgaaggagcaggtgtccctgcccggccacctgtgcagccccaccagccacagcagcttcaacagcagcttcaccagcctgtactgccactag

SEQ ID NO: 20221 - DNA, 4134 bp, synthetic construct
  source 1..4134: mol_type = other DNA; note = Synthetic coding sequence
atggatgaggtggagcaggaccagcacgaggcccggctgaaggagctgtttgacagctttgacaccactggaacaggcagcctgggccaggaggagctgacagacctgtgccacatgctgagcctggaggaggtggcccctgtgctgcagcagaccctgctgcaggacaacctgctgggccgggtgcactttgaccagttcaaggaggccctgatcctgatcctgagcaggaccctgagcaatgaggagcacttccaggagccagactgcagcctggaggcccagcccaagtatgtgcggggcggcaagagatatggaagaagaagcctgcctgagttccaggagagcgtggaggagttccctgaggtgaccgtcatcgagcccctggatgaggaggcccggcccagccacatcccagctggggactgcagcgagcactggaagacccagaggtctgaggagtatgaagctgagggccagctgcgcttctggaacccagatgacctgaatgccagccagagcggcagcagccccccccaggactggattgaggagaagctgcaggaggtgtgtgaggacctgggcatcaccagagatggccacctgaacaggaagaagctggtgtccatctgtgagcagtatggcctgcagaatgtggatggagagatgctggaggaggtgttccacaacctggaccctgatggcaccatgtctgtggaggacttcttctacggcctcttcaagaatggcaagagcctgacccccagcgccagcaccccctaccggcagctgaagaggcacctgtccatgcagagctttgatgagagcggccgccgcaccaccaccagcagcgccatgaccagcaccatcggcttccgggtcttcagctgcctggatgatggcatgggccacgcctctgtggagcgcatcctggacacctggcaggaggagggcatcgagaacagccaggagatcctgaaggccctggacttcagcctggatggcaacatcaacctgacagagctgaccctggccctggagaatgagctgctggtgaccaagaacagcatccaccaggccgccctggccagcttcaaggccgagatccgccacctgctggagcgggtggaccaggtggtgcgggagaaggagaagctgcggagtgacctggacaaggccgagaagctgaagagcctgatggccagcgaggtggatgaccaccacgccgccattgaaagaagaaatgagtacaacctgaggaagctggatgaggagtacaaggagagaattgctgccctgaagaatgagctgaggaaggagcgggagcagatcctgcagcaggccggcaagcagaggctggagctggagcaggagattgagaaggccaagacagaggagaactacatccgggaccggctggccctgagcctgaaggagaacagccggctggagaatgagctgctggagaatgctgagaagctggccgagtatgagaacctgaccaacaagctgcagaggaacctggagaatgtgctggccgagaagtttggagacctggaccccagcagcgctgagttcttcctgcaggaggagcggctgacccagatgagaaatgaatatgaaaggcagtgccgggtgctgcaggaccaggtggatgagctgcagagcgagctggaggagtaccgggcccagggccgggtgctgcggctgcccctgaagaacagccccagcgaggaggtggaggccaacagcggcggcatcgagcctgagcacggcctgggcagcgaggagtgcaaccccctgaacatgagcattgaagctgagctggtgattgagcagatgaaggagcagcaccaccgggacatctgctgcctgcggctggagctggaggacaaggtgcgccactatgagaagcagctggatgaaacagtggtgtcctgcaagaaggcccaggagaacatgaagcagagacatgaaaatgagacccacaccctggagaagcagatcagtgacctgaagaatgaaattgctgagctgcagggccaggccgctgtgctgaaggaggcccaccacgaggccacctgcagacatgaggaggagaagaagcagctgcaggtgaagctggaggaggagaagacccacctgcaggagaagctgcggctgcagcacgagatggagctgaaggcccggctgacccaggcccaggccagctttgagcgggagcgggagggcctgcagagcagcgcctggacagaggagaaggtgcggggcctgacccaggagctggagcagttccaccaggagcagctgaccagcctggtggagaagcacaccctggagaaggaggagctgaggaaggagctgctggagaagcaccagcgggagctgcaggagggccgctatgaaagtgagaagctgcagcaggagaacagcatcctgagaaatgagatcaccaccctgaatgaagaagattccatcagcaacctgaagctgggcaccctgaatggcagccaggaggagatgtggcagaagacagaaacagtgaagcaggagaatgctgctgtgcagaagatggtggagaacctgaagaagcagatcagcgagctgaagatcaagaaccagcagctggacctggagaacacagagctgagccagaagaacagccagaaccaggagaagctgcaggagctgaaccagaggctgacagagatgctgtgccagaaggagaaggagcccggcaacagcgccctggaggagcgggagcaggagaagttcaacctgaaggaggagctggagcgctgcaaggtgcagagcagcaccctggtgagcagcctggaggccgagctgtctgaggtgaagatccagacccacatcgtgcagcaggagaaccacctgctgaaggatgagctggagaagatgaagcagctgcaccgctgcccagacctgagtgacttccagcagaagatcagctctgtgctgagctacaatgagaagctgctgaaggagaaggaggccctgtctgaggagctgaacagctgtgtggacaagctggccaagagcagcctgctggagcacagaattgccaccatgaagcaggagcagaagtcctgggagcaccagagcgccagcctgaagagccagctggtggccagccaggagaaggtgcagaacctggaggacacagtgcagaatgtgaacctgcagatgagcaggatgaagagtgacctgcgggtgacccagcaggagaaggaggccctgaagcaggaggtgatgagcctgcacaagcagctgcagaatgctgggggcaagtcctgggcccctgagatcgccacccaccccagcggcctgcacaaccagcagaagaggctgtcctgggacaagctggaccacctgatgaatgaggagcagcagctgctgtggcaggagaatgaaaggctgcagaccatggtgcagaacaccaaggccgagctgacccacagccgggagaaggtgcggcagctggagagcaacctgctgcccaagcaccagaagcacctgaaccccagcggcaccatgaaccccacagagcaggagaagctgagcctgaagcgggagtgtgaccagttccagaaggagcagagccctgccaacaggaaggtgtcccagatgaacagcctggagcaggagctggagaccatccacctggagaatgaaggcctgaagaagaagcaggtgaagctggatgagcagctgatggagatgcagcacctgcggagcacagccacccccagccccagcccccacgcctgggacctgcagctgctgcagcagcaggcctgccccatggtgccccgggagcagttcctgcagctgcagaggcagctgctgcaggccgagcgcatcaaccagcacctgcaggaggagctggagaacagaacatctgagaccaacaccccccagggcaaccaggagcagctggtgacagtgatggaggagaggatgattgaggtggagcagaagctgaagctggtgaagaggctgctgcaggagaaggtgaaccagctgaaggagcaggtgtccctgcccggccacctgtgcagccccaccagccacagcagcttcaacagcagcttcaccagcctgtactgccactag

SEQ ID NO: 20222 - DNA, 3171 bp, synthetic construct
  source 1..3171: mol_type = other DNA; note = Synthetic coding sequence
atggccactggaaactacttcggcttcacccacagcggggctgctgctgctgctgctgctgcccagtacagccagcagcctgccagcggcgtggcctacagccaccccaccaccgtggccagctacacagtgcaccaggcccctgtggccgcccacacagtgacagctgcctatgccccagctgctgccaccgtggccgtggcccggcctgcccctgtggccgtggccgccgccgccacagctgctgcctacggcggctaccccacagcccacacagccacagattatggctacacccagaggcagcaggaggcccctcctcctcctcctccagccaccacccagaactaccaggacagctacagctatgtgcgcagcacagccccagctgtggcctatgacagcaagcagtactaccagcagcccacagccacagctgctgctgtggccgccgccgcccagccccagcccagcgtggccgagacctactaccagacagcccccaaggccggctacagccagggcgccacccagtacacccaggcccagcagacccggcaggtgacagccatcaagccagccacccccagccctgccaccaccaccttcagcatctaccctgtgagcagcacagtgcagcctgtggccgccgccgccaccgtggtgcccagctacacccagagcgccacctacagcaccacagctgtgacctacagcggcaccagctacagcggctatgaggccgctgtgtacagcgctgccagcagctactaccagcagcagcagcagcagcagaagcaggccgctgctgctgctgctgctgctgctgccacagctgcctggacaggcaccaccttcaccaagaaggcccccttccagaacaagcagctgaagcccaagcagccccccaagccaccccagatccactactgtgatgtgtgcaagatcagctgtgccggcccccagacctacaaggagcacctggagggccagaagcacaagaagaaggaggccgccctgaaggccagccagaacaccagcagcagcaacagcagcacccggggcacccagaaccagctgcgctgtgagctgtgtgatgtgtcctgcaccggggctgatgcctatgctgcccacatccggggggccaagcaccagaaggtggtgaagctgcacaccaagctgggcaagcccatccccagcacagagcccaacgtggtgtcccaggccaccagcagcacagctgtgtctgccagcaagcccacagccagccccagcagcattgctgccaacaactgcaccgtgaacaccagctctgtggccaccagctccatgaagggcctgaccaccaccggcaacagcagcctgaacagcaccagcaacaccaaggtgtctgctgtgcccaccaacatggccgccaagaagaccagcacccccaagatcaactttgtgggcggcaacaagctgcagagcactggaaacaaggccgaggacatcaagggcacagaatgtgtgaagagcacccctgtgaccagcgctgtgcagatccctgaggtgaagcaggacacagtgtctgagcctgtgaccccagccagcctggccgccctgcagagtgatgtgcagcctgtgggccatgactatgtggaggaggtgagaaatgatgagggcaaggtgatccgcttccactgcaagctgtgtgagtgcagcttcaatgaccccaatgccaaggagatgcacctgaagggccgccgccaccggctgcagtacaagaagaaggtgaacccagacctgcaggtggaggtgaagcccagcatccgggccaggaagatccaggaggagaagatgaggaagcagatgcagaaggaggagtactggaggcggcgggaggaggaggagcgctggaggatggagatgagaagatatgaggaggacatgtactggaggaggatggaggaggagcagcaccactgggatgacagaagaaggatgccagatggcggctacccccacggccccccaggccccctgggcctgctgggcgtgcggcccggcatgccaccccagccccagggccctgcccccctgcggcggccagacagcagtgatgaccgctacgtgatgaccaagcacgccaccatctaccccacagaggaggagctgcaggccgtgcagaagatcgtgtccatcacagagcgggccctgaagctggtgtctgacagcctgtctgaacatgagaagaacaagaacaaggagggagatgacaagaaggagggcggcaaggaccgggccctgaagggcgtgctgcgggtgggcgtgctggccaagggcctgctgctgcggggggacagaaatgtgaacctggtgctgctgtgcagcgagaagcccagcaagaccctgctgagcagaattgctgagaacctgcccaagcagctggccgtcatcagccctgagaagtatgacatcaagtgtgctgtgtctgaggccgccatcatcctgaacagctgtgtggagcccaagatgcaggtgaccatcaccctgaccagccccatcatccgggaggagaacatgagagaaggagatgtgaccagcggcatggtgaaggaccccccagatgtgctggaccggcagaagtgcctggatgccctggccgccctgcggcatgccaagtggttccagcaggcccgggccaacggcctgcagagctgtgtgatcatcatccgcatcctgcgggacctgtgccagagggtgcccacctggagcgacttccccagctgggccatggagctgctggtggagaaggccatcagcagcgccagcagcccccagagccctggagatgccctgcggcgggtgtttgagtgcatcagcagcggcatcatcctgaagggcagccctggcctgctggacccctgtgagaaggacccctttgacaccctggccaccatgacagaccagcagcgggaggacatcaccagcagcgcccagtttgccctgcggctgctggccttccggcagatccacaaggtgctgggcatggaccccctgccccagatgagccagcgcttcaacatccacaacaacaggaagagaagaagagacagtgatggcatggacctgaagctgcggggcaagaagaccaagaagatcatgatcaccttcaagaagtgcctgtag

SEQ ID NO: 20223 - DNA, 390 bp, synthetic construct
  source 1..390: mol_type = other DNA; note = Synthetic coding sequence
atgggctgctgcggctgcagcggcggctgcggcagcggctgcggcggctgcggcagcggctgcggcggctgcggcagcagctgctgcgtgcccatctgctgctgcaagcctgtgtgctgctgcgtgcctgcctgcagctgcaccagctgtggcagctgtggcggcagcaagggctgctgcggcagctgtggcggcagcaaaggaggctgcggcagctgtggcggcagcaaaggaggctgcggcagctgtggctgcagccagtgcagctgctgcaagccctgctactgcagcagcggctgcggcagcagctgctgccagagcagctgctgcaagccctgctgcagccaggccagctgctgcgtgcccatctgctgccagtgcaagatctag

SEQ ID NO: 20224 - DNA, 1344 bp, synthetic construct
  source 1..1344: mol_type = other DNA; note = Synthetic coding sequence
atgcccatgcccacagagggcaccccaccacccctgagcggcacccccatccctgtgcctgcctacttcagacatgctgagcccggcttcagcctgaagaggccccggggcctgagccgcagcctgcccccacctcctccagccaagggcagcatccccatcagccgcctcttcccccccaggaccccaggctggcaccagctgcagcccaggagagtgtccttccggggggaggccagcgagaccctgcagagccctggctatgaccccagcaggcctgagagcttcttccagcagagcttccagaggctgagccggctgggccacggcagctatggagaggtgttcaaggtgcgcagcaaggaggatggccgcctgtatgctgtgaagaggtccatgagccccttccggggccccaaggaccgggccaggaagctggccgaggtgggcagccatgagaaggtgggccagcacccctgctgcgtgcggctggagcaggcctgggaggagggcggcatcctgtacctgcagacagagctgtgtggccccagcctgcagcagcactgtgaggcctggggcgccagcctgcctgaggcccaggtgtggggctacctgcgggacaccctgctggccctggcccacctgcacagccagggcctggtgcacctggatgtgaagccagccaacatcttcctgggcccccggggccgctgcaagctgggggactttggcctgctggtggagctgggcacagctggggccggggaggtgcaggagggggacccccgctacatggcccctgagctgctgcagggcagctatggaacagctgctgatgtgttcagcctgggcctgaccatcctggaggtggcctgcaacatggagctgccccacggcggggagggctggcagcagctgcggcagggctacctgcccccagagttcaccgctggcctgagcagcgagctgcggtctgtgctggtgatgatgctggagccagaccccaagctgcgggccacagctgaggccctgctggccctgcctgtgctgcggcagccccgggcctggggcgtgctgtggtgcatggctgctgaggccctgagccggggctgggccctgtggcaggccctgctggccctgctgtgctggctgtggcacggcctggcccacccagcctcctggctgcagcccctgggccccccagccaccccacctggcagccccccctgcagcctgctgctggacagcagcctgagcagcaactgggatgatgacagcctgggcccctgtgtgctgaagaggacagaaggagccctggagtgcagccagatggagggcctgtag

SEQ ID NO: 20225 - DNA, 1005 bp, synthetic construct
  source 1..1005: mol_type = other DNA; note = Synthetic coding sequence
atgtctgctgccaaccctgagacccccaacagcaccatcagccgggaggccagcacccagagcagcagcgctgctgccagccagggctgggtgctgcctgagggcaagatcgtgcccaacacagtgtttgtgggcggcattgatgccaggatggatgaaacagagatcggcagctgcttcggccgctatggctctgtgaaggaggtgaagatcatcaccaacagaactggagtgtccaagggctacggctttgtgtcctttgtgaatgatgtggatgtgcagaagatcgtgggcagccagatccacttccacggcaagaagctgaagctgggccctgccatcaggaagcagaagctgtgtgcccggcacgtgcagccccggcccctggtggtgaaccccccacctccaccccagttccagaatgtgtggaggaaccccaacacagagacctacctgcagccccagatcacccccaaccctgtgacccagcacgtgcaggcctacagcgcctacccccacagccctggccaggtgatcaccggctgccagctgctggtgtacaactaccaggagtaccccacctacccagacagcgccttccaggtgaccaccggctaccagctgcctgtgtacaactaccagcccttccctgcctaccccaggagccccttccaggtgacagctggctaccagctgcctgtgtacaactaccaggccttccctgcctaccccaacagccccttccaggtggccaccggctaccagtttcctgtgtacaactaccagcccttccctgcctaccccagcagccccttccaggtgacagctggctaccagctgcctgtgtacaactaccaggccttccctgcctaccccaacagccccttccaggtggccaccggctaccagtttcctgtgtacaactaccaggccttccctgcctaccccaacagccctgtgcaggtgaccaccggctaccagctgcctgtgtacaactaccagtag

SEQ ID NO: 20226 - DNA, 1173 bp, synthetic construct
  source 1..1173: mol_type = other DNA; note = Synthetic coding sequence
atgtctgctgccaaccctgagacccccaacagcaccatcagccgggaggccagcacccagagcagcagcgctgctgccagccagggctgggtgctgcctgagggcaagatcgtgcccaacacagtgtttgtgggcggcattgatgccaggatggatgaaacagagatcggcagctgcttcggccgctatggctctgtgaaggaggtgaagatcatcaccaacagaactggagtgtccaagggctacggctttgtgtcctttgtgaatgatgtggatgtgcagaagatcgtgggcagccagatccacttccacggcaagaagctgaagctgggccctgccatcaggaagcagaagctgtgtgcccggcacgtgcagccccggcccctggtggtgaaccccccacctccaccccagttccagaatgtgtggaggaaccccaacacagagacctacctgcagccccagatcacccccaaccctgtgacccagcacgtgcaggcctacagcgcctacccccacagccctggccaggtgatcaccggctgccagctgctggtgtacaactaccaggagtaccccacctacccagacagcgccttccaggtgaccaccggctaccagctgcctgtgtacaactaccagcccttccctgcctaccccaggagccccttccaggtgacagctggctaccagctgcctgtgtacaactaccaggccttccctgcctaccccaacagccccttccaggtggccaccggctaccagtttcctgtgtacaactaccagcccttccctgcctaccccagcagccccttccaggtgacagctggctaccagctgcctgtgtacaactaccaggccttccctgcctaccccaacagccctgtgcaggtgaccaccggctaccagctgcctgtgtacaactaccaggccttccctgcctaccccagcagccccttccaggtgaccaccggctaccagctgcctgtgtacaactaccaggccttccctgcctaccccaacagcgctgtgcaggtgaccaccggctaccagttccacgtgtacaactaccagatgccaccccagtgccctgtgggggagcagaggaggaacctgtggacagaggcctacaagtggtggtacctggtgtgcctgatccagaggcgggactag

SEQ ID NO: 20227 - DNA, 1173 bp, synthetic construct; identical to SEQ ID NO: 20226
  source 1..1173: mol_type = other DNA; note = Synthetic coding sequence

SEQ ID NO: 20228 - DNA, 1101 bp, synthetic construct
  source 1..1101: mol_type = other DNA; note = Synthetic coding sequence
atgtctgctgccaaccctgagacccccaacagcaccatcagccgggaggccagcacccagagcagcagcgctgctgccagccagggctgggtgctgcctgagggcaagatcgtgcccaacacagtgtttgtgggcggcattgatgccaggatggatgaaacagagatcggcagctgcttcggccgctatggctctgtgaaggaggtgaagatcatcaccaacagaactggagtgtccaagggctacggctttgtgtcctttgtgaatgatgtggatgtgcagaagatcgtgggcagccagatccacttccacggcaagaagctgaagctgggccctgccatcaggaagcagaagctgtgtgcccggcacgtgcagccccggcccctggtggtgaaccccccacctccaccccagttccagaatgtgtggaggaaccccaacacagagacctacctgcagccccagatcacccccaaccctgtgacccagcacgtgcaggcctacagcgcctacccccacagccctggccaggtgatcaccggctgccagctgctggtgtacaactaccaggagtaccccacctacccagacagcgccttccaggtgaccaccggctaccagctgcctgtgtacaactaccagcccttccctgcctaccccaggagccccttccaggtgacagctggctaccagctgcctgtgtacaactaccaggccttccctgcctaccccaacagccccttccaggtggccaccggctaccagtttcctgtgtacaactaccagcccttccctgcctaccccagcagccccttccaggtgacagctggctaccagctgcctgtgtacaactaccaggccttccctgcctaccccaacagccctgtgcaggtgaccaccggctaccagctgcctgtgtacaactaccaggccttccctgcctaccccaacagcgctgtgcaggtgaccaccggctaccagttccacgtgtacaactaccagatgccaccccagtgccctgtgggggagcagaggaggaacctgtggacagaggcctacaagtggtggtacctggtgtgcctgatccagaggcgggactag

SEQ ID NO: 20229 - DNA, 1149 bp, synthetic construct
  source 1..1149: mol_type = other DNA; note = Synthetic coding sequence
atgtctgctgccaaccctgagacccccaacagcaccatcagccgggaggccagcacccagagcagcagcgctgctgccagccagggctgggtgctgcctgagggcaagatcgtgcccaacacagtgtttgtgggcggcattgatgccaggatggatgaaacagagatcggcagctgcttcggccgctatggctctgtgaaggaggtgaagatcatcaccaacagaactggagtgtccaagggctacggctttgtgtcctttgtgaatgatgtggatgtgcagaagatcgtgggcagccagatccacttccacggcaagaagctgaagctgggccctgccatcaggaagcagaagctgtgtgcccggcacgtgcagccccggcccctggtggtgaaccccccacctccaccccagttccagaatgtgtggaggaaccccaacacagagacctacctgcagccccagatcacccccaaccctgtgacccagcacgtgcaggcctacagcgcctacccccacagccctggccaggtgatcaccggctgccagctgctggtgtacaactaccaggagtaccccacctacccagacagcgccttccaggtgaccaccggctaccagctgcctgtgtacaactaccagcccttccctgcctaccccaggagccccttccaggtgacagctggctaccagctgcctgtgtacaactaccaggccttccctgcctaccccaacagccccttccaggtggccaccggctaccagtttcctgtgtacaactaccagcccttccctgcctaccccagcagccccttccaggtgacagctggctaccagctgcctgtgtacaactaccaggccttccctgcctaccccaacagccccttccaggtggccaccggctaccagtttcctgtgtacaactaccaggccttccctgcctaccccaacagccctgtgcaggtgaccaccggctaccagctgcctgtgtacaactaccaggccttccctgcctaccccaacagccccttccaggtggccaccggctaccagtttcctgtgtacaactaccaggccttccctgcctaccccaacagccctgtgcaggtgaccaccggctaccagctgcctgtgtacaactaccagtag

SEQ ID NO: 20230 - DNA, 1842 bp, synthetic construct
  source 1..1842: mol_type = other DNA; note = Synthetic coding sequence
atgtctgctgccaaccctgagacccccaacagcaccatcagccgggaggccagcacccagagcagcagcgctgctgccagccagggctgggtgctgcctgagggcaagatcgtgcccaacacagtgtttgtgggcggcattgatgccaggatggatgaaacagagatcggcagctgcttcggccgctatggctctgtgaaggaggtgaagatcatcaccaacagaactggagtgtccaagggctacggctttgtgtcctttgtgaatgatgtggatgtgcagaagatcgtgggcagccagatccacttccacggcaagaagctgaagctgggccctgccatcaggaagcagaagctgtgtgcccggcacgtgcagccccggcccctggtggtgaaccccccacctccaccccagttccagaatgtgtggaggaaccccaacacagagacctacctgcagccccagatcacccccaaccctgtgacccagcacgtgcagagcgctgccaaccctgagacccccaacagcaccatcagccgggaggccagcacccagagcagcagcgctgctgccagccagggctgggtgctgcctgagggcaagatcgtgcccaacacagtgtttgtgggcggcattgatgccaggatggatgaaacagaaattggcagctgcttcggccgctatggctctgtgaaggaggtgaagatcatcaccaacagaactggagtgtccaagggctacggctttgtgtcctttgtgaatgatgtggatgtgcagaagatcgtgggcagccagatccacttccacggcaagaagctgaagctgggccctgccatcaggaagcagaagctgtgtgcccggcacgtgcagccccggcccctggtggtgaaccccccacctccaccccagttccagaatgtgtggaggaaccccaacacagagacctacctgcagccccagatcacccccaaccctgtgacccagcacgtgcagagcgctgccaaccctgagacccccaacagcaccatcagccgggaggccagcacccagagcagcagcgctgctgccagccagggctgggtgctgcctgagggcaagatcgtgcccaacacagtgtttgtgggcggcattgatgccaggatggatgaaacagagatcggcagctgcttcggccgctatggctctgtgaaggaggtgaagatcatcaccaacagaactggagtgtccaagggctacggctttgtgtcctttgtgaatgatgtggatgtgcagaagatcgtgggcagccagatccacttccacggcaagaagctgaagctgggccctgccatcaggaagcagaagctgtgtgcccggcacgtgcagccccggcccctggtggtgaaccccccacctccaccccagttccagaatgtgtggaggaaccccaacacagagacctacctgcagccccagatcacccccaaccctgtgacccagcacgtgcaggcctacagcgcctacccccacagccctggccaggtgatcaccggctgccagctgctggtgtacaactaccaggagtaccccacctacccagacagcgccttccaggtgaccaccggctaccagctgcctgtgtacaactaccagcccttccctgcctaccccaggagccccttccaggtgacagctggctaccagctgcctgtgtacaactaccaggccttccctgcctaccccaacagccccttccaggtggccaccggctaccagtttcctgtgtgtgagatctgcaagatcctggtgctgaagaatgctgctgccttcctgtgccacagcaaggtgaacagaagcatctag

SEQ ID NO: 20231 - DNA, 384 bp, synthetic construct; identical to SEQ ID NO: 18976
  source 1..384: mol_type = other DNA; note = Synthetic coding sequence

SEQ ID NO: 20232 - DNA, 537 bp, synthetic construct
  source 1..537: mol_type = other DNA; note = Synthetic coding sequence
atgatgagggccatgaagcccccaggaggagagagcagcaacctgtttggcagccctgaggaggccacccccagcagccggcccaacaggatggccagcaacatcttcggccccacagaggagccccagaacatccccaagaggaccaaccccccaggcggcaaaggaagtggcatctttgatgagagcacccctgtgcagacccggcagcacctgaaccccccaggcggcaagaccagtgacatcttcggcagccctgtgacagccaccagccggctggcccaccccaacaagcccaaggaccacgtgttcctgtgtgagggggaggagcccaagagtgacctgaaggccgcccggagcatcccagctggagctgagcctggagagaagggcagcgccaggaaggccggccctgccaaggagcaggagcccatgcccaccgtggacagccatgagccccggctgggcccccggcccaggagccacaacaaggtgctgaaccccccaggcggcaagagcagcatctccttctactag

SEQ ID NO: 20233 - DNA, 657 bp, synthetic construct
  source 1..657: mol_type = other DNA; note = Synthetic coding sequence
atgttccaggtgcctgattctgagggcggccgggccggcagcaggaagtggcagctgctgaccggcagcctggccagcaccagccccagcctgctgagcggccagggcccctgggcccccctgcagagggccatgaagcccccaggaggagagagcagcaacctgtttggcagccctgaggaggccacccccagcagccggcccaacaggatggccagcaacatcttcggccccacagaggagccccagaacatccccaagaggaccaaccccccaggcggcaaaggaagtggcatctttgatgagagcacccctgtgcagacccggcagcacctgaaccccccaggcggcaagaccagtgacatcttcggcagccctgtgacagccaccagccggctggcccaccccaacaagcccaaggaccacgtgttcctgtgtgagggggaggagcccaagagtgacctgaaggccgcccggagcatcccagctggagctgagcctggagagaagggcagcgccaggaaggccggccctgccaaggagcaggagcccatgcccaccgtggacagccatgagccccggctgggcccccggcccaggagccacaacaaggtgctgaaccccccaggcggcaagagcagcatctccttctactag

SEQ ID NO: 20234 - DNA, 4866 bp, synthetic construct
  source 1..4866: mol_type = other DNA; note = Synthetic coding sequence
atggccggcggccgcggggcccctggccggggcagagatgagcccccagagagctacccccagaggcaggaccacgagctgcaggccctggaggccatctacggggctgacttccaggacctgcggccagatgcctgtggccctgtgaaggagcccccagagatcaacctggtgctgtacccccagggcctgactggagaggaggtgtatgtgaaggtggacctgcgggtgaagtgcccccccacctacccagatgtggtgcctgagattgagctgaagaatgccaagggcctgagcaatgaatctgtgaacctgctgaagagccggctggaggagctggccaagaagcactgtggggaggtgatgatctttgagctggcctaccacgtgcagagcttcctgtctgagcacaacaagcccccacccaagagcttccacgaggagatgctggagcggcgggcccaggaggagcagcagaggctgctggaggccaagaggaaggaggagcaggagcagcgggagatcctgcacgagatccagaggaggaaggaggagatcaaggaggagaagaagaggaaggagatggccaagcaggagcggctggagatcgccagcctgagcaaccaggaccacaccagcaagaaggaccccggcggccacaggacagctgccatcctgcatggaggcagcccagactttgtgggcaatggcaagcaccgggccaacagcagcggccgcagccggcgggagcggcagtacagcgtgtgcaacagcgaggacagccctggcagctgtgagatcctgtacttcaacatgggcagcccagaccagctgatggtgcacaagggcaagtgcatcggcagtgatgagcagctgggcaagctggtgtacaatgccctggagacagccaccggcggctttgtgctgctgtatgagtgggtgctgcagtggcagaagaagatgggccccttcctgaccagccaggagaaggagaagattgacaagtgcaagaagcagatccagggcacagaaacagagttcaacagcctggtgaagctgagccaccccaacgtggtgcgctacctggccatgaacctgaaggagcaggatgacagcatcgtggtggacatcctggtggagcacatctctggagtgtccctggccgcccacctgagccacagcggccccatccctgtgcaccagctgcggcgctacacagcccagctgctgagcggcctggactacctgcacagcaacagcgtggtgcacaaggtgctgagcgccagcaatgtgctggtggatgctgagggcaccgtgaagatcacagactacagcatcagcaagaggctggccgacatctgcaaggaggatgtgtttgagcagaccagggtgcgcttcagtgacaatgccctgccctacaagacaggcaagaagggagatgtgtggaggctgggcctgctgctgctgagcctgagccagggccaggagtgtggggagtaccctgtgaccatccccagcgacctgcctgctgacttccaggacttcctgaagaagtgtgtgtgcctggatgacaaggagcgctggagcccccagcagctgctgaagcacagcttcatcaacccccagcccaagatgcccctggtggagcagagcccagaagattctgagggccaggactatgtggagaccgtcatccccagcaaccggctgcccagcgctgccttcttcagcgagacccagaggcagttcagccgctacttcatcgagtttgaggagctgcagctgctgggcaagggggcctttggagctgtgatcaaggtgcagaacaagctggatggctgctgctatgctgtgaagaggatccccatcaacccagccagccggcagttccgccgcatcaagggggaggtgaccctgctgagccggctgcaccacgagaacatcgtgcgctactacaatgcctggattgaaagacatgagaggcctgctggccctggcaccccacctccagacagcggccccctggccaaggatgacagagctgcccggggccagcctgccagtgacacagatggcctggacagcgtggaggccgccgcccccccacccatcctgagcagctctgtggagtggagcaccagcggggagaggtctgccagcgcccgcttccctgccaccggccctggcagcagtgatgatgaagatgatgatgaagatgaacatggaggagtcttcagccagagcttcctgcctgccagtgacagcgagagtgacatcatctttgacaatgaagatgagaacagcaagagccagaaccagatggagtactgtgagaagagcaccctgcgggacaccatcgaccagggcctgtacagagacacagtgcggctgtggaggctcttccgggagatcctggatggcctggcctacatccacgagaagggcatgatccaccgggacctgaagcctgtgaacatcttcctggacagtgatgaccacgtgaagatcggggactttggcctggccacagaccacctggccttctctgctgacagcaagcaggatgaccagacaggagacctgatcaagagtgaccccagcggccacctgaccggcatggtgggcacagccctgtatgtgtccccagaggtgcagggcagcaccaagagcgcctacaaccagaaggtggacctcttcagcctgggcatcatcttctttgagatgagctaccaccccatggtgacagccagcgagcgcatctttgtgctgaaccagctgcgggaccccaccagccccaagtttcctgaggactttgatgatggagaacatgccaagcagaagagcgtcatctcctggctgctgaaccacgaccctgccaagaggcccacagccacagagctgctgaagtctgagctgctgcccccaccccagatggaggagagcgagctgcacgaggtgctgcaccacaccctgaccaacgtggatggcaaggcctaccgcaccatgatggcccagatcttcagccagaggatcagccctgccatcgactacacctatgacagcgacatcctgaagggcaacttcagcatcagaacagccaagatgcagcagcacgtgtgtgagaccatcatccgcatcttcaagagacatggagctgtgcagctgtgcacccccctgctgctgcccaggaaccggcagatctatgagcacaatgaagctgccctcttcatggaccacagcggcatgctggtgatgctgccctttgacctgcgcatcccctttgcccgctacgtggccaggaacaacatcctgaacctgaagcgctactgcatcgagagggtcttccggcccaggaagctggaccgcttccaccccaaggagctgctggagtgtgcctttgatattgtgaccagcaccaccaacagcttcctgcccacagctgagatcatctacaccatctatgagatcatccaggagttccctgccctgcaggagaggaactacagcatctacctgaaccacaccatgctgctgaaggccatcctgctgcactgcggcatccctgaggacaagctgagccaggtgtacatcatcctgtatgatgctgtgacagagaagctgacccggcgggaggtggaggccaagttctgcaacctgagcctgagcagcaacagcctgtgccgcctgtacaagttcatcgagcagaagggggacctgcaggacctgatgcccaccatcaacagcctcatcaagcagaagacaggcatcgcccagctggtgaagtatggcctgaaggacctggaggaggtggtgggcctgctgaagaagctgggcatcaagctgcaggtgctgatcaacctgggcctggtgtacaaggtgcagcagcacaacggcatcatcttccagtttgtggccttcatcaagaggcggcagagagctgtgcctgagatcctggccgccggcggccgctatgacctgctgatcccccagttccggggcccccaggccctgggccctgtgcccacagccatcggcgtgtccatcgccatcgacaagatctctgctgctgtgctgaacatggaggagagcgtgaccatcagcagctgtgacctgctggtggtgtctgtgggccagatgtccatgagccgggccatcaacctgacccagaagctgtggacagctggcatcacagctgagatcatgtatgactggagccagagccaggaggagctgcaggagtactgccgccaccacgagatcacctacgtggccctggtgtctgacaaggagggcagccacgtgaaggtgaagagctttgagaaggagcggcagacagagaagagggtgctggagacagagctggtggaccacgtgctgcagaagctgcggaccaaggtgacagatgaaagaaatggccgggaggccagtgacaacctggccgtgcagaacctgaagggcagcttcagcaatgccagcggcctgtttgagatccacggggccaccgtggtgcccatcgtgtctgtgctggcccctgagaagctgagcgccagcacccggcggcgctatgagacccaggtgcagacccggctgcagaccagcctggccaacctgcaccagaagagcagcgagattgagatcctggccgtggacctgcccaaggagaccatcctgcagttcctgagcctggagtgggatgctgatgagcaggccttcaacaccaccgtgaagcagctgctgagccggctgcccaagcagcgctacctgaagctggtgtgtgatgagatctacaacatcaaggtggagaagaaggtgtctgtgctcttcctgtacagctacagagatgactactaccgcatcctcttctag

SEQ ID NO: 20235 - DNA, 2388 bp, synthetic construct
  source 1..2388: mol_type = other DNA; note = Synthetic coding sequence
atgaagttcaccaacaccaaggtgcagatgatgcagaatgtgcacctggcccctgagacagatgaagatgacctgtacagcggctacaatgactacaaccccatctatgacatcgaggagctggagaatgatgctgccttccagcaggccgtgaggaccagccatggaagaagaccacccatcacagccaagatcagcagcacagctgtgacccggcccatcgccaccggctacggcagcaagaccagcctggccagcagcatcggccggcccatgactggagccatccaggatggagtgacccggcccatgacagctgtgcgggccgccggcttcaccaaggccgccctgcggggcagcgcctttgaccccctgagccagagccggggccctgccagccccctggaggccaagaagaaggacagccctgaggagaagatcaagcagctggagaaggaggtgaatgagctggtggaggagagctgcatcgccaacagctgtggggacctgaagctggccctggagaaggccaaggatgctggcaggaaggagcgggtgctggtgcggcagcgggagcaggtgaccaccccagagaacatcaacctggacctgacctacagcgtgctcttcaacctggccagccagtacagcgtgaatgagatgtatgcagaggccctgaacacctaccaggtgattgtgaagaacaagatgttcagcaatgccggcatcctgaagatgaacatgggcaacatctacctgaagcagaggaactacagcaaggccatcaagttctacaggatggccctggaccaggtgcccagcgtgaacaagcagatgaggatcaagatcatgcagaacattggagtgaccttcatccaggccggccagtacagtgatgccatcaacagctatgagcacatcatgtccatggcccccaacctgaaggccggctacaacctgaccatctgctactttgccatcggggaccgggagaagatgaagaaggccttccagaagctgatcaccgtgcccctggagattgatgaggacaagtacatcagccccagtgatgacccccacaccaacctggtgacagaggccatcaagaatgaccacctgcggcagatggagcgggagaggaaggccatggccgagaagtacatcatgaccagcgccaagctgattgcccctgtgattgagaccagctttgctgctggctatgactggtgtgtggaggtggtgaaggccagccagtatgtggagctggccaatgacctggagatcaacaaggctgtgacctacctgcggcagaaggactacaaccaggccgtggagatcctgaaggtgctggagaagaaggacagccgggtgaagtctgctgctgccaccaacctgagcgccctgtactacatgggcaaggactttgcccaggccagcagctatgctgacattgctgtgaacagcgaccgctacaacccagctgccctgaccaacaagggcaacacagtgtttgccaacggggactatgagaaggctgctgagttctacaaggaggccctgagaaatgacagcagctgcacagaggccctgtacaacatcggcctgacctatgagaagctgaaccggctggatgaggccctggactgcttcctgaagctgcacgccatcctgaggaacagcgctgaggtgctgtaccagatcgccaacatctatgagctgatggagaaccccagccaggccatcgagtggctgatgcaggtggtgtctgtcatccccacagacccccaggtgctgagcaagctgggggagctgtatgaccgggagggggacaagagccaggccttccagtactactatgagagctaccgctacttcccctgcaacattgaagtcatcgagtggctgggcgcctactacatcgacacccagttctgggagaaggccatccagtactttgagcgggccagcctcatccagcccacccaggtgaagtggcagctgatggtggccagctgcttccgccgcagcggcaactaccagaaggccctggacacctacaaggacacccacaggaagttcccagaaaatgtggagtgcagcggctctgtgaggacaggccacatggagcgggaccccctgaacctgctgcccaggaagtctgtgctgcccggccctgagatcgccaagtgcaactacttcagcggggagaagtactacctgagcgccttcctgagcagcagcctgcaccgctcctggatcaagcgctgcagccgcatctgccagaagacagaggaggtgggcaagaatgaaagaaataaaggaacagcccacaaggtgcggcagcgctggcagtggggcctgccctggcagaagaggaggaagtgctag

SEQ ID NO: 20236 - DNA, 192 bp, synthetic construct
  source 1..192: mol_type = other DNA; note = Synthetic coding sequence
atgagctactaccgcagctactacggcggcctgggctacggctatggaggctttggaggctggggctacggctacggctgcggctacggcagcttccggcggctgggctacggctgcggctatggaggctacggcttcagctgctgccggcccctgtactacggcggctacggcttcagcgccttctactag

SEQ ID NO: 20237 - DNA, 135 bp, synthetic construct
  source 1..135: mol_type = other DNA; note = Synthetic coding sequence
atgagctactacggcaactactacggcggcctgggctacggctatgactgcaagtacagctacaccagcggctttggagccttccgcatcctggactgtggctaccgctgtggctgcggcggcgtgtggatctag

SEQ ID NO: 20238 - DNA, 135 bp, synthetic construct
  source 1..135: mol_type = other DNA; note = Synthetic coding sequence
atgagctactacagccacctgagcggcggcctgggctgcggcctggccgtggccgtgaccatgggccgcacagtggccgtggccgagtatggccgctgcagacatggctgccacagcagctacagcgccaggtag

SEQ ID NO: 20239 - DNA, 138 bp, synthetic construct
  source 1..138: mol_type = other DNA; note = Synthetic coding sequence
atgtgctactaccacaactactacggcagcctggactatggctgcagctatggctctgaatatggcaacagcggctacgcctgcaacttcccctgcagctatggccgcttcctgctggcccccaggaagaagttctag

SEQ ID NO: 20240 - DNA, 624 bp, synthetic construct
  source 1..624: mol_type = other DNA; note = Synthetic coding sequence
atgccccacagccactgccacagcctgcgctccttccacaatgccccacccctgagcgccatcacccacggcaccaaccccatcacctttgaagatcggctgtgcctgcccagcagcttccacagcaggacctgcttcctggacaacttccaggagacctgcaatgagaccaccagctgccagatgaccaactgtgagcaggacctcttcacagatgacagctgtgtgcagagcaactgcttccctggggtggtgcagaccacctacagcaacagccggccctgtgagaggacagcctgccagagcgagagcagcagcgctggcctggcctgtgtgtcccagccctgccagagcgagagcacccagcagatgggctttgtggcccagagctgccagcctgccagcctgaagggcaacagctgcccccccaagaccagcaagagcaagaactttgagaccctggagcgggccagcagccagtgccagtgccagagccagaaccctgagagcagcagctgccggcccctggtgaatgtggcccctgagccccagctgctggagagcagccctggggtggagcccacctgctgcgtgactggaggcagccagctgcccagcaagtag

SEQ ID NO: 20241 - DNA, 645 bp, synthetic construct
  source 1..645: mol_type = other DNA; note = Synthetic coding sequence
atggcccacgtgagcagcgagacccaggatgtgagccccaaggatgagctgacagccagcgaggccagcaccaggagccccctgtgtgagcacaccttccctggggacagcgacctgcgctccatgattgaggagcacgccttccaggtgctgagccagggcagcctgctggagagccccagctacacagtgtgtgtgtctgagccagacaaggatgatgacttcctgagcctgaacttccccaggaagctgtggaagatcgtggagagtgaccagttcaagagcatctcctgggatgaaaatggcacctgcatcgtcatcaatgaggagctgttcaagaaggagatcctggagaccaaggccccctaccgcatcttccagacagatgccatcaagagctttgtgcggcagctgaacctgtatggcttcagcaagatccagcagaacttccagaggtctgccttcctggccaccttcctgtctgaggagaaggagagctctgtgctgagcaagctgcacgtgtttgtgttccaccacagcctgtttggagccaccttcggggagcaccacttccagccctgccccctgcccagcggcaacaaggcccccatcagcacctggagcggggacagctggctgctgtag

SEQ ID NO: 20242 - DNA, 645 bp, synthetic construct; identical to SEQ ID NO: 20241
  source 1..645: mol_type = other DNA; note = Synthetic coding sequence

SEQ ID NO: 20243 - DNA, 1437 bp, synthetic construct
  source 1..1437: mol_type = other DNA; note = Synthetic coding sequence
atggctgctgccctgaagtgcctgctgaccctgggccgctggtgccccggcctgggcgtggccccccaggcccgggccctggccgccctggtgcctggggtgacccaggtggacaacaagagcggcttcctgcagaagaggccccaccggcagcaccctggcatcctgaagctgccccacgtgcggctgccccaggccctggccaatggagcccagctgctgctgctgggcagcgctggccccaccatggagaaccaggtgcagaccctgaccagctacctgtggagccgccacctgcctgtggagcctgaggagctgcagaggcgggcccggcacctggagaagaagttcctggagaacccagacctgagccagacagaggagaagctgcggggagctgtgctgcacgccctgaggaagaccacctaccactggcaggagctgagctacacagagggcctgagcctggtgtacatggccgcccggctggatggcggctttgctgctgtgtcccgggccttccacgagatccgggccaggaacccagccttccagccccagaccctgatggactttggcagcggcaccggctctgtgacctgggccgcccacagcatctggggccagagcctgcgggagtacatgtgtgtggacagatctgctgccatgctggtgctggccgagaagctgctgaagggcggcagcgagagcggggagccctacatccctggggtcttcttccggcagttcctgcctgtgagccccaaggtgcagtttgatgtggtggtgtctgccttcagcctgtctgagctgcccagcaaggctgacagaacagaggtggtgcagaccctgtggaggaagacaggccacttcctggtgctggtggagaatggcaccaaggccggccacagcctgctgatggatgcccgggacctggtgctgaagggcaaggagaagagccccctggacccccggcccggctttgtgtttgccccctgcccccatgagctgccctgcccccagctgaccaacctggcctgcagcttcagccaggcctaccaccccatccccttctcctggaacaagaagcccaaggaggagaagttctccatggtgatcctggcccggggcagccctgaggaggcccaccgctggccccgcatcacccagcctgtgctgaagaggcccaggcatgtgcactgccacctgtgctgcccagatggccacatgcagcacgctgtgctgacagcccggcggcacggccgctatggaggctgtgaccagaaccagtgggatgtggccggcagctgcagcccccggcagcacctgttcccccagggctttgtgtccctgtgcccctgccagctgctgggccgctccttcacctgtgcctacagcgtgtgtgtgagcagcatctacggcagcggcagcctgtag

SEQ ID NO: 20244 - DNA, 774 bp, synthetic construct
  source 1..774: mol_type = other DNA; note = Synthetic coding sequence
atggaggaggaggccagcagccctggcctgggctgcagcaagccccacctggagaagctgaccctgggcatcacccgcatcctggagagcagccctggggtgacagaggtgaccatcatcgagaagcccccagctgagcggcacatgatcagctcctgggagcagaagaacaactgtgtgatgccagaagatgtgaagaacttctacctgatgaccaacggcttccacatgacctggagcgtgaagctggatgccagtgatgaccagcctgagaagccccactttgacagccgcagcgtcatctttgagctggacagctgcaatggcagcggcaaggtgtgcctggtgtacaagagcggcaagccagccctggccgaggacacagagatctggttcctggaccgggccctgtactggcacttcctgacagacaccttcaccgcctactaccgcctgctgatcacccacctgggcctgccccagtggcagtatgccttcaccagctatggcatcagcccccaggccaagcagtggttctccatgtacaagcccatcacctacaacaccaacctgctgacagaggagacagacagctttgtgaacaagctggaccccagcaaggtgttcaagagcaagaacaagatcgtcatccccaagaagaagggccctgtgcagcctgctgggggccagaagggccccagcggccccagcggccccagcaccagcagcaccagcaagagcagcagcggcagcggcaaccccaccaggaagtag

SEQ ID NO: 20245 - DNA, 792 bp, synthetic construct; identical to SEQ ID NO: 18943
  source 1..792: mol_type = other DNA; note = Synthetic coding sequence

SEQ ID NO: 20246 - DNA, 390 bp, synthetic construct; identical to SEQ ID NO: 19988
  source 1..390: mol_type = other DNA; note = Synthetic coding sequence

SEQ ID NO: 20247 - DNA, 1626 bp, synthetic construct
  source 1..1626: mol_type = other DNA; note = Synthetic coding sequence
atggaggccctgctggagggcatccagaacagaggacatggaggcggcttcctgaccagctgtgaggccgagctgcaggagctgatgaagcagattgacatcatggtggcccacaagaagtctgagtgggagggccgcacccacgccctggagacctgcctgaagatccgggagcaggagctgaagagcctgcggagccagctggatgtgacccacaaggaggtgggcatgctgcaccagcaggtggaggagcacgagaagatcaagcaggagatgaccatggagtacaagcaggagctgaagaagctgcacgaggagctgtgcatcctgaagaggagctatgagaagctgcagaagaagcagatgagggagttccggggcaacaccaagaaccaccgggaggacagaagtgaaattgagcggctgacagccaagattgaggagttccggcagaagagcctggactgggagaagcagaggctcatctaccagcagcaggtgagcagcctggaggcccagaggaaggccctggccgagcagagcgagatcatccaggcccagctggtgaacaggaagcagaagctggagagcgtggagctgagcagccagagcgagatccagcacctgagcagcaagctggagcgggccaatgacaccatctgtgccaatgagctggagattgagcggctgaccatgagggtgaatgacctggtgggcacctccatgacagtgctgcaggagcagcagcagaaggaggagaagctgcgggagagcgagaagctgctggaggccctgcaggaggagaagcgggagctgaaggccgccctgcagagccaggagaacctgatccacgaggcccgcatccagaaggagaagctgcaggagaaggtgaaggccaccaacacccagcacgctgtggaggccatccggccccgggaggagagcctggccgagaagaagtacaccagccagggccagggcgacctggacagcgtgctgagccagctgaacttcacccacaccagcgaggacctgctgcaggccgaggtgacctgcctggagggcagcctggagagcgtgtctgccacctgcaagcagctgagccaggagctgatggagaagtatgaggagctgaagaggatggaggcccacaacaatgagtacaaggccgagatcaagaagctgaaggagcagatcctgcagggcgagcagagctacagcagcgccctggagggcatgaagatggagatcagccacctgacccaggagctgcaccagagggacatcaccatcgccagcaccaagggcagcagcagtgacatggagaagaggctgcgggcagagatgcagaaggccgaggacaaggctgtggagcacaaggagatcctggaccagctggagagcctgaagctggagaacagacacctgtctgagatggtgatgaagctggagctgggcctgcatgaatgttccctgcctgtgagccccctgggcagcatcgccacccgcttcctggaggaggaggagctgcggagccaccacatcctggagcggctggatgcccacatcgaggagctgaagcgggagagcgagaagacagtgcggcagttcaccgccctgaagtag

SEQ ID NO: 20248 - DNA, 483 bp, synthetic construct; identical to SEQ ID NO: 20009
  source 1..483: mol_type = other DNA; note = Synthetic coding sequence

SEQ ID NO: 20249 - DNA, 483 bp, synthetic construct; identical to SEQ ID NO: 20009
  source 1..483: mol_type = other DNA; note = Synthetic coding sequence

SEQ ID NO: 20250 - DNA, 3192 bp, synthetic construct
  source 1..3192: mol_type = other DNA; note = Synthetic coding sequence
atgccccacctgcccctggccagcttccggccccccttctggggcctgcggcacagccggggcctgccccgcttccacagcgtgtccacccagagcgagccccacggcagccccatcagcagaagaaaccgggaggccaagcagaagaggctgcgggagaagcaggccaccctggaggccgagattgctggggagagcaagagccctgctgagagcatcaaggcctggaggcccaaggagctggtgctgtatgagatccccaccaagccaggagagaagaaggatgtgtctggccccctgcccccagcctacagcccccgctacgtggaggccgcctggtacccctggtgggtgcgggagggcttcttcaagccagagtaccaggcccggctgccccaggccactggagagaccttctccatgtgcatccccccaccaaatgtgacaggcagcctgcacatcggccacgccctgactgtggccatccaggatgccctggtgcgctggcacaggatgagaggagaccaggtgctgtgggtgcccggcagtgaccacgccggcatcgccacccaggccgtggtggagaagcagctgtggaaggagcggggcgtgagaagacatgagctgagccgggaggccttcctgcgggaggtgtggcagtggaaggaggccaagggcggggagatctgtgagcagctgcgggccctgggcgccagcctggactgggaccgggagtgcttcaccatggatgtgggcagctctgtggccgtgacagaggcctttgtgcggctgtacaaggccggcctgctgtacagaaaccaccagctggtgaactggagctgtgccctgcggagcgccatcagtgacatcgaggtggagaaccggcccctgcccggccacacccagctgcggctgcccggctgccccacccctgtgtcctttggcctgctcttctctgtggccttccctgtggatggagagccagatgctgaggtggtggtgggcaccaccaggcctgagaccctgcctggagatgtggccgtggccgtgcacccagatgacagccgctacacccacctgcacggccggcagctgcggcaccccctgatgggccagcccctgcccctcatcacagattatgctgtgcagccccacgtgggcaccggggctgtgaaggtgaccccagcccacagccctgcagatgctgagatgggcgcccggcacggcctgagccccctgaatgtgattgctgaagatggcaccatgaccagcctgtgtggggactggctgcagggcctgcacagatttgtggcccgggagaagatcatgtctgtgctgtctgagcggggcctcttccggggcctgcagaaccaccccatggtgctgcccatctgcagccgctctggagatgtgattgagtacctgctgaagaaccagtggtttgtgcgctgccaggagatgggcgcccgggccgccaaggctgtggagagcggggccctggagctgagccccagcttccaccagaagaactggcagcactggttcagccacatcggggactggtgtgtgtcccggcagctgtggtggggccaccagatcccagcctacctggtggtggaggaccacgcccagggcgaggaggactgctgggtggtgggccgctctgaggccgaggcccgggaggtggccgctgagctgaccggccggcctggagctgagctgaccctggagcgggaccctgatgtgctggacacctggttcagcagcgccctcttccccttcagcgccctgggctggccccaggagaccccagacctggcccgcttctaccccctgagcctgctggagactggaagtgacctgctgctcttctgggtgggccgcatggtgatgctgggcacccagctgaccggccagctgcccttcagcaaggtgctgctgcaccccatggtgcgggaccggcagggcaggaagatgagcaagagcctgggcaatgtgctggacccccgggacatcatcagcggcgtggagatgcagctgctgcaggagaagctgcggagcggcaacctggaccctgctgagctggccatcgtggccgccgcccagaagaaggacttcccccacggcatcccagaatgtggcacagatgccctgcgcttcaccctgtgcagccatggagtgcaggccggggacctgcacctgtctgtgtctgaggtgcagagctgccgccacttctgcaacaagatctggaatgccctgcgcttcatcctgaatgccctgggggagaagtttgtgccccagcctgctgaggagctgagccccagcagccccatggatgcctggatcctgagccggctggccctggccgcccaggagtgtgagcggggcttcctgacccgggagctgagcctggtgacccacgccctgcaccacttctggctgcacaacctgtgtgatgtgtacctggaggccgtgaagcctgtgctgtggcacagcccccggcccctgggccccccccaggtgctcttcagctgtgccgacctgggcctgcggctgctggcccccctgatgcccttcctggccgaggagctgtggcagaggctgcccccccggcccggctgccccccagcccccagcatctctgtggccccctaccccagcgcctgcagcctggagcactggaggcagcctgagctggagcggcgcttcagccgggtgcaggaggtggtgcaggtgctgcgggccctgcgggccacctaccagctgaccaaggcccggccccgggtgctgctgcagagcagcgagcccggggaccagggcctgtttgaggccttcctggagcccctgggcaccctgggctactgtggggctgtgggcctgctgcccccaggcacagctgcccccagcggctgggcccaggcccccctgagtgacacagcccaggtgtacatggagctgcagggcctggtggacccccagatccagctgcccctgctggccgcccggcgctacaagctgcagaagcagctggacagcctgacagcccggaccccatctgagggggaggccggcacccagaggcagcagaagctgagcagcctgcagctggagctgagcaagctggacaaggccgccagccacctgcggcagctgatggatgagcccccagcccctggcagccctgagctgtag

SEQ ID NO: 20251 - DNA, 1620 bp, synthetic construct; identical to SEQ ID NO: 19050
  source 1..1620: mol_type = other DNA; note = Synthetic coding sequence

SEQ ID NO: 20252 - DNA, 678 bp, synthetic construct
  source 1..678: mol_type = other DNA; note = Synthetic coding sequence
atggctgctggcagcgaggccaccacccctgtgattgtggccgccggggccggcggggaggagggggagcacgtgaagcccttcaagccagagaaggccaaggagatcatcatgagcctgcagcagcctgccatcttctgcaacatggtgtttgactggccagcccggcactggaatgccaagtacctgagccaggtgctgcacggcaagcagatccgcttcaggatgggcatgaagtccatgagcacagtgccccagtttgagaccacctgcaactacgtggaggccaccctggaggagttcctgacctggaactgtgaccagagcagcatcagcggccccttccgggactatgaccacagcaagttctgggcctatgctgactacaagtactttgtgtccctgtttgaggacaagacagacctcttccaggatgtgaagtggagcgactttggcttccctggaagaaatggccaggagagcaccctgtggattggcagcctgggcgcccacaccccctgccacctggacagctatggctgcaacctggtgttccaggtgcagggccgcctggagtgcaatggcatgatcatcgcccctggcccccaggccatcctgctgccccagcccctgaagtacctgggcctgcaggagaccatggccagcctgagcagctag

SEQ ID NO: 20253 - DNA, 2571 bp, synthetic construct; identical to SEQ ID NO: 18624
  source 1..2571: mol_type = other DNA; note = Synthetic coding sequence

SEQ ID NO: 20254 - DNA, 2607 bp, synthetic construct
  source 1..2607: mol_type = other DNA; note = Synthetic coding sequence
atggccagcttccctgagacagacttccagatctgcctgctgtgcaaggagatgtgtggcagccctgcccccctgagcagcaacagcagcgccagcagcagcagcagccagaccagcaccagcagcggcggcggcggcggcggccctggagctgctgcccggcggctgcacgtgctgccctgcctgcacgccttctgccggccctgcctggaggcccaccggctgcctgctgctgggggcggcgctgctggggagcccctgaagctgcgctgccctgtgtgtgaccagaaggtggtgctggccgaggccgccggcatggatgccctgcccagcagcgccttcctgctgagcaacctgctggatgctgtggtggccacagcagatgagcccccacccaagaatggccgggccggggccccagctggagctgggggccacagcaaccaccgccaccacgcccaccacgcccacccccgggccagcgccagcgccccacccctgccccaggccccccagcccccagcccccagccgcagcgcccctgggggccctgctgccagccccagcgccctgctgctgcggcggccccacggctgcagcagctgtgatgagggcaatgctgccagcagccgctgcctggactgccaggagcacctgtgtgacaactgtgtgcgggcccaccagagggtgcggctgaccaaggaccactacatcgagcggggccccccaggccctggagctgctgctgctgcccagcagctgggcctgggcccccccttccctggcccccccttcagcatcctgtctgtgtttcctgagcggctgggcttctgccagcaccatgatgatgaggtgctgcacctgtactgtgacacctgcagcgtgcccatctgccgggagtgcaccatgggccgccacggcggccacagcttcatctacctgcaggaggccctgcaggacagccgggccctgaccatccagctgctggctgatgcccagcagggccggcaggccatccagctgagcattgagcaggcccagacagtggccgagcaggtggagatgaaggccaaggtggtgcagagcgaggtgaaggctgtgacagcccggcacaagaaggccctggaggagagagaatgtgagctgctgtggaaggtggagaagatccggcaggtgaaggccaagagcctgtacctgcaggtggagaagctgcggcagaacctgaacaagctggagagcaccatctctgctgtgcagcaggtgctggaggagggccgggccctggacatcctgctggcccgggacaggatgctggcccaggtgcaggagctgaagacagtgcgcagcctgctgcagccccaggaggatgacagagtgatgttcaccccaccagaccaggccctgtacctggccatcaagagctttggatttgtgagcagcggggcctttgcccccctgaccaaggccactggagatggcctgaagagggccctgcagggcaaggtggccagcttcaccgtcatcggctatgaccatgatggagagccccggctgtctggaggagacctgatgtctgctgtggtgctgggcccagatggcaacctgtttggagctgaggtgtctgaccagcagaatggcacctacgtggtgtcctaccggccccagctggagggggagcacctggtgtctgtgaccctgtgcaaccagcacatcgagaacagccccttcaaggtggtggtgaagagcggccgctcctatgtgggcatcggcctgcccggcctgagctttggcagcgagggggacagtgatggcaagctgtgccggccctggggcgtgtctgtggacaaggagggctacatcatcgtggccgacaggagcaacaaccgcatccaggtgttcaagccctgtggggccttccaccacaagtttggcaccctgggcagccggcccggccagtttgacaggcctgctggggtggcctgtgatgccagcagaagaattgtggtggccgacaaggacaaccaccgcatccagatcttcacctttgagggccagttcctgctgaagtttggagagaagggcaccaagaatggccagttcaactacccctgggatgtggccgtgaacagcgagggcaagatcctggtgtctgacaccaggaaccaccgcatccagctgtttggaccagatggagtcttcctgaacaagtatggctttgaaggagccctgtggaagcactttgacagcccccggggcgtggccttcaaccacgagggccacctggtggtgacagacttcaacaaccaccggctgctggtgatccacccagactgccagagcgcccgcttcctgggcagcgagggcactggaaatggccagttcctgcggccccagggcgtggccgtggaccaggagggccgcatcatcgtggccgacagcaggaaccaccgggtgcagatgtttgagagcaatggcagcttcctgtgcaagtttggagcccagggcagcggcttcggccagatggaccggcccagcggcatcgccatcaccccagatggcatgattgtggtggtggactttggaaacaaccgcatcctggtgttctag

SEQ ID NO: 20255 - DNA, 1107 bp, synthetic construct
  source 1..1107: mol_type = other DNA; note = Synthetic coding sequence
atgagggagcctgtgctgacctggtgtgtgcccctggagctgctgtgcagccaccccctgcccctgagcgccttcctgaagagccaggtgaagctgtacacctaccgggcctgtgccggcaaggatgagatgggcaagatggtgtctgtcatcaacacagtggacaccagccatgaggacatgattcatgatgcccagatggactactacggcacccggctggccacctgcagcagtgacagatctgtgaagatctttgatgtgagaaatggaggccagatcctgattgctgacctgcggggccacgagggccctgtgtggcaggtggcctgggcccaccccatgtatggcaacatcctggccagctgcagctatgacaggaaggtgatcatctggagagaagaaaatggcacctgggagaagagccatgaacatgctggccatgacagctctgtgaacagcgtgtgctgggcccctcatgactatggcctcatcctggcctgtggcagcagtgatggagccatcagcctgctgacctacacaggagagggccagtgggaggtgaagaagatcaacaatgcccacaccatcggctgcaatgctgtgtcctgggccccagctgtggtgcccggcagcctgattgaccaccccagcggccagaagcccaactacatcaagagatttgccagcggcggctgtgacaacctgatcaagctgtggaaggaggaggaggatggccagtggaaggaggagcagaagctggaggcccacagcgactgggtgagagatgtggcctgggcccccagcatcggcctgcccaccagcaccatcgccagctgcagccaggacggccgggtcttcatctggacctgtgatgatgccagcagcaacacctggagccccaagctgctgcacaagttcaatgatgtggtgtggcacgtgtcctggagcatcacagccaacatcctggccgtgtctggaggagacaacaaggtgaccctgtggaaggagagcgtggatggccagtgggtgtgcatcagtgatgtgaacaagggccagggctctgtgtctgcctctgtgacagagggccagcagaatgagcagtag

SEQ ID NO: 20256 - DNA, 1059 bp, synthetic construct
  source 1..1059: mol_type = other DNA; note = Synthetic coding sequence
atggacatcgacaaggacctggaggcccccctgtacctgaccccagagggctggagcctcttcctgcagcgctactaccaggtggtgcatgagggcgctgagctgcggcacctggacacccaggtgcagagatgtgaggacatcctgcagcagctgcaggccgtggtgccccagattgacatggagggggacaggaacatctggatcgtgaagccaggggccaagagccggggccggggcatcatgtgcatggaccacctggaggagatgctgaagctggtgaatggaaatcctgtggtgatgaaggatggcaagtgggtggtgcagaagtacatcgagcggcccctgctgatcttcggcaccaagtttgacctgcggcagtggttcctggtgacagactggaaccccctgactgtgtggttctacagagacagctacatccgcttcagcacccagcccttcagcctgaagaacctggacaacagcgtgcacctgtgcaacaacagcatccagaagcacctggagaacagctgccaccgccaccccctgctgcccccagacaacatgtggagcagccagcgcttccaggcccacctgcaggagatgggcgccccaaatgcctggagcaccatcatcgtgcccggcatgaaggatgctgtgatccacgccctgcagaccagccaggacacagtgcagtgcaggaaggccagctttgagctgtatggagctgactttgtgtttggagaggacttccagccctggctgattgagatcaatgccagccccaccatggcccccagcacagctgtgacagcccggctgtgtgccggcgtgcaggccgacaccctgcgggtggtgattgacaggatgctggacaggaactgtgacacaggagcctttgagctgatctacaagcagcctgtgaccaccagccctgccagcaccccccggcccagctgcctgctgcccatgtacagcgacacccgggcccggagcagtgatgacagcacagcctcctggtgggccctgcggccctgccggccccaggcccggccctag

SEQ ID NO: 20257 - DNA, 579 bp, synthetic construct
  source 1..579: mol_type = other DNA; note = Synthetic coding sequence
atgggcaagggctgcaaggtggtggtgtgtggcctgctgtctgtgggcaagacagccatcctggagcagctgctgtatggcaaccacaccatcggcatggaggactgtgagaccatggaggatgtgtacatggcctctgtggagacagaccggggcgtgaaggagcagctgcacctgtatgacacccggggcctgcaggagggcgtggagctgcccaagcactacttctcctttgctgatggctttgtgctggtgtacagcgtgaacaacctggagagcttccagagggtggagctgctgaagaaggagattgacaagttcaaggacaagaaggaggtggccatcgtggtgctgggcaacaagattgacctgtctgagcagaggcaggtggatgctgaggtggcccagcagtgggccaagtctgagaaggtgcggctgtgggaggtgacagtgacagacaggaagaccctcatcgagcccttcaccctgctggccagcaagctgagccagccccagagcaagagcagcttccccctgcccggcaggaagaacaagggcaacagcaacagtgaaaattag

SEQ ID NO: 20258 - DNA, 1419 bp, synthetic construct
  source 1..1419: mol_type = other DNA; note = Synthetic coding sequence
atgagcagaagagtggtgcggcagagcaagttcagacatgtgtttggccaggccgccaaggctgaccaggcctatgaggacatccgggtgtccaaggtgacctgggacagcagcttctgtgctgtgaaccccaagttcctggccatcatcgtggaggccggcggcggcggggccttcatcgtgctgcccctggccaagacaggccgggtggacaagaactaccccctggtgacaggccacacagcccctgtgctggacatcgactggtgcccccacaatgacaacgtgattgccagcgccagtgatgacaccaccatcatggtgtggcagatcccagactacacccccatgaggaacatcacagagcccatcatcaccctggagggccacagcaagagggtgggcatcctgtcctggcaccccacagccagaaatgtgctgctgtctgctggaggagacaacgtcatcatcatctggaatgtgggcactggagaggtgctgctgagcctggatgacatgcacccagatgtgatccacagcgtgtgctggaacagcaatggcagcctgctggccaccacctgcaaggacaagaccctgcgcatcatcgaccccaggaagggccaggtggtggccgagagatttgctgcccacgagggcatgaggcccatgagagctgtgttcacccggcagggccacatcttcaccaccggcttcaccaggatgagccagcgggagctgggcctgtgggaccccaacaactttgaggagcctgtggccctgcaggagatggacaccagcaatggagtgctgctgcccttctatgaccctgacagcagcatcgtgtacctgtgtgggaagggggacagcagcatccgctactttgagatcacagatgagcccccatttgtgcactacctgaacaccttcagcagcaaggagccccagaggggcatgggcttcatgcccaagaggggcctggatgtgtccaaatgtgaaattgcccgcttctacaagctgcacgagaggaaatgtgagcccatcatcatgacagtgcccaggaagagtgacctcttccaggatgacctgtacccagacaccccaggccctgagcccgccctggaggctgatgagtggctgagcggccaggatgctgagcctgtgctgatcagcctgagagatggctacgtgccccccaagcaccgggagctgcgggtgaccaagaggaacatcctggatgtgcggcccccatctggcccccggcgcagccagagcgccagtgatgcccccctgagccagcagcacaccctggagaccctgctggaggagatcaaggccctgcgggagcgggtgcaggcccaggagcagaggatcacagccctggagaacatgctgtgtgagctggtggatggaacagactag

SEQ ID NO: 20259 - DNA, 2628 bp, synthetic construct
  source 1..2628: mol_type = other DNA; note = Synthetic coding sequence
atgggagacagtgatgatgaatatgacagaagaagaagagacaagttcagaagagagaggagtgactatgacaggagccgggagagagatgagaggagaagaggagatgactggaatgaccgggagtgggaccggggccgggagaggaggagcagaggagagtacagagattatgacaggaacagaagagagcgcttcagcccccccaggcatgagctgagccccccccagaagaggatgagaagagactgggatgagcacagcagtgacccctaccacagcggctatgagatgccctatgccggcggcggcggcggccccacctacggccccccccagccctggggccacccagatgtgcacatcatgcagcaccacgtgctgcccatccaggcccggctgggcagcattgctgagattgacctgggcgtgcccccacctgtgatgaagaccttcaaggagttcctgctgagcctggatgacagcgtggatgaaacagaggccgtgaagcgctacaatgactacaagctggacttccggcggcagcagatgcaggacttcttcctggcccacaaggatgaggagtggttccgcagcaagtaccacccagatgaggtgggcaagaggcggcaggaggcccggggggccctgcagaaccggctgcgggtcttcctgagcctgatggagaccggctggtttgacaacctgctgctggacatcgacaaggcagatgccatcgtgaagatgctggatgctgctgtgatcaagatggagggcggcacagaaaatgacctgcgcatcctggagcaggaggaggaggaggagcaggccggcaagccaggagagcccagcaagaaggaggagggccgggccggggccggcctgggagatggagagaggaagaccaatgacaaggatgagaagaaggaggatggcaagcaggccgagaatgacagcagcaatgatgacaagaccaagaagtcagaaggagatggagacaaggaggagaagaaggaggacagcgagaaggaggccaagaagagcagcaagaagaggaacaggaagcacagcggagatgacagctttgatgagggctctgtgtctgagagcgagagcgagagcgagagcggccaggccgaggaggagaaggaggaggccgaggccctgaaggagaaggagaagcccaaggaggaggagtgggagaagcccaaggatgctgctggcctggagtgcaagccccggcccctgcacaagacctgcagcctcttcatgagaaatattgcccccaacatcagcagagctgagatcatcagcctgtgcaagcgctacccaggcttcatgagggtggccctgtctgagccccagcctgagcggcgcttcttccggcggggctgggtgacctttgacagatctgtgaacatcaaggagatctgctggaacctgcagaacatccggctgcgggagtgtgagctgagccctggggtgaacagagacctgaccaggagagtgaggaacatcaatggcatcacccagcacaagcagatcgtgagaaatgacatcaagctggccgccaagctgatccacaccctggatgacaggacccagctgtgggccagcgagcccggcaccccacccctgcccaccagcctgcccagccagaaccccatcctgaagaacatcacagactacctgattgaggaggtgtctgctgaggaggaggagctgctgggcagcagtggaggagcccctcctgaggagccccccaaggagggcaacccagctgagatcaacgtggagagagatgagaagctgatcaaggtgctggacaagctgctgctgtacctgagaattgtgcacagcctggactactacaacacctgtgagtacccaaatgaagatgagatgcccaacagatgtggcatcatccacgtgcggggccccatgccacccaaccgcatcagccatggagaggtgctggagtggcagaagacctttgaggagaagctgacccccctgctgtctgtgcgggagagcctgtctgaggaggaggcccagaagatgggcaggaaggaccctgagcaggaggtggagaagtttgtgaccagcaacacccaggagctgggcaaggacaagtggctgtgccccctgagcggcaagaagttcaagggccctgagtttgtgaggaagcacatcttcaacaagcacgccgagaagattgaggaggtgaagaaggaggtggccttcttcaacaacttcctgacagatgccaagaggcctgccctgcctgagatcaagccagcccagcccccaggccctgcccagatcctgcccccaggcctgaccccaggcctgccctacccccaccagaccccccagggcctgatgccctacggccagccccggccccccatcctgggctatggagctggagctgtgcggcctgctgtgcccaccggcggccccccctacccccacgccccctacggggccggccggggcaactatgatgccttccggggccagggcggctacccaggcaagcccaggaacaggatggtgcggggggacccccgggccatcgtggagtacagagacctggatgccccagatgatgtggacttcttctag

SEQ ID NO: 20260 - DNA, 816 bp, synthetic construct
  source 1..816: mol_type = other DNA; note = Synthetic coding sequence
atggctgctgtggagaagaggcggcaggccgtgcccccacctgctggcttcacagacagcggccggcagagcgtgtccagagctgctggagctgctgagagcgaggaggacttcctgcggcaggtgggcgtgacagagatgctgcgggccgccctgctgaaggtgctggaggcccggcctgaggagcccatcgccttcctggcccactactttgagaacatgggcctgcggagccctgtgaatggaggagctggggagcccccaggccagctgctgctgcagcagcagaggctgggccgggccctgtggcacctgcggctggcccaccacagccagagagctgccttcaacaacaacgtgtctgtggcctatgaatgtctgtctgctgggggccgcaggaagaggcctggcctggatggccgcacctacagcgagctgctgcggcgcatctgcagagatggccaggcccctgaggaggtggtggcccccctgctgaggaaggtgcagtgccgggaccatgaagctgtgcccctgtctgtgttccgggccggcaccctgacctgctttgtgctgctggagtttgtggcccgggccggggccctcttccagctgctggaggacagcgctgctgctgtggccgacagaagagtgggccaggccgtgctggacaccctggagggcgccctgcaggccagtgatgctgctgccccagcccgcttcctggaggccggcagccggctggcccccatgacccgggaggagttcctggagagagctgctgccctcttcatcgccaaggtgaagcctgtgggctag

SEQ ID NO: 20261 - DNA, 1977 bp, synthetic construct
  source 1..1977: mol_type = other DNA; note = Synthetic coding sequence
atgggcggccacctgagcccctggcccacctacaccagcggccagaccatcctgcagaacaggaagccctgcagtgatgactacaggaagagggtgggcagctgccagcagcaccccttcagaacagccaagccccagtacctggaggagctggagaactacctgaggaaggagctgctgctgctggacctgggcacagacagcacccaggagctgcggctgcagccctaccgggagatctttgagttcttcatcgaggacttcaagacctacaagcccctgctgagcagcatcaagaatgcctatgagggcatgctggcccaccagcgggagaagatccgggccctggagcccctgaaggccaagctggtgacagtgaatgaagactgcaatgaaagaatcctggccatgagagctgaggagaagtatgagatcagcctgctgaagaaggagaagatgaacctgctgaagctgattgacaagaagaatgaggagaagatcagcctgcagagcgaggtgaccaagctgaggaagaacctggccgaggagtacctgcactacctgtctgaaagagatgcctgcaagatcctgattgctgacctgaatgagctgcgctaccagcgggaggacatgagcctggcccagagccctggcatctggggcgaggaccctgtgaagctgaccctggccctgaagatgacccggcaggacctgaccaggacccagatggagctgaacaacatgaaggccaactttggagatgtggtgccccggcgggactttgagatgcaggagaagaccaacaaggacctgcaggagcagctggacaccctgcgggccagctatgaggaggtgaggaaggagcacgagatcctgatgcagctgcacatgagcaccctgaaggagcgggaccagttcttcagcgagctgcaggagatccagaggaccagcacccccaggccagactggaccaagtgcaaggatgtggtggccggcggccctgagcgctggcagatgctggccgagggcaagaacagcgaccagctggtggatgtgctgctggaggagatcggcagcggcctgctgcgggagaaggacttcttccctggcctgggctatggagaggccatcccagccttcctgcgctttgatggcctggtggagaacaagaagcccagcaagaaggatgtggtgaacctgctgaaggatgcctggaaggagcggctggccgaggagcagaaggagaccttcccagacttcttcttcaacttcctggagcacagatttggccccagtgatgccatggcctgggcctacaccatctttgagaacatcaagatcttccacagcaatgaggtgatgagccagttctatgctgtgctgatgggcaagagaagtgaaaatgtgtatgtgacccagaaggagaccgtggcccagctgctgaaggagatgaccaatgctgacagccagaatgaaggcctgctgaccatggagcagttcaacacagtgctgaagagcaccttccccctgaagacagaggagcagatccaggagctgatggaggccggcggctggcaccccagcagcagcaatgctgacctgctgaactaccgcagcctcttcatggaggatgaggagggccagagcgagccctttgtgcagaagctgtgggagcagtacatggatgagaaggatgagtacctgcagcagctgaagcaggagctgggcatcgagctgcacgaggaggtgaccctgcccaagctgcggggcggcctgatgaccatcgaccccagcctggacaagcagacagtgaacacctacatgagccaggccttccagctgcctgagagcgagatgcctgaggagggagatgagaaggaggaggccgtggtggagatcctgcagacagccctggagcggctgcaggtgattgacatcagaagagtgggcccccgggagcctgagcccgccagctag

SEQ ID NO: 20262 - DNA, 1287 bp, synthetic construct
  source 1..1287: mol_type = other DNA; note = Synthetic coding sequence
atggagcccctgaaggtggagaagtttgccacagccaagagaggaaatggcctgcgggctgtgacccccctgcggcctggagagctgctcttcagaagtgaccccctggcctacacagtgtgcaagggcagccggggcgtggtgtgtgaccgctgcctgctgggcaaggagaagctgatgcgctgcagccagtgccgggtggccaagtactgcagcgccaagtgccagaagaaggcctggccagaccacaagcgggagtgcaagtgcctgaagagctgcaagccccgctaccccccagattctgtgcggctgctgggccgggtggtgttcaagctgatggatggagcccccagcgagagcgagaagctgtacagcttctatgacctggagagcaacatcaacaagctgacagaggacaagaaggagggcctgcggcagctggtgatgaccttccagcacttcatgagggaggagatccaggatgccagccagctgcccccagcctttgacctgtttgaggcctttgccaaggtgatctgcaacagcttcaccatctgcaatgctgagatgcaggaggtgggcgtgggcctgtaccccagcatcagcctgctgaaccacagctgtgaccccaactgcagcatcgtgttcaacggcccccacctgctgctgcgggctgtgcgggacatcgaggtgggggaggagctgaccatctgctacctggacatgctgatgaccagcgaggagaggaggaagcagctgcgggaccagtactgctttgaatgtgactgcttccgctgccagacccaggacaaggatgctgacatgctgactggagatgagcaggtgtggaaggaggtgcaggagagcctgaagaagattgaggagctgaaggcccactggaagtgggagcaggtgctggccatgtgccaggccatcatcagcagcaacagcgagcggctgcctgacatcaacatctaccagctgaaggtgctggactgtgccatggatgcctgcatcaacctgggcctgctggaggaggccctcttctacggcaccaggaccatggagccctaccgcatcttcttccctggcagccaccctgtgcggggcgtgcaggtgatgaaggtgggcaagctgcagctgcaccagggcatgttcccccaggccatgaagaacctgcggctggcctttgacatcatgagggtgacccacggccgggagcacagcctgattgaggacctgatcctgctgctggaggagtgtgatgccaacatccgggccagctag

SEQ ID NO: 20263 - DNA, 1122 bp, synthetic construct
  source 1..1122: mol_type = other DNA; note = Synthetic coding sequence
atgagcagcggcaactaccagcagagcgaggccctgagcaagcccaccttcagcgaggagcaggccagcgccctggtggagagcgtgtttggcctgaaggtgtccaaggtgcggcccctgcccagctatgatgaccagaacttccacgtgtatgtgtccaagaccaaggatggccccacagaatatgtgctgaagatcagcaacaccaaggccagcaagaacccagacctgattgaggtgcagaaccacatcatcatgttcctgaaggctgctggcttccccacagcctctgtgtgccacaccaagggggacaacacagccagcctggtgtctgtggacagcggcagcgagatcaagagctacctggtgcggctgctgacctacctgcccggccggcccatcgccgagctgcctgtgagcccccagctgctgtatgaaattggcaagctggccgccaagctggacaagaccctgcagcgcttccaccaccccaagctgagcagcctgcaccgggagaacttcatctggaacctgaagaatgtgcccctgctggagaagtacctgtatgccctgggccagaacagaaaccgggagatcgtggagcacgtgatccacctgttcaaggaggaggtgatgaccaagctgagccacttccgggagtgcatcaaccacggggacctgaatgaccacaacatcctgattgagagcagcaagagcgccagcggaaatgctgagtaccaggtgtctggcatcctggactttggagacatgtcctatggctactacgtgtttgaggtggccatcaccatcatgtacatgatgattgagagcaagagccccatccaggtgggcggccacgtgctggccggctttgagagcatcacccccctgacagctgtggagaagggggccctcttcctgctggtgtgcagccgcttctgccagagcctggtgatggccgcctacagctgccagctgtacccagagaacaaggactacctgatggtgacagccaagacaggctggaagcacctgcagcagatgtttgacatgggccagaaggctgtggaggagatctggtttgaaacagccaagagctatgaaagtggcatctccatgtag

SEQ ID NO: 20264 - DNA, 2766 bp, synthetic construct
  source 1..2766: mol_type = other DNA; note = Synthetic coding sequence
atggccctgctgtgtggcctgggccaggtgaccctgcgcatctgggtgtccctgcccagccagagtgaaaatggcatcggcagcggcggcatggaggccctgaccacccagctgggccctggccgggagggcagcagcagccccaacagcaagcaggagctgcagccctacagcggcagcagcgccctgaagcccaaccaggtgggggagaccagcctgtatggagtgcccatcgtgtccctggtgattgatggccaggagcggctgtgcctggcccagatcagcaacaccctgctgaagaactacagctacaatgagatccacaacagaagagtggccctgggcatcacctgtgtgcagtgcacccctgtgcagctggagatcctgcggcgggccggggccatgcccatcagcagccgccgctgtggcatgatcaccaagcgggaggccgagcggctgtgcaagagcttcctgggggagcacaagccacccaagctgcctgagaactttgcctttgatgtggtgcatgaatgtgcctggggcagccggggcagcttcatcccagcccgctacaacagcagccgggccaagtgcatcaagtgtggctactgcagcatgtacttcagccccaacaagttcatcttccacagccacaggaccccagatgccaagtacacccagccagatgctgccaacttcaacagctggaggaggcacctgaagctgagtgacaagagcgccacagatgagctgagccacgcctgggaggatgtgaaggccatgtttaatggaggcacccgctgtggggctgagatggcccctggccccccaccccacaagagcctgcgctgtggggaggatgaagctgctggccccccaggccccccaccaccccacccccagaggggcctgggcctggccaccggggccagcggccctgctggccctgggggccctgggggcggggccggcgtgcgcagctaccctgtgattcctgtgcccagcaagggcttcggcctgctgcagaagctgcccccacccctcttcccccacccctacggcttccccacagccttcggcctgtgccccaagaaggatgatcctgtgctgggcgctggggagcccaagggcggccctggcactggaagtggcggcggcggggccggcaccggcggcggggccggcggccctggggccagccacctgcccccaggggccggggccggccctgggggcggggccatgttctggggccaccagcccagcggggccgccaaggatgctgctgctgtggccgctgctgctgctgctgccaccgtgtaccccaccttccccatgttctggccagctgctggcagcctgcctgtgcccagctacccagctgcccagagccaggccaaggctgtggccgctgctgtggccgctgctgctgctgctgctgctgctgctgctggcagcggggcccctgagcccctggatggagctgagcccgccaaggagagcggcctgggcgctgaggagcgctgccccagcgccctgagccggggccccctggatgaagatggaacagatgaggccctgcccccacccctggcccccctgcccccacctcctcctcctccagccaggaagggcagctatgtgtctgccttccggcctgtggtgaaggacacagagagcatcgccaagctgtatggcagcgcccgggaggcctacggggccggccctgcccggggccctggccctggggccggcagcggcggctacgtgtccccagacttcctgtctgagggcagcagcagctacaacagcgccagcccagatgtggacacagcagatgagcctgaggtggatgtggagagcaaccgcttcccagatgatgaagatgcccaggaggagacagagcccagcgcccccagcgctgggggcggcccagatggagagcagcccactggacctccttctgccaccagcagtggagcagatggccctgccaacagcccagatggcggcagcccccggccccggcggcggctgggccccccacctgctggccgcccagcctttggagacctggccgctgaggacctggtgagaagacctgagaggagccccccatctgggggcggcggctatgagctgcgggagccctgtggccccctgggcggccctgccccagccaaggtgtttgcccctgagagagatgaacatgtgaagtctgctgctgtggccctgggccctgctgccagctatgtgtgcaccccagaggcccacgagccagacaaggaggacaaccacagccctgcagatgacctggagaccaggaagagctacccagaccagaggagcatcagccagcccagccctgccaacacagacagaggagaagatggcctgaccctggatgtgacaggcacccacctggtggagaaggacatcgagaacctggcccgggaggagctgcagaagctgctgctggagcagatggagctgaggaagaagctggagcgggagttccagagcctgaaggacaacttccaggaccagatgaagcgggagctggcctaccgggaggagatggtgcagcagctgcagatcgtgcgggacaccctgtgcaatgagctggaccaggagaggaaggcccgctatgccatccagcagaagctgaaggaggcccatgatgccctgcaccacttcagctgcaagatgctgacccccaggcactgcaccggcaactgcagcttcaagccacccctgctgccctag

SEQ ID NO: 20265 - DNA, 1395 bp, synthetic construct
  source 1..1395: mol_type = other DNA; note = Synthetic coding sequence
atggccatgacagctggcaccaccaccaccttccccatgagcaaccacacccgggagcgggtgacagtggccaagctgaccctggagaacttctacagcaacctgatcctgcagcacgaggagcgggagacccggcagaagaagctggaggtggccatggaggaggagggcctggctgatgaggagaagaagctgcggcgcagccagcacgccaggaaggagacagagttcctgcggctgaagaggacccggctgggcctggatgactttgagagcctgaaggtgattggccgcggggcctttggagaggtgcggctggtgcagaagaaggacaccggccacatctatgccatgaagatcctgaggaagagtgacatgctggagaaggagcaggtggcccacatccgggcagagcgggacatcctggtggaggctgatggagcctgggtggtgaagatgttctacagcttccaggacaagaggaacctgtacctgatcatggagttcctgcctggaggagacatgatgaccctgctgatgaagaaggacaccctgacagaggaggagacccagttctacatcagcgagaccgtgctggccattgatgccatccaccagctgggcttcatccaccgggacatcaagccagacaacctgctgctggatgccaagggccacgtgaagctgagtgactttggcctgtgcaccggcctgaagaaggcccacaggacagagttctacagaaacctgacccacaacccccccagcgacttctccttccagaacatgaacagcaagaggaaggccgagacctggaagaagaacagacggcagctggcctacagcacagtgggcaccccagactacatcgcccctgaggtgttcatgcagacaggctacaacaagctgtgtgactggtggagcctgggcgtcatcatgtatgagatgctgattggctacccacccttctgcagcgagaccccccaggagacctacaggaaggtgatgaactggaaggagaccctggtgtttcctcctgaggtgcccatcagcgagaaggccaaggacctgatcctgcgcttctgcattgattctgagaacagaattggcaacagcggcgtggaggagatcaagggccaccccttctttgaaggagtggactgggagcacatccgggagaggcctgctgccatccccatcgagatcaagagcattgatgacaccagcaactttgatgacttccctgagagtgacatcctgcagcctgtgcccaacaccacagagccagactacaagagcaaggactgggtgttcctgaactacacctacaagagatttgagggcctgacccagaggggcagcatccccacctacatgaaggccggcaagctgtag

SEQ ID NO: 20266 - DNA, 3951 bp, synthetic construct
  source 1..3951: mol_type = other DNA; note = Synthetic coding sequence
atggccagcaagggggccggcatgtccttcagcaggaagagctaccgcctgaccagtgatgctgagaagagccgggtgactggaattgtgcaggagaagctgctgaatgactacctgaaccgcatcttcagcagcagcgagcacgcccccccagctgccaccagcaggaagcccctgaacttccagaacctgcctgagcacctggaccagctgctgcaggtggacaatgaggaggaggagagccagggccaggtggagggccgcctgggccccagcacagtggtgctggaccacactggaggctttgagggcctgctgctggtggatgatgacctgctgggcgtcatcggccacagcaactttggcaccatccgcagcaccacctgtgtgtacaagggcaagtggctgtatgaggtgctgatcagcagccagggcctgatgcagatcggctggtgcaccatcagctgccgcttcaaccaggaggagggcgtgggggacacccacaacagctatgcctatgatggcaacagagtgaggaagtggaatgtgaccaccaccaactacggcaaggcctgggccgccggggacatcgtgtcctgcctgattgacctggatgatggcaccctgtccttctgcctgaatggagtgtccctgggcacagcctttgagaacctgagccggggcctgggcatggcctacttccctgccatcagcctgtccttcaaggagagcgtggccttcaactttggcagccggcccctgcgctaccctgtggccggctaccggcccctgcaggaccccccatctgctgacctggtgcgggcccagaggctgctgggctgcttccgggctgtgctgtctgtggagctggaccctgtggagggccgcctgctggacaaggagagcagcaagtggaggctgcggggccagcccaccgtgctgctgaccctggcccacatcttccaccactttgcccccctgctgaggaaggtgtacctggtggaggccgtgctgatgtccttcctgctgggcatcgtggagaagggcacccccacccaggcccagagcgtggtgcaccaggtgctggacctgctgtggctgttcatggaggactatgaggtgcaggactgcctgaagcagctgatgatgagcctgctgcggctgtaccgcttcagccccatcgtgcctgacctgggcctgcagatccactacctgcggctgaccatcgccatcctgcggcatgagaagagcaggaagttcctgctgagcaatgtgctgtttgatgtgctgcggtctgtggtgttcttctacatcaagagccccctgcgggtggaggaggccggcctgcaggagctgatccccaccacctggtggccccactgcagcagccgggagggcaaggagagcacagagatgaaggaggagacagctgaggagcggctgcggcggcgggcctatgaaagaggctgccagaggctgaggaagagaattgaggtggtggaggagctgcaggtgcagatcctgaagctgctgctggacaacaaggatgacaatggaggagaggccagccgctacatcttcctgaccaagttcaggaagttcctgcaggagaatgccagcggccggggcaacatgcccatgctgtgccccccagagtacatggtgtgcttcctgcacaggctcatcagcgccctgcgctactactgggatgagtacaaggccagcaacccccacgccagcttcagcgaggaggcctacatccccccccaggtgttctacaacgggaaggtggactactttgacctgcagaggctgggcggcctgctgagccacctgaggaagaccctgaaggatgacctggccagcaaggccaacatcgtcatcgaccccctggagctgcagagcacagccatggatgacctggatgaagatgaggagcccgccccagccatggcccagaggcccatgcaggccctggccgtgggcggccccctgcccctgccccggcccggctggctgagcagccccaccctgggccgggccaaccgcttcctgagcacagctgctgtgtccctgatgaccccccggcggcccctgagcaccagcgagaaggtgaaggtgaggaccctgtctgtggagcagaggacccgggaggacatcgagggcagccactggaatgaaggcctgctgctgggccggcccccagaggagcctgagcagcccctgacagagaacagcctgctggaggtgctggatggagctgtgatgatgtacaacctgtctgtgcaccagcagctgggcaagatggtgggcgtgtctgatgatgtgaatgaatatgccatggccctgcgggacacagaggacaagctgcggcgctgccccaagaggaggaaggacatcctggccgagctgaccaagagccagaaggtgttcagcgagaagctggaccacctgagccggcggctggcctgggtgcacgccaccgtgtacagccaggagaagatgctggacatctactggctgctgcgggtgtgcctgcggaccattgaacatggagacagaacaggcagcctgtttgccttcatgcctgagttctacctgtctgtggccatcaacagctacagcgccctgaagaactactttggacctgtgcacagcatggaggagctgcccggctatgaggagaccctgacccggctggccgccatcctggccaagcactttgctgatgccagaattgtgggcacagacatccgggacagcctgatgcaggccctggccagctatgtgtgctacccccacagcctgcgggctgtggagcgcatccctgaggagcagagaattgccatggtgaggaacctgctggccccctatgagcagaggccctgggcccagaccaactggatcctggtgcggctgtggaggggctgcggcttcggctaccgctacacccggctgccccacctgctgaagaccaagctggaggatgccaacctgcccagcctgcagaagccctgccccagcaccctgctgcagcagcacatggctgacctgctgcagcagggcccagatgtggcccccagcttcctgaacagcgtgctgaaccagctgaactgggccttcagcgagttcatcggcatgatccaggagatccagcaggccgctgagcggctggagaggaactttgtggacagccggcagctgaaggtgtgtgccacctgctttgacctgtctgtgtccctgctgcgggtgctggagatgaccatcaccctggtgcctgagatcttcctggactggacccggcccaccagcgagatgctgctgcggcggctggcccagctgctgaaccaggtgctgaacagagtgacagctgagaggaacctgtttgacagagtggtgaccctgcggctgcccggcctggagagcgtggaccactaccccatcctggtggccgtgacaggcatcctggtgcagctgctggtgcggggccctgccagcgagcgggagcaggccacctctgtgctgctggccgacccctgcttccagctgcggagcatctgctacctgctgggccagcctgagcccccagcccctggaacagccctgcctgccccagacaggaagcgcttcagcctgcagagctatgctgactacatctctgcagatgagctggcccaggtggagcagatgctggcccacctgaccagcgccagcgcccaggccgctgctgccagcctgcccaccagcgaggaggacctgtgccccatctgctacgcccaccccatctctgctgtgttccagccctgtggccacaagagctgcaaggcctgcatcaaccagcacctgatgaacaacaaggactgcttcttctgcaagaccaccaccagcaacctgctggcctgcctgtacccccactggtgggagcccagccacggccccaactgtgcctag

SEQ ID NO: 20267 - DNA, 2043 bp, synthetic construct
  source 1..2043: mol_type = other DNA; note = Synthetic coding sequence
atgcccagcgtgtccaaggctgctgctgctgccctgagcggcagccccccccagacagagaagcccacccactaccgctacctgaaggagttcagaacagagcagtgccccctcttcagccagcacaagtgtgcccagcaccggcccttcacctgcttccactggcacttcctgaaccagaggagaagaagacccctgcggaggagagatggcaccttcaactacagcccagatgtgtactgcagcaagtacaatgaggccaccggggtgtgcccagatggagatgagtgcccctacctgcacaggaccaccggggacacagagaggaagtaccacctgcgctactacaagacaggcacctgcatccatgaaacagatgcccggggccactgtgtgaagaatggcctgcactgtgcctttgcccacggccccctggacctgcggccccctgtgtgtgatgtgcgggagctgcaggcccaggaggccctgcagaatggccagctgggcggcggggagggcgtgcctgacctgcagcccggggtgctggccagccaggccatgattgagaagatcctgtctgaggacccccgctggcaggatgccaactttgtgctgggcagctacaagacagagcagtgccccaagccaccccggctgtgccggcagggctacgcctgcccccactaccacaacagccgggacagaagaagaaacccccggcgcttccagtaccgcagcaccccctgccccagcgtgaagcatggagatgagtggggcgagcccagccgctgtgatggaggagatggctgccagtactgccacagcaggacagagcagcagttccaccctgagagcaccaagtgcaatgacatgaggcagacaggctactgcccccggggccccttctgtgcctttgcccacgtggagaagagcctgggcatggtgaatgagtggggctgccacgacctgcacctgaccagccccagcagcactggaagtggccagcctggaaatgccaagagaagagacagccctgctgagggcggcccccggggcagcgagcaggacagcaagcagaaccacctggccgtgtttgctgctgtgcaccccccagcccccagcgtgagcagctctgtggccagcagcctggccagcagcgctggcagcggcagcagcagccccacagccctgcctgcccccccagcccgggccctgcccctgggccctgccagcagcacagtggaggccgtgctgggcagcgccctggacctgcacctgagcaatgtgaacatcgccagcctggagaaggacctggaggagcaggacggccatgacctgggcgctgctggccccaggagcctggccggcagcgcccctgtggccatccctggcagcctgccccgggcccccagcctgcacagccccagcagcgccagcaccagccccctgggcagcctgagccagcccctgcccggccctgtgggcagcagcgccatgaccccaccccagcagcccccacccctgcggtctgagcccggcaccctgggcagcgctgccagcagctacagccccctgggcctgaatggagtgcccggcagcatctgggactttgtgtctggcagcttcagccccagccccagccccatcctgtctgctggcccccccagcagcagcagcgccagccccaatggagctgagctggcccgggtgcggcggcagctggatgaggccaagaggaagatccggcagtgggaggagagctggcagcaggtgaagcaggtgtgtgatgcctggcagcgggaggcccaggaggccaaggagcgggcccgggtggccgacagcgaccggcagctggccctgcagaagaaggaggaggtggaggcccaggtgatcttccagctgcgggccaagcagtgtgtggcctgccgggagcgggcccatggagctgtgctgcggccctgccagcaccacatcctgtgtgagccctgtgccgccacagccccagaatgtccctactgcaagggccagcccctgcagtggtag

SEQ ID NO: 20268 - DNA, 462 bp, synthetic construct
  source 1..462: mol_type = other DNA; note = Synthetic coding sequence
atgagcagccccctggccagcctgagcaagaccaggaaggtgcccctgcccagcgagcccatgaaccctggaagaagaggcatccgcatctatggagatgtgcctgccagccatgacagcgagctgatggccttcatgaccaggaagctgtgggacctggagcagcaggtgaaggcccagacagatgagatcctgagcaaggaccagaagattgctgccctggaggacctggtgcagaccctgcggccccaccctgctgaggccaccctgcagaggcaggaggagctggagaccatgtgtgtgcagctgcagaggcaggtgcgggagatggagcgcttcctgagtgactatggcctgcagtgggtgggggagcccatggaccaggaggacagcgagagcaagacagtgtctgaacatggagagcgggactggatgacagccaagaagttctggaagccctag

SEQ ID NO: 20269 - DNA, 2382 bp, synthetic construct
  source 1..2382: mol_type = other DNA; note = Synthetic coding sequence
atgggccagtgctacaacctggaggatgatgacctggagacagatgtgaacaagctgagcagcaagccaggcctggacaggcctgaggaggagctgatgcagtatgaggtgatgtgcctggagctgagctacagctttgaggagctgcagagcaagctgggagatgacctgaacagcgagaagacccagtatgccaaccaccaccacatcccagctgctgccagcagcaagcagcactgctacagcaaggaccagagcagctgtggccaggagcgggagtatgctgtgcagaccagcctgctgtgccgggtgaagacaggccgcagcacagtgcacctgggcagcaagaagaaccctggggtgaacctgtaccagaatgtgcagagcaacagcctgcggcgggacagcagcgagagcgagatcccagacatccaggccagccccaaggcagatgcctgggatgtggatgccatcttctgccccaggatgtctgccagcttcagcaacagcaccaggacccgggaggtggtgaaggtgattgacaagctgctgcagacccacctgaagagggtgcccttccatgacccctacctgtacatggccaaggcccggaggaccagctctgtggtggacttcaagatgatggccttcccagatgtgtggggccactgccccccacccaccacccagcccatgctggagaggaaatgtggggtgcagaggatccgcatctttgaggacatcagaagactcatccagcccagtgatgtgatcaacaaggtggtgttcagcctggatgagccctggcccctgcaggacaatgccagcaactgcctgcgcttcttcagcaagtttgaaagtggcaacctgaggaaggccatccaggtgcgggagtttgaatatgacctgctggtgaatgctgatgtgaacagcacccagcaccagcagtggttctacttcaaggtgtctggcatgcaggccgccatcccctaccacttcaacatcatcaactgtgagaagcccaacagccagttcaactacggcatgcagcccaccctgtacagcgtgaaggaggccctgctgggcaagcccacctggatcagaactggacatgagatctgctactacaagaaccactaccggcagagcacagctgtggccggcggggccagcggcaagtgctactacaccctgacctttgctgtgaccttcccccacagtgaagatgtgtgctacctggcctaccactacccctacacctacacagccctgatgacccacctggacatcctggagaagtctgtgaacctgaaggaggtgtacttccggcaggatgtgctgtgccagaccctgggcggcaacccctgccccctggtgaccatcacagccatgcctgagagcaacagtgatgagcacctggagcagttccgccaccggccctaccaggtgatcacagcccgggtgcaccctggagagagcaatgcctcctgggtgatgaagggcaccctggagttcctggtgtccagtgaccctgtggcccggctgctgcgggagaacttcatcttcaagatcatccccatgctgaacccagatggagtcatcaatggaaaccaccgctgcagcctgtctggagaggacctgaaccggcagtggctgagccccagcgcccacctgcagcccaccatctaccacgccaagggcctgctgtaccacctgagcagcatcggccgcagccctgtggtgttctgtgacttccacggccacagccagaagaagaatgtgttcctgtatggctgcagcatcaaggagaccctgtggcaggccgcctgcaccgtgggcaccagcaccatcctggaggaggtgaactaccgcaccctgcccaagatcctggacaagctggccccagccttcaccatgagcagctgcagcttcctggtggagaagagccgggccagcacagcccgggtggtggtgtggagggagatgggcgtgagccgcagctacaccatggagagcagctactgcggctgcaaccagggcccctaccagtgcacccagaggctgctggagaggaccaagaatgaaagagcccaccctgtggatggcctgcagggcctgcagtttggcacccgggagctggaggagatgggcgccatgttctgcctgggcctgctgatcctggagctgaagagcgccagctgcagccaccagctgctggcccaggccgccaccctgctgtctgctgaggaggatgccctggaccagcacctgcagaggctgaagagcagcaacttcctgcccaagcacatctggtttgcctaccacttctttgccatcaccaacttcttcaagatgaacctgctgctgcacgtgagcccctag

SEQ ID NO: 20270 - DNA, 153 bp, synthetic construct
  source 1..153: mol_type = other DNA; note = Synthetic coding sequence
atgatgcagaatgtgcacctggcccctgagacagatgaagatgacctgtacagcggctacaatgactacaaccccatctatgacatcgaggagctggagaatgatgctgccttccagcaggccgtgaggaccagccacggccggcggccctag

SEQ ID NO: 20271 - DNA, 1299 bp, synthetic construct
  source 1..1299: mol_type = other DNA; note = Synthetic coding sequence
atgacagctgtgcgggctgctggcttcaccaaggccgccctgcggggcagcgcctttgaccccctgagccagagccggggccctgccagccccctggaggccaagaagaaggacagccctgaggagaagatcaagcagctggagaaggaggtgaatgagctggtggaggagagctgcatcgccaacagctgtggggacctgaagctggccctggagaaggccaaggatgctggcaggaaggagcgggtgctggtgcggcagcgggagcaggtgaccaccccagagaacatcaacctggacctgacctacagcgtgctcttcaacctggccagccagtacagcgtgaatgagatgtatgcagaggccctgaacacctaccaggtgattgtgaagaacaagatgttcagcaatgccggcatcctgaagatgaacatgggcaacatctacctgaagcagaggaactacagcaaggccatcaagttctacaggatggccctggaccaggtgcccagcgtgaacaagcagatgaggatcaagatcatgcagaacatcggcgtgaccttcatccaggccgaccgggagaagatgaagaaggccttccagaagctgatcaccgtgcccctggagattgatgaggacaagtacatcagccccagtgatgacccccacaccaacctggtgacagaggccatcaagaatgaccacctgcggcagatggagcgggagaggaaggccatggccgagaagtacatcatgaccagcgccaagctgattgcccctgtgattgagaccagctttgctgctggctatgactggtgtgtggaggtggtgaaggccagccagtatgtggagctggccaatgacctggagatcaacaaggctgtgacctacctgcggcagaaggactacaaccaggccgtggagatcctgaaggtgctggagaagaaggacagccgggtgaagtctgctgctgccaccaacctgagcgccctgtactacatgggcaaggactttgcccaggccagcagctatgctgacattgctgtgaacagcgaccgctacaacccagctgccctgaccaacaagggcaacacagtgtttgccaatggagactatgagaaggctgctgagttctacaaggaggccctgagaaatgacagcagctgcacagaggccctgtacaacatcggcctgacctatgagaagctgaaccggctggatgaggccctggactgcttcctgaagctgcacgccatcctgagaaattctgctgaggtgctgtaccagatcgccaactag

SEQ ID NO: 20272 - DNA, 387 bp, synthetic construct
  source 1..387: mol_type = other DNA; note = Synthetic coding sequence
atggctgctgctgctgctgagcagcagcagttctacctgctgctgggcaacctgctgagcccagacaacgtggtgaggaagcaggccgaggcccggcagatggctgctgtgctgctgcggcggctgctgagcagcgcctttgatgaggtgtacccagccctgcccagtgatgtgcagacagccatcaagtctgagctgctgatgatcatccagatggagacccagagctccatgaggaagaaggtgtgtgacattgctgctgagctggccaggaacctgattgatgaagatggcaacaaccagtggccagagggcctgaagttcctgtttgacagcgtgagcagccagaatgtgggcctgcgggaggccgccctgcacatcttctag

SEQ ID NO: 20273 - DNA, 2766 bp, synthetic construct
  source 1..2766: mol_type = other DNA; note = Synthetic coding sequence
atgaggcctgagggcgccggcatggagctgggcggcggggaggagcggctgcctgaggagagccggcgggagcactggcagctgctgggcaacctgaagaccaccgtggagggcctggtgtccaccaacagccccaacgtgtggagcaaatatggaggcctggagcggctgtgccgggacatgcagagcatcctgtaccacggcctcatccgggaccaggcctgccggcggcagacagactactggcagtttgtgaaggacatccgctggctgagcccccacagcgccctgcacgtggagaagttcatctctgtgcatgaaaatgaccagagcagcgcagatggagccagcgagagagctgtggccgagctgtggctgcagcacagcctgcagtaccactgcctgagcgcccagctgcggcccctgctgggggaccggcagtacatcaggaagttctacacagatgctgccttcctgctgagtgatgcccacgtgacagccatgctgcagtgcctggaggccgtggagcagaacaacccccggctgctggcccagattgatgcctccatgtttgccaggaagcatgagagccccctgctggtgaccaagagccagagcctgacagccctgcccagcagcacctacaccccacccaacagctatgcccagcacagctacttcggcagcttcagcagcctgcaccagagcgtgcccaacaacggcagcgagcggcgcagcaccagcttccccctgagcggcccccccaggaagccccaggagagccggggccacgtgtccccagctgaggaccagaccatccaggcccctcctgtgtctgtgtctgccctggcccgggacagccccctgaccccaaatgagatgagcagcagcaccctgaccagccccatcgaggcctcctgggtgagcagccagaatgacagccctggagatgccagcgagggccctgagtacctggccatcggcaacctggacccccggggccgcacagccagctgccagagccacagcagcaatgctgagagcagcagcagcaacctcttcagcagcagcagcagccagaagccagacagcgctgccagcagcctgggggaccaggagggcggcggggagagccagctgagctctgtgctgcggcgcagcagcttcagcgagggccagaccctgactgtgaccagcggggccaagaagagccacatccgcagccacagcgacaccagcatcgccagcagaggagcccctgagagctgcaatgacaaggccaagctgcggggccccctgccctacagcggccagagcagcgaggtgtccacccccagcagcctgtacatggagtatgagggcggccgctacctgtgcagcggggagggcatgttccggcggcccagcgagggccagagcctcatctcctacctgtctgagcaggactttggcagctgtgccgacctggagaaggaaaatgcccacttcagcatcagcgagagcctgattgctgccatcgagctgatgaagtgcaacatgatgagccagtgcctggaggaggaggaggtggaggaggaggacagcgaccgggagatccaggagctgaagcagaagatccggctgcggcggcagcagatccgcaccaagaacctgctgcccatgtaccaggaggccgagcacggcagcttccgggtgaccagcagcagcagccagttcagcagccgggacagcgcccagctgagtgacagcggcagcgcagatgaggtggatgaatttgagatccaggacggcagcgagggcagcaacctgacccacatcagcaagaatggcctgtctgtgtccctggcctccatgttcagtgatgctgacatcagaagaaacacagccagcagcagcaagagctttgtgagcagccagagcttcagccactgcttcctgcacagcaccagcgctgaggccgtggccatgggcctgctgaagcagtttgagggcatgcagctgcctgctgccagcgagctggagtggctggtgcctgagcatgatgccccccagaagctgctgcccatcccagacagcctgcccatcagcccagatgatggccagcacgccgacatctacaagctgcgcatccgggtgcggggcaacctggagtgggccccaccccggccccagatcatcttcaacgtgcacccagcccccaccaggaagattgctgtggccaagcagaactaccgctgtgccggctgcggcatcagaacagatcctgactacatcaagaggctgcgctactgtgagtacctgggcaagtacttctgccagtgctgccatgaaaatgcccagatggccatccccagccgggtgctgaggaagtgggacttcagcaagtactacgtgagcaacttcagcaaggacctgctgatcaagatctggaatgaccccctcttcaacgtgcaggacatcaacagcgccctgtacaggaaggtgaagctgctgaaccaggtgcggctgctgcgggtgcagctgtgccacatgaagaacatgttcaagacctgccgcctggccaaggagctgctggacagctttgacacagtgcccggccacctgacagaggacctgcacctgtacagcctgaatgacctgacagccaccaggaaaggagagctgggcccccggctggccgagctgacccgggccggggccacccacgtggagcgctgcatggtgaggaagagccactgcagcatgcagctgagcccctgcttctag

SEQ ID NO: 20274 - DNA, 1644 bp, synthetic construct
  source 1..1644: mol_type = other DNA; note = Synthetic coding sequence
atgagggccctgactgtgcagagggtgaagtttgccatggacctgcccctgctgaagagagctggccaggacctggccgagaagaccaagaactttgtgagccgcagcctggtgattggagaggtgctgtccatggctgacatggccaccggggtgaagtgtggcatcatctactggctgtttggaggagccatccggaacctgggcagccctgagcacgtgaccaagtggttccagcccctgcaggagcagaagtacacaggcatgtttgccatgacagagcggggccacggcagcaatgcccggggcatccagacagaggccacctttgacctgagcgcccaggagtttgtgattgacaccccctgtgaaaatgctgagaagatgtacatcggaaatgccatgtatggcaactatgctgctgtgtttgcccagctgatcattgatggccgcagccagggcccccactgcttcatcgtgcctgtgagagatgaaaatggcagcctgtacccaggagtgacagccatcgacatgatgtacaaggagggcctgcatggagtggacaatggcatcctgatctttgacaaggtgcgcatcccccgggagaacctgctggacaagtttggatctgtggccccagatggccagtaccacagccccatccggaacaagagcgcccgcttcaatgccatgctggccgccctgacccccagccggctggccgtggccttccaggccatgggcgccatgaagctgggcctgaccatcgccatccgctacagccacagccggcggcagtttggccccaagaccaaggaggaggtgaagatcatcgagcaccagacccagaccctgcggctgatgccccacctggccacagccctggccctgacctttgtgagccgctatgctggggccctgctggatgaagatgtgttccagggcaaggagctggtgaacagccgcagcctgcaggccctggtggccggcctgaaggcctacagcacctgggagaacatccgctgcctgcaggactgccgggagtgcaccggcggcatgggctacatgatggagaaccgcatcagcggcctgaagtgtgacacagatgtgtttgccacctttgaaggagatgatgtggtgatgctgcaggtggtgggccgggagctgctggcccagtacaccaagcagtatgaggagaagcccctgtttggcctgctgcagaactgggccgagagcgtgggggacaagctgcggaccagcttcctggccttcaacatggacacagtggatgacctggccttcctgctgaaggctgtgaagttccgggagcgggtgctgcagaggggcctggtggcccgcatctactacaaggtgaagaccaagaaggaggacttcttccacgcctggaacagctgcctgcaccacgtggccagcctgagcctggcccacacccaccgggtgaccctggagcagttcagcctggccgtgaagagctgcccagaccaggaggaccagaccctgctgatgaagttctgcctgctgtatggcaccaagctggtgttccaggagcgggcctggtacctggagcacaagtacctgacccccatggccagcacccgcatccggaaccaggagcgctgctag

SEQ ID NO: 20275 - DNA, 6087 bp, synthetic construct
  source 1..6087: mol_type = other DNA; note = Synthetic coding sequence
atggatgtgacagtgtctgagctgctggagctgttcctgcagagccccctggtgacctgggtgaagaccttcggcccctttggaagtggcagccaggacaacctgaccatgtacatggacctggtggatggcatcttcctgaaccagatcatgctgcagattgacccccggcccaccaaccagaggatcaacaagcacgtgaacaatgatgtgaacctgcgcatccagaacctgaccatcctggtgaggaacatcaagacctactaccaggaggtgctgcagcagctgattgtgatgaacctgcccaacgtgctgatgattggccgggaccccctgagcggcaagtccatggaggagatcaagaaggtgctgctgctggtgctgggctgtgctgtgcagtgtgagaggaaggaggagttcatcgagcgcatcaagcagctggacatcgagacccaggccggcatcgtggcccacatccaggaggtgacccacaaccaggagaatgtgtttgacctgcagtggctggagctgcctgatgtggcccctgaggagctggaggccctgagccgctccatggtgctgcacctgcggcggctgattgaccagagagatgaatgtacagagctgattgtggacctgacccaggagcgggactacctgcaggcccagcacccccccagccccatcaagagcagcagcgctgacagcacccccagccccaccagcagcctgagcagcgaggacaagcagcacctggccgtggagctggccgacaccaaggcccggctgcggcgggtgcggcaggagctggaggacaagacagagcagctggtggacaccaggcatgaggtggaccagctggtgctggagctgcagaaggtgaagcaggagaacatccagctggccgcagatgcccggagcgcccgggcctacagagatgagctggacagcctgcgggagaaggccaacagagtggagcggctggagctggagctgacccgctgcaaggagaagctgcatgatgtggacttctacaaggccaggatggaggagctgcgggaggacaacatcatcctgattgagaccaaggccatgctggaggagcagctgacagctgcccgggcccggggggacaaggtgcatgagctggagaaggagaacctgcagctgaagagcaagctgcatgacctggagctggaccgggacacagacaagaagagaattgaggagctgctggaggagaacatggtgctggagatcgcccagaagcagagcatgaatgaaagtgcccacctgggctgggagctggagcagctgagcaagaatgctgacctgagtgatgccagcaggaagagctttgtgtttgagctgaatgaatgtgccagcagccgcatcctgaagctggagaaggagaaccagagcctgcagagcaccatccagggcctgagagatgccagcctggtgctggaggagagcggcctgaagtgtggggagctggagaaggagaaccaccagctgagcaagaagattgagaagctgcagacccagctggagcgggagaagcagagcaaccaggacctggagaccctgtctgaggagctgatccgggagaaggagcagctgcagagcgacatggagaccctgaaggctgacaaggcccggcagatcaaggacctggagcaggagaaggaccacctgaacagagccatgtggagcctgcgggagaggagccaggtgtcctctgaggccaggatgaaggatgtggagaaggagaacaaggccctgcaccagacagtgacagaggccaacgggaagctgagccagctggagtttgagaagaggcagctgcaccgggacctggagcaggccaaggagaagggggagcgggcagagaagctggagcgggagctgcagaggctgcaggaggagaatggccgcctggccaggaaggtgaccagcctggagacagccacagagaaggtggaggccctggagcacgagagccagggcctgcagctggagaacagaaccctgaggaagagcctggacaccctgcagaatgtgtccctgcagctggagggcctggagcgggacaacaagcagctggatgctgagaacctggagctgcggcggctggtggagaccatgaggttcaccagcaccaagctggcccagatggagcgggagaaccagcagctggagcgggagaaggaggagctgaggaagaatgtggacctgctgaaggccctgggcaagaagtctgagcggctggagctgagctaccagagcgtgtctgctgagaacctgcggctgcagcagagcctggagagcagcagccacaagacccagaccctggagagcgagctgggggagctggaggccgagcggcaggccctgcggcgggacctggaggccctgcggctggccaatgcccagctggagggcgctgagaaggacaggaaggccctggagcaggaggtggcccagctggagaaggacaagaagctgctggagaaggaggccaagaggctgtggcagcaggtggagctgaaggatgctgtgctggatgacagcacagccaagctgtctgctgtggagaaggagagccgggccctggacaaggagctggcccgctgcagagatgctgctgggaagctgaaggagctggagaaggacaacagagacctgaccaagcaggtgacagtgcacgcccggaccctgaccaccctgcgggaggacctggtgctggagaagctgaagagccagcagctgagcagcgagctggacaagctgagccaggagctggagaaggtgggcctgaaccgggagctgctgctgcaggaggatgattctggcagtgacaccaagtacaagatcctggagggcagaaatgaaagtgccctgaagaccaccctggccatgaaggaggagaagatcgtgctgctggaggcccagatggaggagaaggccagcctgaaccggcagctggagagcgagctgcagatgctgaagaaggaatgtgagaccctgcggcagaaccagggcgagggccagcacctgcagaacagcttcaagcaccctgctgggaagacagctgccagccaccagggcaaggaggcctggggccctggccacaaggaggccaccatggagctgctgcgggtgaaggaccgggccatcgagctggagaggaacaatgctgccctgcaggccgagaagcagctgctgaaggagcagctgcagcacctggagacccagaatgtgaccttcagcagccagatcctgaccctgcagaagcagagcgccttcctgcaggagcacaacaccaccctgcagacccagacagccaagctgcaggtggagaacagcaccctgagcagccagagcgctgccctgacagcccagtacaccctgctgcagaaccaccacacagccaaggagacagaaaatgaaagcctgcagaggcagcaggagcagctgacagctgcctatgaggccctgctgcaggaccacgagcacctgggcaccctgcacgagcggcagagcgcagaatatgaggccctgatccggcagcacagctgcctgaagaccctgcacaggaacctggagctggagcacaaggagctgggggagagacatggagacatgctgaagaggaaggccgagctggaggagcgggagaaggtgctgaccacagagcgggaggccctgcagcaggagcagaggaccaatgccctggccatgggagagaaccagaggctgcggggggagctggacagagtgaacttcctgcaccaccagctgaagggggagtatgaggagctgcacgcccacaccaaggagctgaagaccagcctgaacaatgcccagctggagctgaaccgctggcaggccaggtttgatgagctgaaggagcagcaccagaccatggacatcagcctgaccaagctggacaaccactgtgagctgctgagccggctgaagggcaacctggaggaggagaaccaccacctgctgagccagatccagctgctgagccagcagaaccagatgctgctggagcagaacatggagaacaaggagcagtaccacgaggagcagaagcagtacatcgacaagctgaatgccctgcggcggcacaaggagaagctggaggagaagatcatggaccagtacaagttctatgaccccccacccaagaagaagaaccactggattggagccaaggccctggtgaagctgatcaagcccaagaaggagggcagccgggagcggctgaagagcacagtggacagccccccctggcagctggagagcagtgaccctgccagccctgctgccagccagcccctgcggagccaggccgagaacccagacaccccagccctgggcagcaactgtgccgaggagagagatgcccacaatggatctgtgggcaagggccctggggacctgaagcccaagaggggcagcccccaccggggcagcctggacagaacagatgccagcacagacctggccatgaggtcctggcccagcgagctgggcagcaggacctgcagcaccagcgccaccaccacagcccccagcaacagcacccccatcgcccggcaccctggccgcaccaagggctacaacagtgatgacaacctgtgtgagcccagcctggagtttgaggtgcccaaccaccggcagtatgtgtcccggcccagcagcctggagagcagcaggaacaccagcagcaacagcagccccctgaacctgaagggcagcagcgagcagctgcacggccgctctgagagcttcagcagtgaagatctcatccccagccgggacctggccaccctgccccgggaggccagcaccccaggaagaaatgccctgggcagacatgagtaccccctgcccagaaatggccccctgccccaggagggcgcccagaagaggggcacagccccaccctacgtgggcgtgcggccctgcagcgccagccccagcagcgagatggtgaccctggaggagttcctggaggagagcaacagaagcagccccacccatgacacccccagctgcagagatgacctgctgagtgactacttcaggaaggccagtgaccccccagccatcggcggccagcccggccccccagccaagaaggagggcgccaagatgcccaccaactttgtggcccccaccgtgaagatggccgcccccaccagcgagggccggcccctgaagccaggccagtatgtgaagcccaacttccggctgacagaggccgaggcccctccttctgtggccccccggcaggcccagcccccccagagcctgagcctgggccggccccggcaggcccctgtgcccccagccagccacgccccagccagccgcagcgccagcctgagccgggccttcagcctggccagcgctgacctgctgcgggccagcggccctgaggcctgcaagcaggagagcccccagaagctgggcgcccctgaggccctgggcggccgggagaccggcagccacaccctgcagagccctgccccacccagcagccacagcctggcccgggagaggacccccctggtgggcaaggccggcagcagctgccagggccctggccccaggagccggcccctggacacccggcgcttcagcctggccccacccaaggaggagcggctggcccccctgcaccagagcgccacagccccagccatcgccacagctggagctggagctgctgctgctggcagcggcagcaacagccagctgctgcacttctccccagctgctgccccagctgcccggaccaagcccaaggccccacccaggtctggagaggtggccaccatcacccctgtgcgggccggcctgagcctgtctgaaggagatggagtgcccggccagggctgcagcgagggcctgcctgccaagagccctggccgcagcccagacctggccccccacctgggccgggccctggaggactgcagccggggctctgtgtccaagagcagccctgccagccctgagcccggcggggacccccagacagtgtggtatgaatatggctgtgtgtag

SEQ ID NO: 20276 - DNA, 3831 bp, synthetic construct
  source 1..3831: mol_type = other DNA; note = Synthetic coding sequence
atggatgaggtggagcaggaccagcacgaggcccggctgaaggagctgtttgacagctttgacaccactggaacaggcagcctgggccaggaggagctgacagacctgtgccacatgctgagcctggaggaggtggcccctgtgctgcagcagaccctgctgcaggacaacctgctgggccgggtgcactttgaccagttcaaggaggccctgatcctgatcctgagcaggaccctgagcaatgaggagcacttccaggagccagactgcagcctggaggcccagcccaagtatgtgcggggcggcaagagatatggaagaagaagcctgcctgagttccaggagagcgtggaggagttccctgaggtgaccgtcatcgagcccctggatgaggaggcccggcccagccacatcccagctggggactgcagcgagcactggaagacccagaggtctgaggagtatgaagctgagggccagctgcgcttctggaacccagatgacctgaatgccagccagagcggcagcagccccccccaggactggattgaggagaagctgcaggaggtgtgtgaggacctgggcatcaccagagatggccacctgaacaggaagaagctggtgtccatctgtgagcagtatggcctgcagaatgtggatggagagatgctggaggaggtgttccacaacctggaccctgatggcaccatgtctgtggaggacttcttctacggcctcttcaagaatggcaagagcctgacccccagcgccagcaccccctaccggcagctgaagaggcacctgtccatgcagagctttgatgagagcggccgccgcaccaccaccagcagcgccatgaccagcaccatcggcttccgggtcttcagctgcctggatgatggcatgggccacgcctctgtggagcgcatcctggacacctggcaggaggagggcatcgagaacagccaggagatcctgaaggccctggacttcagcctggatggcaacatcaacctgacagagctgaccctggccctggagaatgagctgctggtgaccaagaacagcatccaccaggccgccctggccagcttcaaggccgagatccgccacctgctggagcgggtggaccaggtggtgcgggagaaggagaagctgcggagtgacctggacaaggccgagaagctgaagagcctgatggccagcgaggtggatgaccaccacgccgccattgaaagaagaaatgagtacaacctgaggaagctggatgaggagtacaaggagagaattgctgccctgaagaatgagctgaggaaggagcgggagcagatcctgcagcaggccggcaagcagaggctggagctggagcaggagattgagaaggccaagacagaggagaactacatccgggaccggctggccctgagcctgaaggagaacagccggctggagaatgagctgctggagaatgctgagaagctggccgagtatgagaacctgaccaacaagctgcagaggaacctggagaatgtgctggccgagaagtttggagacctggaccccagcagcgctgagttcttcctgcaggaggagcggctgacccagatgagaaatgaatatgaaaggcagtgccgggtgctgcaggaccaggtggatgagctgcagagcgagctggaggagtaccgggcccagggccgggtgctgcggctgcccctgaagaacagccccagcgaggaggtggaggccaacagcggcggcatcgagcctgagcacggcctgggcagcgaggagtgcaaccccctgaacatgagcattgaagctgagctggtgattgagcagatgaaggagcagcaccaccgggacatctgctgcctgcggctggagctggaggacaaggtgcgccactatgagaagcagctggatgaaacagtggtgtcctgcaagaaggcccaggagaacatgaagcagagacatgaaaatgagacccacaccctggagaagcagatcagtgacctgaagaatgaaattgctgagctgcagggccaggccgctgtgctgaaggaggcccaccacgaggccacctgcagacatgaggaggagaagaagcagctgcaggtgaagctggaggaggagaagacccacctgcaggagaagctgcggctgcagcacgagatggagctgaaggcccggctgacccaggcccaggccagctttgagcgggagcgggagggcctgcagagcagcgcctggacagaggagaaggtgcggggcctgacccaggagctggagcagttccaccaggagcagctgaccagcctggtggagaagcacaccctggagaaggaggagctgaggaaggagctgctggagaagcaccagcgggagctgcaggagggccgctatgaaagtgagaagctgcagcaggagaacagcatcctgagaaatgagatcaccaccctgaatgaagaagattccatcagcaacctgaagctgggcaccctgaatggcagccaggaggagatgtggcagaagacagaaacagtgaagcaggagaatgctgctgtgcagaagatggtggagaacctgaagaagcagatcagcgagctgaagatcaagaaccagcagctggacctggagaacacagagctgagccagaagaacagccagaaccaggagaagctgcaggagctgaaccagaggctgacagagatgctgtgccagaaggagaaggagcccggcaacagcgccctggaggagcgggagcaggagaagttcaacctgaaggaggagctggagcgctgcaaggtgcagagcagcaccctggtgagcagcctggaggccgagctgtctgaggtgaagatccagacccacatcgtgcagcaggagaaccacctgctgaaggatgagctggagaagatgaagcagctgcaccgctgcccagacctgagtgacttccagcagaagatcagctctgtgctgagctacaatgagaagctgctgaaggagaaggaggccctgtctgaggagctgaacagctgtgtggacaagctggccaagagcagcctgctggagcacagaattgccaccatgaagcaggagcagaagtcctgggagcaccagagcgccagcctgaagagccagctggtggccagccaggagaaggtgcagaacctggaggacacagtgcagaatgtgaacctgcagatgagcaggatgaagagtgacctgcgggtgacccagcaggagaaggaggccctgaagcaggaggtgatgagcctgcacaagcagctgcagaatgctgggggcaagtcctgggcccctgagatcgccacccaccccagcggcctgcacaaccagcagaagaggctgtcctgggacaagctggaccacctgatgaatgaggagcagcagctgctgtggcaggagaatgaaaggctgcagaccatggtgcagaacaccaaggccgagctgacccacagccgggagaaggtgcggcagctggagagcaacctgctgcccaagcaccagaagcacctgaaccccagcggcaccatgaaccccacagagcaggagaagctgagcctgaagcgggagtgtgaccagttccagaaggagcagagccctgccaacaggaaggtgtcccagatgaacagcctggagcaggagctggagaccatccacctggagaatgaaggcctgaagaagaagcaggtgaagctggatgagcagctgatggagaacagcgtggtgggcagcagccgggagggctgcagcagcctgcctgagatcgtgtgtgaagatgctgcccctgaggtgcactgtgatgcctag

SEQ ID NO: 20277 - DNA, 2997 bp, synthetic construct
  source 1..2997: mol_type = other DNA; note = Synthetic coding sequence
atgaaggacagcggggacagcaaggaccagcagctgatggtggccctgcgggtgcggcccatctctgtggccgagctggaggagggcgccaccctgattgcccacaaggtggatgagcagatggtggtgctgatggaccccatggaggaccctgatgacatcctgcgggcccacaggagccgggagaagagctacctgtttgatgtggcctttgacttcaccgccacccaggagatggtgtaccaggccaccaccaagagcctgattgaaggagtcatcagcggctacaatgccaccgtgtttgcctacggccccaccggctgtgggaagacctacaccatgctgggcacagaccaggagcccggcatctacgtgcagaccctgaatgacctcttccgggccatcgaggagaccagcaatgacatggagtatgaggtgtccatgagctacctggagatctacaatgagatgatccgggacctgctgaaccccagcctgggctacctggagctgcgggaggacagcaagggcgtcatccaggtggccggcatcacagaggtgtccaccatcaatgccaaggagatcatgcagctgctgatgaagggcaaccggcagaggacccaggagcccacagctgccaaccagaccagcagccgcagccatgctgtgctgcaggtgacagtgcggcagaggagccgggtgaagaacatcctgcaggaggtgcggcagggccgcctcttcatgattgacctggccggcagcgagcgggccagccagacccagaacagaggccagaggatgaaggagggcgcccacatcaacagaagcctgctggccctgggcaactgcatcaatgccctgagtgacaagggcagcaacaagtacatcaactacagagacagcaagctgacccggctgctgaaggacagcctgggcggcaacagcaggacagtgatgattgcccacatcagccctgccagcagcgcctttgaggagagcaggaacaccctgacctacgccggccgggccaagaacatcaagaccagggtgaagcagaacctgctgaatgtgtcctaccacatcgcccagtacaccagcatcatcgctgacctgcggggggagatccagaggctgaagaggaagattgatgagcagacaggccggggccaggcccggggccggcaggacagaggagacatccgccacatccaggccgaggtgcagctgcacagcggccagggcgagaaggccggcatgggccagctgcgggagcagctggccagcgccttccaggagcagatggatgtgagaagaaggctgctggagctggagaacagagccatggaggtgcagattgacaccagccgccacctgctgaccatcgccggctggaagcatgagaagagccggcgggccctgaagtggagggaggagcagaggaaggagtgctacgccaaggatgattctgagaaggacagcgacacaggagatgaccagcctgacatcctggagcccccagaggtggccgccgcccgggagagcattgctgccctggtggatgagcagaagcagctgaggaagcagaagctggccctggagcagcgctgccgggagctgcgggcccggggccggcggctggaggagaccctgccccggcgcatcggcagcgaggagcagcgggaggtgctgagcctgctgtgccgggtgcatgagctggaggtggagaacacagagatgcagagccacgccctgctgagagatggagccctgcggcacagacatgaggccgtgcggcggctggagcagcacaggagcctgtgtgatgagatcatccagggccagaggcagatcattgatgactacaacctggccgtgccccagaggctggaggagctgtatgaggtgtacctgcgggagctggaggagggcagcctggagcaggccaccatcatggaccaggtggccagccgggccctgcaggacagcagcctgcccaagatcaccccagctggcaccagcctgaccccagacagcgacctggagagcgtgaagaccctgagcagtgatgcccagcacctgcagaacagcgccctgccccccctgagcacagaaagtgagggccaccacgtgttcaaggccggcactggagcctggcaggccaagagcagctctgtgcccaccccaccacccatccagctgggcagcctggtgacccaggaggccccagcccaggacagcctgggctcctggatcaacagcagcccagacagcagcgagaacctgtctgagatccccctgagccacaaggagaggaaggagatcctgaccggcaccaagtgcatctgggtgaaggccgcccggcggcgcagccgggccctgggcacagagggccgccacctgctggccccagccacagagaggagcagcctgagcctgcacagcctgtctgaaggagatgatgcccggcccccaggccccctggcctgcaagaggcctcccagccccaccctgcagcacgccgccagcgaggacaacctgagcagcagcactggagaggcccccagcagagctgtgggccaccacggagatggcccccggccctggctgcggggccagaagaagagcctgggcaagaagcgggaggagagcctggaggccaagaggaggaagagaagaagccgcagctttgaggtgacaggccagggcctgagccaccccaagacccacctgctgggcccccaccaggccgagcgcatcagtgaccacaggatgcctgtgtgccgccacccagcccctggcatccgccacctgggcaaggtgaccctgcccctggccaaggtgaagctgccccccagccagaacacaggccctggggacagcagccccctggccgtgccccccaaccctgggggcggcagccggcgggccacccggggcccccggctgccccacggcaccagcacccacggcaaggatggctgcagccgccacaactag

SEQ ID NO: 20278 - DNA, 1194 bp, synthetic construct
  source 1..1194: mol_type = other DNA; note = Synthetic coding sequence
atgacagctgaggagggcgtgcagctgagccagcagaatgccaaggacttcttccgggtgctgaacctgaacaagaagtgtgacaccagcaagcacaaggtgctggtggtgtctgtgtgcccccagagcctgccctactttgctgccaagttcaacctgtctgtgacagatgccagccggcggctgtgtggcttcctgaagagcctgggcgtgcactacgtgtttgacaccaccatcgctgctgacttcagcatcctggagagccagaaggagtttgtgcggcgctaccggcagcacagcgaggaggagaggaccctgcccatgctgaccagcgcctgccccggctgggtgcgctatgcagagcgggtgctgggccggcccatcacagcccacctgtgcacagccaagagcccccagcaggtgatgggcagcctggtgaaggactactttgcccggcagcagaacctgagccctgagaagatcttccacgtgattgtggccccctgctatgacaagaagctggaggccctgcaggagagcctgcccccagccctgcacggcagcagaggagctgactgtgtgctgaccagcggggagatcgcccagatcatggagcagggcgacctgtctgtgagagatgctgctgtggacaccctgtttggagacctgaaggaggacaaggtgaccaggcatgatggagccagcagtgatggccacctggcccacatcttcagacatgctgccaaggagctgttcaatgaagatgtggaggaggtgacctaccgggccctgaggaacaaggacttccaggaggtgaccctggagaagaatggagaggtggtgctgcgctttgctgctgcctacggcttcaggaacatccagaacatgatcctgaagctgaagaagggcaagttccccttccactttgtggaggtgctggcctgtgccggcggctgcctgaatggccggggccaggcccagaccccagatggccatgctgacaaggccctgctgcggcagatggagggcatctatgctgacatccctgtgagaagacctgagagcagcgcccacgtgcaggagctgtaccaggagtggctggagggcatcaacagccccaaggcccgggaggtgctgcacaccacctaccagagccaggagcggggcacccacagcctggacatcaagtggtag

SEQ ID NO: 20279 - DNA, 3603 bp, synthetic construct
  source 1..3603: mol_type = other DNA; note = Synthetic coding sequence
atgaaggtggccggcggcctggagctgggcgccgccgccctgctgagcgccagcccccgggccctggtgaccctgagcacaggccccacctgcagcatcctgcccaagaaccccctcttcccccagaacctgagcagccagccctgcatcaagatggagggggacaagagcctgaccttcagcagctatggcctgcagtggtgcctgtatgagctggacaaggaggagttccagaccttcaaggagctgctgaagaagaagagcagcgagagcaccacctgcagcatcccccagtttgaaattgaaaatgccaacgtggagtgcctggccctgctgctgcacgagtactatggagccagcctggcctgggccaccagcatcagcatctttgagaacatgaacctgcggaccctgtctgagaaggccagagatgacatgaagaggcacagccctgaggaccctgaggccaccatgacagaccagggccccagcaaggagaaggtgcccggcatcagccaggccgtgcagcaggacagcgccacagctgctgagaccaaggagcaggagatcagccaggccatggagcaggagggcgccacagctgctgagacagaggagcaggagatcagccaggccatggagcaggagggcgccacagctgctgagacagaggagcagggccacggcggggacacctgggactacaagagccacgtgatgaccaagtttgctgaggaggaggatgtgcggcgcagctttgagaacacagctgctgactggccagagatgcagaccctggccggggcctttgacagcgaccgctggggcttccggcccaggacagtggtgctgcacggcaagagcggcatcggcaagagcgccctggccaggagaattgtgctgtgctgggcccagggcggcctgtaccagggcatgttctcctatgtgttcttcctgcctgtgcgggagatgcagaggaagaaggagagctctgtgacagagttcatcagccgggagtggccagacagccaggcccctgtgacagagatcatgagcaggcctgagcggctgctcttcatcattgatggctttgatgacctgggctctgtgctgaacaatgacaccaagctgtgcaaggactgggccgagaagcagccccccttcaccctcatccgcagcctgctgaggaaggtgctgctgcctgagagcttcctgattgtgacagtgagagatgtgggcacagagaagctgaagtctgaggtggtgagcccccgctacctgctggtgcggggcatctctggagagcagaggatccacctgctgctggagcggggcatcggggagcaccagaagacccagggcctgcgggccatcatgaacaaccgggagctgctggaccagtgccaggtgcctgctgtgggcagcctcatctgtgtggccctgcagctgcaggatgtggtgggggagagcgtggcccccttcaaccagaccctgaccggcctgcatgctgcctttgtgttccaccagctgaccccccggggcgtggtgcggcgctgcctgaacctggaggagcgggtggtgctgaagcgcttctgcaggatggctgtggagggcgtgtggaacaggaagtctgtgtttgatggagatgacctgatggtgcagggcctgggggagagcgagctgcgggccctcttccacatgaacatcctgctgcctgacagccactgtgaggagtactacaccttcttccacctgagcctgcaggacttctgtgccgccctgtactacgtgctggagggcctggagattgaaccagccctgtgccccctgtatgtggagaagaccaagaggtccatggagctgaagcaggccggcttccacatccacagcctgtggatgaagcgcttcctgtttggcctggtgtctgaagatgtgcggcggcccctggaggtgctgctgggctgccctgtgcccctgggcgtgaagcagaagctgctgcactgggtgtccctgctgggccagcagcccaatgccaccacccctggggacaccctggatgccttccactgcctgtttgagacccaggacaaggagtttgtgcggctggccctgaacagcttccaggaggtgtggctgcccatcaaccagaacctggacctgattgccagcagcttctgcctgcagcactgcccctacctgaggaagatccgggtggatgtgaagggcatcttccccagagatgaatctgctgaggcctgccctgtggtgcccctgtggatgagggacaagaccctcatcgaggagcagtgggaggacttctgcagcatgctgggcacccacccccacctgcggcagctggacctgggcagcagcatcctgacagagcgggccatgaagaccctgtgtgccaagctgcggcaccccacctgcaagatccagaccctgatgttcagaaatgcccagatcaccccaggagtgcagcacctgtggagaattgtgatggccaacagaaacctgcggagcctgaacctgggcggcacccacctgaaggaggaggatgtgaggatggcctgtgaggccctgaagcaccccaagtgcctgctggagagcctgcggctggactgctgcggcctgacccacgcctgctacctgaagatcagccagatcctgaccaccagccccagcctgaagagcctgagcctggccggcaacaaggtgacagaccagggcgtgatgcccctgagtgatgccctgcgggtgtcccagtgtgccctgcagaagctgatcctggaggactgtggcatcacagccaccggctgccagagcctggccagcgccctggtgagcaacagaagcctgacccacctgtgcctgagcaacaacagcctgggcaatgaaggagtgaacctgctgtgccgctccatgaggctgccccactgcagcctgcagaggctgatgctgaaccagtgccacctggacacagctggctgcggcttcctggccctggccctgatgggcaacagctggctgacccacctgagcctgtccatgaaccctgtggaggacaatggagtgaagctgctgtgtgaggtgatgagggagcccagctgccacctgcaggacctggagctggtgaagtgccacctgacagctgcctgctgtgagagcctgagctgtgtgatcagccgcagccgccacctgaagagcctggacctgacagacaatgccctgggagatggaggagtggccgccctgtgtgagggcctgaagcagaagaacagcgtgctggcccggctgggcctgaaggcctgtggcctgaccagtgactgctgtgaggccctgagcctggccctgagctgcaacagacacctgaccagcctgaacctggtgcagaacaacttcagccccaagggcatgatgaagctgtgcagcgcctttgcctgccccaccagcaacctgcagatcatcggcctgtggaagtggcagtaccctgtgcagatcaggaagctgctggaggaggtgcagctgctgaagccccgggtggtgattgatggctcctggcacagctttgatgaagatgaccgctactggtggaagaactag

SEQ ID NO: 20280 - DNA, 2787 bp, synthetic construct
  source 1..2787: mol_type = other DNA; note = Synthetic coding sequence
atgaatgaggccatggccacagacagcccccggcggcccagccgctgcacaggaggagtggtggtgcggccccaggccgtgacagagcagagctacatggagagcgtggtgaccttcctgcaggatgtggtgccccaggcctacagcggcacccccctgacagaggagaaggagaagatcgtgtgggtgcgctttgaaaatgctgacctgaatgacaccagcaggaacctggagttccacgagatccacagcactggaaatgaaccacccctgctgatcatgattggctacagtgatggcatgcaggtgtggagcatccccatctctggagaggcccaggagctgttctctgtgcgccacggccccatccgggccgcccgcatcctgcctgccccccagtttggagcccagaagtgtgacaactttgctgagaagaggcccctgctgggcgtgtgcaagagcatcggcagcagcggcaccagccccccctactgctgcgtggacctgtacagcctgaggactggagagatggtgaagagcatccagttcaagacccccatctatgacctgcactgcaacaagaggatcctggtggtggtgctgcaggagaagattgctgcctttgacagctgcaccttcaccaagaagttctttgtgaccagctgctacccctgccccggccccaacatgaaccccatcgccctgggcagccgctggctggcctatgcagagaacaagctgatccgctgccaccagagcagaggaggagcctgtggggacaacatccagagctacacagccaccgtcatctctgctgccaagaccctgaagagcggcctgaccatggtgggcaaggtggtgacccagctgaccggcaccctgcccagcggcgtgacagaagatgatgtggccatccacagcaacagccgccgcagccccctggtgcccggcatcatcaccgtcatcgacacagagaccgtgggggagggccaggtgctggtgtctgaggacagcgacagtgatggcatcgtggcccacttccctgcccacgagaagcctgtgtgctgcatggccttcaacaccagcggcatgctgctggtgaccacagacaccctgggccatgacttccacgtgttccagatcctgacccacccctggagcagcagccagtgtgctgtgcaccacctgtacaccctgcacagaggagaaacagaggccaaggtgcaggacatctgcttcagccatgactgccgctgggtggtggtgtccaccctgcggggcaccagccacgtgttccccatcaacccctatggaggccagccctgtgtgaggacccacatgagcccccgggtggtgaacaggatgagccgcttccagaagtctgctggcctggaggagattgagcaggagctgaccagcaagcagggcggccgctgcagccctgtgcccggcctgagcagcagccccagcggcagccccctgcacggcaagctgaacagccaggacagctacaacaacttcaccaacaacaaccctggcaacccccggctgagccccctgcccagcctgatggtggtgatgcccctggcccagatcaagcagcccatgaccctgggcaccatcaccaagaggacaggcccctacctgtttggagctggctgcttcagcatcaaggccccctgcaaggtgaagcccccaccccagatcagccccagcaagtccatgggcggggagttctgtgtggccgccatcttcggcaccagccgctcctggtttgccaacaatgccggcctgaagcgggagaaggaccagagcaagcaggtggtggtggagagcctgtacatcatcagctgctacggcaccctggtggagcacatgatggagccccggcccctgagcacagcccccaagatcagtgatgacacccccctggagatgatgaccagcccccgggcctcctggaccctggtgaggaccccccagtggaatgagctgcagccccccttcaatgccaaccaccccctgctgctggccgcagatgctgtgcagtactaccagttcctgctggccggcctggtgcccccaggcagccctggccccatcaccaggcatggcagctatgacagcctggccagtgaccacagcggccaggaggatgaggagtggctgagccaggtggagatcgtgacccacacaggcccccaccggcggctgtggatgggcccccagttccagttcaagaccatccaccccagcggccagaccaccgtcatcagcagcagcagctctgtgctgcagagccacggccccagcgacaccccccagcccctgctggactttgacacagatgacctggacctgaacagcctgcgcatccagcctgtgcggagtgaccctgtgtccatgcctggcagcagcaggcctgtgtctgaccggcggggcgtgtccacagtgattgatgctgccagcggcacctttgacagatctgtgaccctgctggaggtgtgtggctcctggccagagggcttcggcctgcggcacatgagctccatggagcacacagaggagggcctgcgggagcggctggctgatgccatggccgagagccccagcagagatgtggtgggcagcggcacagagctgcagcgggagggcagcattgagaccctgagcaacagcagcggcagcaccagcggcagcatccccaggaactttgatggctaccgcagccccctgcccaccaatgaaagccagcccctgagcctcttccccaccggcttcccctag

SEQ ID NO: 20281 - DNA, 501 bp, synthetic construct
  source 1..501: mol_type = other DNA; note = Synthetic coding sequence
atggtgaacagctgctgcggctctgtgtgcagcgaccagggctgcggcctggagaactgctgccggcccagctactgccagaccacctgctgcaggaccacctgctgccggcccagctgctgcgtgagcagctgctgccggccccagtgctgccagaccacctgctgcaggaccacctgctgccaccccagctgctgcgtgagcagctgctgccggccccagtgctgccagagcgtgtgctgccagcccacctgctgccggccccagtgctgccagaccacctgctgcaggaccacctgctgccggcccagctgctgccggccccagtgctgccagagcgtgtgctgccagcccacctgctgctgccccagctactgtgtgagcagctgctgccggccccagtgctgccagaccacctgctgcaggaccacctgctgccggcccagctgctgcgtgagccgctgctaccggccccactgcggccagagcctgtgctgctag

SEQ ID NO: 20282 - DNA, 1104 bp, synthetic construct
  source 1..1104: mol_type = other DNA; note = Synthetic coding sequence
atggatgatgctgctgtgctgaagagaagaggctacctgctgggcatcaacctgggggagggcagctatgccaaggtgaagagcgcctacagcgagcggctgaagttcaacgtggccatcaagatcatcgacaggaagaaggccccagctgacttcctggagaagttcctgccccgggagattgagatcctggccatgctgaaccactgcagcatcatcaagacctatgagatctttgagaccagccacggcaaggtgtacatcgtgatggagctggccgtgcagggcgacctgctggagctgatcaagaccaggggggccctgcatgaagatgaggccaggaagaagttccaccagctgagcctggccatcaagtactgccacgacctggatgtggtgcaccgggacctgaagtgtgacaacctgctgctggacaaggacttcaacatcaagctgagtgacttctccttcagcaagcgctgcctgagagatgacagcggccgcatggccctgagcaagaccttctgtggcagccctgcctatgctgcccctgaggtgctgcagggcatcccctaccagcccaaggtgtatgacatctggagcctgggcgtcatcctgtacatcatggtgtgtggctccatgccctatgatgacagcaacatcaagaagatgctgcgcatccagaaggagcaccgggtgaacttccccaggagcaagcacctgaccggggagtgcaaggacctgatctaccacatgctgcagccagatgtgaacagaaggctgcacattgatgagatcctgagccactgctggatgcagcccaaggcccggggcagccccagcgtggccatcaacaaggagggggagagcagccggggcacagagcccctgtggaccccagagcccggcagtgacaagaagagcgccaccaagctggagcctgagggggaggcccagccccaggcccagcctgagaccaagccagagggcacagccatgcagatgagccggcagagcgagatcctgggcttccccagcaagcccagcaccatggagacagaggagggccccccccagcagcccccagagacccgggcccagtag

SEQ ID NO: 20283 - DNA, 273 bp, synthetic construct
  source 1..273: mol_type = other DNA; note = Synthetic coding sequence
atgagccactacggcagctactacggcggcctgggctacagctgtggcggctttggaggcctgggctacggctacggctgcggctgcggcagcttctgccggcggggcagcggctgcggctatggaggctacggctacggcagcggcttcggcagctatggctacggcagcggctttggaggctacggctacggcagcggctttggaggctacggctacggctgctgccggcccagctacaatggaggctacggcttcagcggcttctactag

SEQ ID NO: 20284 - DNA, 519 bp, synthetic construct
  source 1..519: mol_type = other DNA; note = Synthetic coding sequence
atgagctacaactgctgcagcaggaacttcagcagctgcagccatggaggctacctgcactacccaggcagcagctgtggcagcagctaccccagcaacctggtgtacagcacagacctgtgcagccccagcacctgccagctgggcagcagcctgtaccggggctgccaggagacctgctggaggcccaacagctgccagaccctgtgtgtggagagcagcccctgccacaccagctgctactaccccaggacccacatgctgtgcaacagctgcctgaccatgcacgtgggcagccggggcttcggcagcaacagctgctgcagcctgagctgtggcagccgcagctgcagcagcctgggctgcggcagcaatggcttccgctacctgaactaccgcatccacaccagccccagccagagctaccgcagccgcttctgccaccccatctacttccccccccggcgctggttccacagcagctgctaccagcccttctgccgcagcggcttctactag

SEQ ID NO: 20285 - DNA, 1554 bp, synthetic construct
  source 1..1554: mol_type = other DNA; note = Synthetic coding sequence
atgagcggcagctgcagcagcaggaagtgcttctctgtgcctgccaccagcctgtgcagcacagaggtgtcctgtggcggccccatctgcctgcccagcagctgccagagccagacctggcagctggtgacctgccaggacagctgtggcagcagcagctgtggcccccagtgccggcagcccagctgccctgtgagcagctgtgcccagcccctgtgctgtgaccccgtcatctgtgagcccagctgcagcgtgagcagcggctgccagcctgtgtgctgtgaggccaccacctgtgagcccagctgcagcgtgagcaactgctaccagcctgtgtgctttgaggccaccatctgtgagcccagctgcagcgtgagcaactgctgccagcctgtgtgctttgaggccaccgtgtgtgagcccagctgcagcgtgagcagctgtgcccagcctgtgtgctgtgagcccgccatctgtgagcccagctgcagcgtgagcagctgctgccagcctgtgggcagcgaggccaccagctgccagcctgtgctgtgtgtgcccaccagctgccagcctgtgctgtgcaagagcagctgctgccagcctgtggtgtgtgagcccagctgctgcagcgctgtgtgcaccctgcccagcagctgccagcctgtggtgtgtgagcccagctgctgccagcctgtgtgccccacccccacctgcagcgtgaccagcagctgccaggccgtgtgctgtgaccccagcccctgtgagcccagctgcagcgagagcagcatctgccagcctgccacctgtgtggccctggtgtgtgagcctgtgtgcctgcggcctgtgtgctgcgtgcagagcagctgtgagcccccatctgtgcccagcacctgccaggagcccagctgctgcgtgagcagcatctgccagcccatctgcagcgagcccagcccctgcagccctgctgtgtgtgtgagcagcccctgccagcccacctgctacgtggtgaagcgctgccccagcgtgtgcccagagcctgtgtcctgccccagcaccagctgccggcccctgagctgcagccctggcagcagcgccagcgccatctgccggcccacctgccccaggaccttctacatccccagcagcagcaagaggccctgcagcgccaccatctcctacagacctgtgtcccggcccatctgccggcccatctgcagcggcctgctgacctaccggcagccctacatgaccagcatctcctacagacctgcctgctaccggccctgctacagcatcctgcggcggcctgcctgtgtgaccagctacagctgcaggcctgtgtacttccggcccagctgcacagaaagtgacagctgcaagagggactgcaagaagagcaccagcagccagctggactgtgtggacaccaccccctgcaaggtggatgtgtctgaggaggccccctgccagcccacagaggccaagcccatcagccccaccacccgggaggccgccgccgcccagcctgctgccagcaagccagccaactgctag

SEQ ID NO: 20286 - DNA, 1026 bp, synthetic construct
  source 1..1026: mol_type = other DNA; note = Synthetic coding sequence
atggctgatggctgctgccccggcaacaccacagccatcccagctgtgcccaccatcaccacctaccctgtgaagggcggcttcagacatgccctgtgcctgcccagcagctgccacagcaggatgtggcagctggtgacctgccaggagagctgccagcccagcatcggggcccccagcggctgtgaccctgccagctgccagcccacccggctgcctgccaccagctgtgtgggctttgtgtgccagcccatgtgcagccatgctgcctgctaccagagcggcaccggccagagcccctgcctggtgagcagctgccagcccagctgcagcgagagcacctgctgccaggagaagtgctgtgatgccagcccctgccagcagagcagctgccaggagagcgtgtgcatgagcggcagctgccaggccgcctgtggccagagcgtgtgctgtgatgctggcagctgccagcccagctgcagcgaggtgaccagctgcccagagaccagctgcctgcccaccatctgcacagccagcccctgccagcccacctggtgccagggcagcagctgccagcctgtgtctggagagggccagccctgcaagagcacctactaccagcccatctgctacatcttcaagccctgccagagcgccctgtacatgcctgtgccctgccagcccagcacctgtgtgttcagcagctgcaacaccacctgctgcgtgcccagccactgccagcccccccactgccagctggtgcccagcacctgcttcatctaccagcctgtggccaactgccaggccccctgcagcaccaagaactgctgcaagccagccagctgtgacaccgtcatcagcggccagcccacctgtgatggccccccatcctacaaccagagcggctgcaagagcgcctgctgcgtgacaggcctgggcaccagccccagcagcggcagcaactgcctgcccaccagctgccagcccagctgtgagagcagcttctgcaaggccaccctgtgctag

SEQ ID NO: 20287 - DNA, 588 bp, synthetic construct
  source 1..588: mol_type = other DNA; note = Synthetic coding sequence
atggtgagcagctgctgcggctctgtgtgcagcgaccagagctgtggccagggcctgggccaggagagctgctgccggcccagctgctgccagaccacctgctgcaggaccacctgctgccggcccagctgctgcatcagcagctgctgccggcccagctgctgcatcagcagctgctgcaagcccagctgctgcaggaccacctgctgccggcccagctgctgcatcagcagctgctgccggcccagctgctgcatcagcagctgctgcaagcccagctgctgcaggaccacctgctgccggcccagctgctgcatcagcagctgctgccggcccagctgctgcatcagcagctgctgcaagcccagctgctgccagaccacctgctgccggcccagctgctgcatcagcagctgctaccggccccagtgctgccagcccagctgctgcaggcctgcctgctgcatcagcagctgctgccaccccagctgctgcgtgagcagctgccgctgccccttcagctgccccaccacctgctgcaggaccacctgcttccaccccatctgctgcggcagcagctgctgctag

SEQ ID NO: 20288 - DNA, 588 bp, synthetic construct
  source 1..588: mol_type = other DNA; note = Synthetic coding sequence
atggtgaacagctgctgcggctctgtgtgcagccaccagggctgcggccgggacctgtgccaggagacctgctgccggcccagctgctgtgagaccacctgctgcaggaccacctactgccggcccagctgctgcgtgagcagctgctgccggccccagtgctgccagagcgtgtgctgccagcccacctgctgccggccccgctgctgcatcagcagctgctgccggcccagctgctgcgtgagcagctgctgcaagccccagtgctgccagagcatgtgctgccagcccacctgctgccggccccgctgctgcatcagcagctgctgccggcccagctgctgcgtgagcagctgctgccggccccagtgctgccagagcgtgtgctgccagcccacctgctgccaccccagctgcagcatcagcagctgctgccggcccagctgctgtgagagcagctgctgccggccctgctgctgcctgcggcctgtgtgtggccgggtgtcctgccacaccacctgctaccggcccacctgtgtgatcagcagctgcccccggcccctgtgctgtgccagcagctgctgctag

SEQ ID NO: 20289 - DNA, 633 bp, synthetic construct
  source 1..633: mol_type = other DNA; note = Synthetic coding sequence
atggtgagcagctgctgcggctctgtgtgcagcgaccagggctgcggccaggacctgtgccaggagacctgctgccggcccagctgctgtgagaccacctgctgcaggaccacctgctgccggcccagctgctgcgtgagcagctgctgccggccccagtgctgccagagcgtgtgctgccagcccacctgcagccggcccagctgctgccagaccacctgctgcaggaccacctgctaccggcccagctgctgcgtgagcagctgctgccggccccagtgctgccagcctgcctgctgccagcccacctgctgccggcccagctgctgtgagaccacctgctgccacccccgctgctgcatcagcagctgctgccggcccagctgctgcgtgagcagctgctgcaagccccagtgctgccagagcgtgtgctgccagcccaactgctgccggcccagctgcagcatcagcagctgctgccggcccagctgctgtgagagcagctgctgccggccctgctgctgcgtgcggcctgtgtgtggccgggtgtcctgccacaccacctgctaccggcccacctgtgtgatcagcagctgcccccggcccctgtgctgtgccagcagctgctgctag

SEQ ID NO: 20290 - DNA, 387 bp, synthetic construct
  source 1..387: mol_type = other DNA; note = Synthetic coding sequence
atgacaggcagctgctgcggcagcaccctgagcagcctgtcctatggaggcggctgctgccagccctgctgctgccgggacccctgctgctgcaggcctgtgacctgccagaccaccgtgtgcaggcctgtgacctgtgtgccccgctgcacccggcccatctgtgagccctgcagaagacctgtgtgctgtgacccctgcagcctgcaggagggctgctgccggcccatcacctgctgccccagcagctgcacagctgtggtgtgccggccctgctgctgggccaccacctgctgccagcctgtgtctgtgcagagcccctgctgcaggcctccctgtggccagcccaccccctgcagcaccacctgcaggaccagcagctgctag

SEQ ID NO: 20291 - DNA, 387 bp, synthetic construct
  source 1..387: mol_type = other DNA; note = Synthetic coding sequence
atgacaggcagctgctgcggcagcaccttcagcagcctgtcctatggaggcggctgctgccagccctgctgctgccgggacccctgctgctgcaggcctgtgacctgccagaccaccgtgtgcaggcctgtgacctgtgtgccccgctgcacccggcccatctgtgagccctgcagaagacctgtgtgctgtgacccctgcagcctgcaggagggctgctgccggcccatcacctgctgccccagcagctgcacagctgtggtgtgccggccctgctgctgggccaccacctgctgccagcctgtgtctgtgcagagcccctgctgcaggcctccctgtggccagcccaccccctgcagcaccacctgcaggaccagcagctgctag

SEQ ID NO: 20292 - DNA, 297 bp, synthetic construct
  source 1..297: mol_type = other DNA; note = Synthetic coding sequence
atggactgctgtgccagccggggctgcagcgtgcccactggacctgccaccaccatctgcagcagtgacaagagctgccgctgtggggtgtgcctgcccagcacctgcccccacacagtgtggctgctggagcccacctgctgtgacaactgccccccaccctgccacatcccccagccctgtgtgcccacctgcttcctgctgaacagctgccagcccaccccaggcctggagaccctgaacctgaccaccttcacccagccctgctgtgagccctgcctgccccggggctgctag

SEQ ID NO: 20293 - DNA, 297 bp, synthetic construct
  source 1..297: mol_type = other DNA; note = Synthetic coding sequence
atggactgctgtgccagccgcagctgcagcgtgcccactggacctgccaccaccatctgcagcagtgacaagagctgccgctgtggggtgtgcctgcccagcacctgcccccacacagtgtggctgctggagcccatctgctgtgacaactgccccccaccctgccacatcccccagccctgtgtgcccacctgcttcctgctgaacagctgccagcccaccccaggcctggagaccctgaacctgaccaccttcacccagccctgctgtgagccctgcctgccccggggctgctag

SEQ ID NO: 20294 - DNA, 297 bp, synthetic construct
  source 1..297: mol_type = other DNA; note = Synthetic coding sequence
atgtactgctgtgccctgcggagctgcagcgtgcccactggacctgccaccaccttctgcagctttgacaagagctgccgctgtggggtgtgcctgcccagcacctgcccccatgagatcagcctgctgcagcccatctgctgtgacacctgccccccaccctgctgcaagccagacacctacgtgcccacctgctggctgctgaacaactgccaccccaccccaggcctgagcggcatcaacctgaccacctacgtgcagcccggctgtgagagcccctgtgagccccgctgctag

SEQ ID NO: 20295 - DNA, 291 bp, synthetic construct
  source 1..291: mol_type = other DNA; note = Synthetic coding sequence
atgtgccacaccagctgcagcagcggctgccagcctgcctgctgtgcccccagcccctgccaggccagctgctacatccctgtgggctgccagagctctgtgtgtgtgcctgtgtccttcaagccagctgtgtgtgtgcctgtgcgctgccagagctctgtgtgtgtgcctgtgtcctgcaggcctgtggtgtatgctgcccccagctgccagagcagcggctgctgccagcccagctgcacctctgtgctgtgccggcccatcagctgcagcacccccagctgctgctag

SEQ ID NO: 20296 - DNA, 339 bp, synthetic construct
  source 1..339: mol_type = other DNA; note = Synthetic coding sequence
atgtgccacaccagccacagcagcggctgccccatggcctgccccggcagcccctgctgcgtgcccagcacctgctacccacctgagggctacggcaccagctgctgctgcagcgccccctgtgtggccctgctgtgccggcccctgtgtggggtgtccacctgctgccagcctgcctgctgcgtgcccagcccctgccaggtggcctgctgcgtgcctgtgtcctgcaagcctgtgctgtgtgtggccagcttctgccccaccagcggctgctgccagcccttctgccccaccctggtgtacagacctgtgacctggagcacccccaccggctgctag

SEQ ID NO: 20297 - DNA, 666 bp, synthetic construct
  source 1..666: mol_type = other DNA; note = Synthetic coding sequence
atggccaccagcaccatgtctgtgtgcagcagcgcctacagcgacagctggcaggtggatgcctgcccagagagctgctgtgagcccccctgctgtgccaccagctgctgtgccccagccccctgcctgaccctggtgtgcacccctgtgtcctgtgtgagcagcccctgctgccaggccgcctgtgagcccagcccctgccagagcggctgcaccagcagctgcacccccagctgctgccagcagagcagctgccagcctgcctgctgcaccagcagcccctgccagcaggcctgctgcgtgcctgtgtgctgcaagcctgtgtgctgcgtgcctgtgtgctgcaagcctgtgtgctgcaagcccatctgctgcgtgcctgtgtgcagcggggccagcagcagctgctgccagcagagcagccggcagcctgcctgctgcaccaccagctgctgccggcccagcagctctgtgtccctgctgtgcaggcctgtgtgccgcagcacctgctgcgtgcccatccccagctgctgtgccccagccagcacctgccagcccagctgctgcaggcctgccagctgtgtgtccctgctgtgccggcccacctgcagccggctgagcagcgcctgctgcggcctgagcagcggccagaagagcagctgctag

SEQ ID NO: 20298 - DNA, 768 bp, synthetic construct
  source 1..768: mol_type = other DNA; note = Synthetic coding sequence
atggccgccagcaccatgagcatctgcagcagcgcctgcaccaacagctggcaggtggatgactgcccagagagctgctgtgagctgccctgtggcacccccagctgctgtgccccagccccctgcctgaccctggtgtgcacccctgtgtcctgtgtgagcagcccctgctgccaggccgcctgtgagcccagcgcctgccagagcggctgcaccagcagctgcacccccagctgctgccagcagagcagctgccagcctgcctgctgcaccagcagcccctgccagcaggcctgctgcgtgcctgtgtgctgcaagcctgtgtgctgcgtgcctgtgtgctgcggggccagcagctgctgccagcagagcagctgccagcctgcctgctgtgccagcagcagctgccagcagagctgccgggtgcctgtgtgctgcaaggctgtgtgctgcgtgcccacctgcagcgagagcagcagcagctgctgccagcagagcagctgccagcctgcctgctgcaccagcagcccctgccagcagagctgctgcgtgtctgtgtgctgcaagcctgtgtgctgcaagagcatctgctgcgtgcctgtgtgcagcggggccagcagcccctgctgccagcagagcagctgccagcctgcctgctgcaccagcagctgctgccggcccagcagctctgtgtccctgctgtgcaggcctgtgtgcagcaggcctgccagctgcagcttcagcagcggccagaagagcagctgctag

SEQ ID NO: 20299 - DNA, 312 bp, synthetic construct
  source 1..312: mol_type = other DNA; note = Synthetic coding sequence
atgtgtggcagctactacagaaactacaacggcggccacggctacggctgctgcggctacggcggcctgggctgcggctatggaggctgcggctacggctgctgcggctatggaggcctgggcttcggctacggcggcctggactgtggctatggaggcctgggctgcggctacggcagcttctgtggctgcggctaccggggcctggactgtggctacggctgcggctacggctacgtgagccacagcttctgtggctgcggctaccgctgtggcagcggctacggcagcagctttggctactactactag

SEQ ID NO: 20300 - DNA, 3117 bp, synthetic construct
  source 1..3117: mol_type = other DNA; note = Synthetic coding sequence
atggtgagcagcgcccagatgggcttcaacctgcaggccctgctggagcagctgagccaggatgagctgagcaagttcaagtacctgatcaccaccttcagcctggcccacgagctgcagaagatcccccacaaggaggtggacaaggcagatggcaagcagctggtggagatcctgaccacccactgtgacagctactgggtggagatggccagcctgcaggtgtttgagaagatgcacaggatggacctgtctgagcgggccaaggatgaggtgcgggaggccgccctgaagagcttcaacaagaggaagcccctgagcctggccttcacagagaccaagggaaatgtcatctgcctgggcaaggaggtgttcaagggcaagaagccagacaaggacaaccgctgccgctacatcctgaagaccaagttccgggagatgtggaagtcctggccaggggacagcaaggaggtgcaggtgatggccgagcgctacaagatgctgatccccttcagcaacccccgggtgctgcccggccccttctcctacacagtggtgctgtatggccctgctggcctgggcaagaccaccctggcccagaagctgatgctggactgggccgaggacaacctgatccacaagttcaagtatgccttctacctgagctgccgggagctgagccggctgggcccctgcagctttgctgagctggtgttccgggactggccagagctgcaggatgacatcccccacatcctggcccaggccaggaagatcctgtttgtgattgatggctttgatgagctgggcgccgcccctggggccctgattgaggacatctgtggggactgggagaagaagaagcctgtgcctgtgctgctgggcagcctgctgaacagagtgatgctgcccaaggccgccctgctggtgaccacccggccccgggccctgcgggacctgcgcatcctggccgaggagcccatctacatccgggtggagggcttcctggaggaggaccggcgggcctacttcctgcggcactttggagatgaggaccaggccatgagggcctttgagctgatgaggagcaatgctgccctcttccagctgggcagcgccccagctgtgtgctggatcgtgtgcaccaccctgaagctgcagatggagaagggggaggaccctgtgcccacctgcctgaccaggacaggcctcttcctgcgcttcctgtgcagccgcttcccccagggcgcccagctgcggggggccctgcggaccctgagcctgctggccgcccagggcctgtgggcccagacctctgtgctgcaccgggaggacctggagcggctgggcgtgcaggagagtgacctgcggctcttcctggatggagacatcctgcggcaggacagagtgtccaagggctgctacagcttcatccacctgtccttccagcagttcctgacagccctcttctacaccctggagaaggaggaggaggaggacagagatggccacacctgggacattggagatgtgcagaagctgctgagcggcgtggagcggctgaggaacccagacctgatccaggccggctactacagctttggcctggccaatgagaagagggccaaggagctggaggccaccttcggctgcaggatgagcccagacatcaagcaggagctgctgcgctgtgacatcagctgcaagggcggccacagcacagtgacagacctgcaggagctgctgggctgcctgtatgagagccaggaggaggagctggtgaaggaggtgatggcccagttcaaggagatcagcctgcacctgaatgctgtggatgtggtgcccagcagcttctgtgtgaagcactgcaggaacctgcagaagatgagcctgcaggtgatcaaggagaacctgcctgaaaatgtgacagccagcgagagtgatgctgaggtggagaggagccaggatgaccagcacatgctgcccttctggacagacctgtgcagcatcttcggcagcaacaaggacctgatgggcctggccatcaatgacagcttcctgagcgccagcctggtgcgcatcctgtgtgagcagatcgccagtgacacctgccacctgcagagggtggtgttcaagaacatcagccctgcagatgcccacaggaacctgtgcctggccctgcggggccacaagacagtgacctacctgaccctgcagggcaatgaccaggatgacatgtttcctgccctgtgtgaggtgctgcggcaccctgagtgcaacctgcgctacctgggcctggtgtcctgcagcgccaccacccagcagtgggccgacctgagcctggccctggaggtgaaccagagcctgacctgtgtgaacctgagtgacaatgagctgctggatgaaggagccaagctgctgtacaccaccctgcggcaccccaagtgcttcctgcagaggctgagcctggagaactgccacctgacagaggccaactgcaaggacctggccgctgtgctggtggtgtcccgggagctgacccacctgtgcctggccaagaaccccatcggcaacacaggagtgaagttcctgtgtgagggcctgcgctacccagagtgcaagctgcagaccctggtgctgtggaactgtgacatcaccagtgatggctgctgtgacctgaccaagctgctgcaggagaagagcagcctgctgtgcctggacctgggcctgaaccacatcggcgtgaagggcatgaagttcctgtgtgaggccctgaggaagcccctgtgcaacctgcgctgcctgtggctgtggggctgcagcatcccccccttcagctgtgaggacctgtgcagcgccctgagctgcaaccagagcctggtgaccctggacctgggccagaaccccctgggcagcagtggagtgaagatgctgtttgagaccctgacctgcagcagcggcaccctgcggaccctgcggctgaagattgatgacttcaatgatgagctgaacaagctgctggaggagattgaggagaagaacccccagctgatcatcgacacagagaagcaccacccctgggccgagcggcccagcagccatgacttcatgatctag

SEQ ID NO: 20301 - DNA, 762 bp, synthetic construct
  source 1..762: mol_type = other DNA; note = Synthetic coding sequence
atggagctggagcagcgggagggcaccatggctgctgtgggctttgaggagttcagcgcccctcctggcagcgagctggccctgccccccctgtttggaggccacatcctggagagcgagctggagacagaggtggagtttgtgtctgggggcctgggcggcagcggcctgcgggagagagatgaggaggaggaggccgcccggggcagaagaagacggcagcgggagctgaacagaaggaagtaccaggccctgggccgccgctgccgggagattgagcaggtgaatgaaagagtgctgaaccggctgcaccaggtgcagaggatcacccggcggctgcagcaggagcggcgcttcctgatgagggtgctggacagctatggagatgactaccgggccagccagttcaccatcgtgctggaggatgagggcagccagggcacagatgcccccaccccaggaaatgcagaaaatgagcccccagagaaggagaccctgagcccccccaggaggaccccagcccctcctgagcccggcagccctgcccctggagagggccccagcggcaggaagagaagaagagtgcccagagatggccggcgggctggaaatgccctgaccccagagctggcccctgtgcagatcaaggtggaggaggactttggatttgaagcagatgaggccctggacagctcctgggtgtcccggggccctgacaagctgctgccctaccccaccctggccagccctgccagtgactag

SEQ ID NO: 20302 - DNA, 2679 bp, synthetic construct
  source 1..2679: mol_type = other DNA; note = Synthetic coding sequence
atgctgaggacagctggaagagatggcctgtgccgcctgagcacctacctggaggagctggaggccgtggagctgaagaagttcaagctgtacctgggcacagccacagagctgggggagggcaagatcccctggggctccatggagaaggccggccccctggagatggcccagctgctgatcacccacttcggccctgaggaggcctggaggctggccctgagcacctttgagcgcatcaacaggaaggacctgtgggagcggggccagcgggaggacctggtgcgggacaccccacctgggggccccagcagcctgggcaaccagagcacctgcctgctggaggtgtccctggtgacccccaggaaggacccccaggagacctacagagattatgtgcggaggaagttccggctgatggaggacagaaatgcccggctgggagaatgtgtgaacctgagccaccgctacacccggctgctgctggtgaaggagcacagcaaccccatgcaggtgcagcagcagctgctggacaccggccggggccacgccaggacagtgggccaccaggccagccccatcaagattgagaccctgtttgagccagatgaggagaggcctgagccccccaggacagtggtgatgcagggcgctgctggcatcggcaagtccatgctggcccacaaggtgatgctggactgggcagatggcaagctgttccagggccgctttgactacctgttctacatcaactgccgggagatgaaccagagcgccacagaatgttccatgcaggacctgatcttcagctgctggccagagcccagcgcccccctgcaggagctgatccgggtgcctgagcggctgctcttcatcattgatggctttgatgagctgaagcccagcttccatgacccccagggcccctggtgcctgtgctgggaggagaagaggcccacagagctgctgctgaacagcctcatcaggaagaagctgctgcctgagctgagcctgctgatcaccacccggcccacagccctggagaagctgcaccggctgctggagcaccccaggcatgtggagatcctgggcttcagcgaggccgagaggaaggagtacttctacaagtacttccacaatgctgagcaggccggccaggtgttcaactacgtgcgggacaatgagcccctcttcaccatgtgctttgtgcccctggtgtgctgggtggtgtgcacctgcctgcagcagcagctggagggcggcggcctgctgcggcagaccagcaggaccaccacagctgtgtacatgctgtacctgctgagcctgatgcagcccaagccaggggccccccggctgcagcccccacccaaccagaggggcctgtgcagcctggccgcagatggcctgtggaaccagaagatcctgtttgaggagcaggacctgaggaagcacggcctggatggagaagatgtgtctgccttcctgaacatgaacatcttccagaaggacatcaactgtgagcgctactacagcttcatccacctgtccttccaggagttctttgctgccatgtactacatcctggatgaaggagagggcggggccggccctgaccaggatgtgacccggctgctgacagaatatgccttcagcgagaggagcttcctggccctgaccagccgcttcctgtttggcctgctgaatgaggagaccaggagccacctggagaagagcctgtgctggaaggtgagcccccacatcaagatggacctgctgcagtggatccagagcaaggcccagagtgatggcagcaccctgcagcagggcagcctggagttcttcagctgcctgtatgagatccaggaggaggagttcatccagcaggccctgagccacttccaggtgattgtggtgagcaacatcgccagcaagatggagcacatggtgtcctccttctgcctgaagcgctgccgcagcgcccaggtgctgcacctgtatggagccacctacagcgcagatggagaagatcgggcccgctgcagcgctggggcccacaccctgctggtgcagctgcggcctgagaggacagtgctgctggatgcctacagcgagcacctggccgccgccctgtgcaccaaccccaacctgattgagctgagcctgtacagaaatgccctgggcagccggggcgtgaagctgctgtgccagggcctgcggcaccccaactgcaagctgcagaacctgcggctgaagcgctgccgcatcagcagcagcgcctgtgaggacctgtctgctgccctgattgccaacaagaacctgaccaggatggacctgtctggaaatggagtgggcttccctggcatgatgctgctgtgtgagggcctgcggcacccccagtgccgcctgcagatgatccagctgaggaagtgccagctggagagcggggcctgccaggagatggcctctgtgctgggcaccaacccccacctggtggagctggacctgactggaaatgccctggaggacctgggcctgcggctgctgtgccagggcctgcggcaccctgtgtgccgcctgcggaccctgtggtggctgtttggcatggacctgaacaagatgacccacagccggctggccgccctgcgggtgaccaagccctacctggacatcggctgctag

SEQ ID NO: 20303 - DNA, 3189 bp, synthetic construct
  source 1..3189: mol_type = other DNA; note = Synthetic coding sequence
atgctgaggacagctggaagagatggcctgtgccgcctgagcacctacctggaggagctggaggccgtggagctgaagaagttcaagctgtacctgggcacagccacagagctgggggagggcaagatcccctggggctccatggagaaggccggccccctggagatggcccagctgctgatcacccacttcggccctgaggaggcctggaggctggccctgagcacctttgagcgcatcaacaggaaggacctgtgggagcggggccagcgggaggacctggtgcgggacaccccacctgggggccccagcagcctgggcaaccagagcacctgcctgctggaggtgtccctggtgacccccaggaaggacccccaggagacctacagagattatgtgcggaggaagttccggctgatggaggacagaaatgcccggctgggagaatgtgtgaacctgagccaccgctacacccggctgctgctggtgaaggagcacagcaaccccatgcaggtgcagcagcagctgctggacaccggccggggccacgccaggacagtgggccaccaggccagccccatcaagattgagaccctgtttgagccagatgaggagaggcctgagccccccaggacagtggtgatgcagggcgctgctggcatcggcaagtccatgctggcccacaaggtgatgctggactgggcagatggcaagctgttccagggccgctttgactacctgttctacatcaactgccgggagatgaaccagagcgccacagaatgttccatgcaggacctgatcttcagctgctggccagagcccagcgcccccctgcaggagctgatccgggtgcctgagcggctgctcttcatcattgatggctttgatgagctgaagcccagcttccatgacccccagggcccctggtgcctgtgctgggaggagaagaggcccacagagctgctgctgaacagcctcatcaggaagaagctgctgcctgagctgagcctgctgatcaccacccggcccacagccctggagaagctgcaccggctgctggagcaccccaggcatgtggagatcctgggcttcagcgaggccgagaggaaggagtacttctacaagtacttccacaatgctgagcaggccggccaggtgttcaactacgtgcgggacaatgagcccctcttcaccatgtgctttgtgcccctggtgtgctgggtggtgtgcacctgcctgcagcagcagctggagggcggcggcctgctgcggcagaccagcaggaccaccacagctgtgtacatgctgtacctgctgagcctgatgcagcccaagccaggggccccccggctgcagcccccacccaaccagaggggcctgtgcagcctggccgcagatggcctgtggaaccagaagatcctgtttgaggagcaggacctgaggaagcacggcctggatggagaagatgtgtctgccttcctgaacatgaacatcttccagaaggacatcaactgtgagcgctactacagcttcatccacctgtccttccaggagttctttgctgccatgtactacatcctggatgaaggagagggcggggccggccctgaccaggatgtgacccggctgctgacagaatatgccttcagcgagaggagcttcctggccctgaccagccgcttcctgtttggcctgctgaatgaggagaccaggagccacctggagaagagcctgtgctggaaggtgagcccccacatcaagatggacctgctgcagtggatccagagcaaggcccagagtgatggcagcaccctgcagcagggcagcctggagttcttcagctgcctgtatgagatccaggaggaggagttcatccagcaggccctgagccacttccaggtgattgtggtgagcaacatcgccagcaagatggagcacatggtgtcctccttctgcctgaagcgctgccgcagcgcccaggtgctgcacctgtatggagccacctacagcgcagatggagaagatcgggcccgctgcagcgctggggcccacaccctgctggtgcagctgcggcctgagaggacagtgctgctggatgcctacagcgagcacctggccgccgccctgtgcaccaaccccaacctgattgagctgagcctgtacagaaatgccctgggcagccggggcgtgaagctgctgtgccagggcctgcggcaccccaactgcaagctgcagaacctgcggctgaagcgctgccgcatcagcagcagcgcctgtgaggacctgtctgctgccctgattgccaacaagaacctgaccaggatggacctgtctggaaatggagtgggcttccctggcatgatgctgctgtgtgagggcctgcggcacccccagtgccgcctgcagatgatccagctgaggaagtgccagctggagagcggggcctgccaggagatggcctctgtgctgggcaccaacccccacctggtggagctggacctgactggaaatgccctggaggacctgggcctgcggctgctgtgccagggcctgcggcaccctgtgtgccgcctgcggaccctgtggctgaagatctgccgcctgacagctgctgcctgtgatgagctggccagcaccctgtctgtgaaccagagcctgcgggagctggacctgagcctgaatgagctgggggacctgggcgtgctgctgctgtgtgagggcctgcggcaccccacctgcaagctgcagaccctgcggctgggcatctgccgcctgggcagcgctgcctgtgagggcctgtctgtggtgctgcaggccaaccacaacctgcgggagctggacctgtccttcaatgacctgggggactggggcctgtggctgctggccgagggcctgcagcacccagcctgccgcctgcagaagctgtggctggacagctgtggcctgacagccaaggcctgtgaaaatctctacttcaccctgggcatcaaccagaccctgacagacctgtacctgaccaacaatgccctgggggacaccggggtgcggctgctgtgcaagaggctgagccaccctggctgcaagctgcgggtgctgtggctgtttggcatggacctgaacaagatgacccacagccggctggccgccctgcgggtgaccaagccctacctggacatcggctgctag

SEQ ID NO: 20304 - DNA, 3015 bp, synthetic construct
  source 1..3015: mol_type = other DNA; note = Synthetic coding sequence
atgctgaggacagctggaagagatggcctgtgccgcctgagcacctacctggaggagctggaggccgtggagctgaagaagttcaagctgtacctgggcacagccacagagctgggggagggcaagatcccctggggctccatggagaaggccggccccctggagatggcccagctgctgatcacccacttcggccctgaggaggcctggaggctggccctgagcacctttgagcgcatcaacaggaaggacctgtgggagcggggccagcgggaggacctggtgcgggacaccccacctgggggccccagcagcctgggcaaccagagcacctgcctgctggaggtgtccctggtgacccccaggaaggacccccaggagacctacagagattatgtgcggaggaagttccggctgatggaggacagaaatgcccggctgggagaatgtgtgaacctgagccaccgctacacccggctgctgctggtgaaggagcacagcaaccccatgcaggtgcagcagcagctgctggacaccggccggggccacgccaggacagtgggccaccaggccagccccatcaagattgagaccctgtttgagccagatgaggagaggcctgagccccccaggacagtggtgatgcagggcgctgctggcatcggcaagtccatgctggcccacaaggtgatgctggactgggcagatggcaagctgttccagggccgctttgactacctgttctacatcaactgccgggagatgaaccagagcgccacagaatgttccatgcaggacctgatcttcagctgctggccagagcccagcgcccccctgcaggagctgatccgggtgcctgagcggctgctcttcatcattgatggctttgatgagctgaagcccagcttccatgacccccagggcccctggtgcctgtgctgggaggagaagaggcccacagagctgctgctgaacagcctcatcaggaagaagctgctgcctgagctgagcctgctgatcaccacccggcccacagccctggagaagctgcaccggctgctggagcaccccaggcatgtggagatcctgggcttcagcgaggccgagaggaaggagtacttctacaagtacttccacaatgctgagcaggccggccaggtgttcaactacgtgcgggacaatgagcccctcttcaccatgtgctttgtgcccctggtgtgctgggtggtgtgcacctgcctgcagcagcagctggagggcggcggcctgctgcggcagaccagcaggaccaccacagctgtgtacatgctgtacctgctgagcctgatgcagcccaagccaggggccccccggctgcagcccccacccaaccagaggggcctgtgcagcctggccgcagatggcctgtggaaccagaagatcctgtttgaggagcaggacctgaggaagcacggcctggatggagaagatgtgtctgccttcctgaacatgaacatcttccagaaggacatcaactgtgagcgctactacagcttcatccacctgtccttccaggagttctttgctgccatgtactacatcctggatgaaggagagggcggggccggccctgaccaggatgtgacccggctgctgacagaatatgccttcagcgagaggagcttcctggccctgaccagccgcttcctgtttggcctgctgaatgaggagaccaggagccacctggagaagagcctgtgctggaaggtgagcccccacatcaagatggacctgctgcagtggatccagagcaaggcccagagtgatggcagcaccctgcagcagggcagcctggagttcttcagctgcctgtatgagatccaggaggaggagttcatccagcaggccctgagccacttccaggtgattgtggtgagcaacatcgccagcaagatggagcacatggtgtcctccttctgcctgaagcgctgccgcagcgcccaggtgctgcacctgtatggagccacctacagcgcagatggagaagatcgggcccgctgcagcgctggggcccacaccctgctggtgcagctgcctgagaggacagtgctgctggatgcctacagcgagcacctggccgccgccctgtgcaccaaccccaacctgattgagctgagcctgtacagaaatgccctgggcagcagaggagtgaagctgctgtgccagggcctgcggcaccccaactgcaagctgcagaacctgcggctgaagcgctgccgcatcagcagcagcgcctgtgaggacctgtctgctgccctgattgccaacaagaacctgaccaggatggacctgtctggaaatggagtgggcttccctggcatgatgctgctgtgtgagggcctgcggcacccccagtgccgcctgcagatgatccagctgaggaagtgccagctggagagcggggcctgccaggagatggcctctgtgctgggcaccaacccccacctggtggagctggacctgactggaaatgccctggaggacctgggcctgcggctgctgtgccagggcctgcggcaccctgtgtgccgcctgcggaccctgtggctgaagatctgccgcctgacagctgctgcctgtgatgagctggccagcaccctgtctgtgaaccagagcctgcgggagctggacctgagcctgaatgagctgggggacctgggcgtgctgctgctgtgtgagggcctgcggcaccccacctgcaagctgcagaccctgcggctggacagctgtggcctgacagccaaggcctgtgaaaatctctacttcaccctgggcatcaaccagaccctgacagacctgtacctgaccaacaatgccctgggggacaccggggtgcggctgctgtgcaagaggctgagccaccctggctgcaagctgcgggtgctgtggctgtttggcatggacctgaacaagatgacccacagccggctggccgccctgcgggtgaccaagccctacctggacatcggctgctag

SEQ ID NO: 20305 - DNA, 327 bp, synthetic construct
  source 1..327: mol_type = other DNA; note = Synthetic coding sequence
atggccagcggccggcctgaggagctgtgggaggccgtggtgggcgctgctgagcgcttccgggccaggactggaacagagctggtgctgctgacagctgcccctcctcctccacccaggcctggcccctgtgcctatgctgcccacggccgcggggccctggccgaggccgcccggcgctgcctgcatgacatcgccctggcccacagagctgccacagctgcccggcccccagcccctcctccagccccccagccccccagccccacccccagccccccccggcccaccctggccagagaagataatgaagaagatgaagattag

SEQ ID NO: 20306 - DNA, 771 bp, synthetic construct; identical to SEQ ID NO: 19315
  source 1..771: mol_type = other DNA; note = Synthetic coding sequence

SEQ ID NO: 20307 - DNA, 771 bp, synthetic construct; identical to SEQ ID NO: 19315
  source 1..771: mol_type = other DNA; note = Synthetic coding sequence

SEQ ID NO: 20308 - DNA, 771 bp, synthetic construct; identical to SEQ ID NO: 19315
  source 1..771: mol_type = other DNA; note = Synthetic coding sequence

SEQ ID NO: 20309 - DNA, 771 bp, synthetic construct; identical to SEQ ID NO: 19315
  source 1..771: mol_type = other DNA; note = Synthetic coding sequence

SEQ ID NO: 20310 - DNA, 831 bp, synthetic construct
  source 1..831: mol_type = other DNA; note = Synthetic coding sequence
atgagctttgaaggaggagatggagctggccctgccatgctggccaccggcacagccaggatggccagcggccggcctgaggagctgtgggaggccgtggtgggcgctgctgagcgcttccgggccaggactggaacagagctggtgctgctgacagctgcccctcctcctccacccaggcctggcccctgtgcctatgctgcccacggccgcggggccctggccgaggccgcccggcgctgcctgcatgacatcgccctggcccacagagctgccacagctgcccggcccccagcccctcctccagccccccagccccccagccccacccccagccccccccggcccaccctggccagagaagataatgaagaagatgaagatgagcccacagaaacagagaccagcggggagcagctgggcatcagtgacaatggaggcctgtttgtgatggatgaagatgccaccctgcaggacctgccccccttctgtgagagtgaccctgagagcacagatgatggcagcctgtctgaggagaccccagctggcccccccacctgcagcgtgcccccagccagcgccctgcccacccagcagtatgccaagagcctgcctgtgtctgtgcctgtgtggggcttcaaggagaagaggacagaggcccggagcagtgatgaggagaatggaccacccagcagcccagacctggacagaattgctgcctccatgagggccctggtgctgcgggaggccgaggacacccaggtgtttggagacctgccccggccccggctgaacaccagtgacttccagaagctgaagaggaagtactag

SEQ ID NO: 20311 - DNA, 906 bp, synthetic construct; identical to SEQ ID NO: 19231
  source 1..906: mol_type = other DNA; note = Synthetic coding sequence

SEQ ID NO: 20312 - DNA, 612 bp, synthetic construct
  source 1..612: mol_type = other DNA; note = Synthetic coding sequence
atggccgaggtgcaggtgctggtgctggatggccggggccacctgctgggccgcctggccgccatcgtggccaagcaggtgctgctgggcaggaaggtggtggtggtgcgctgtgagggcatcaacatcagcggcaacttctacagaaacaagctgaagtacctggccttcctgaggaagaggatgaacaccaaccccagccggggcccctaccacttccgggcccccagccgcatcttctggaggacagtgcggggcatgctgccccacaagaccaagaggggccaggccgccctggaccggctgaaggtgtttgatggcatccccccaccctatgacaagaagaagaggatggtggtgcctgctgccctgaaggtggtgcggctgaagcccaccaggaagtttgcctacctgggccgcctggcccacgaggtgggctggaagtaccaggccgtgacagccaccctggaggagaagaggaaggagaaggccaagatccactacaggaagaagaagcagctgatgaggctgaggaagcaggccgagaagaatgtggagaagaagattgacaagtacacagaggtgctgaagacccacggcctgctggtgtag

SEQ ID NO: 20313 - DNA, 690 bp, synthetic construct; identical to SEQ ID NO: 18357
  source 1..690: mol_type = other DNA; note = Synthetic coding sequence

SEQ ID NO: 20314 - DNA, 2283 bp, synthetic construct
  source 1..2283: mol_type = other DNA; note = Synthetic coding sequence
atgatggaggagagagctgctgctgctgtggccgctgctgccagcagctgccggcccctgggcagcggggccggccctggccccactggagctgcccctgtgtctgccccagcccctggccctggccctgctgggaagggcggcggcggcggcggcagccctggccccacagctggccctgagcccctgagcctgcccggcatcctgcacttcatccagcacgagtgggccaggtttgaagctgagaaggcccgctgggaggccgagagagctgagctgcaggcccaggtggccttcctgcagggcgagaggaagggccaggagaacctgaagacagacctggtgcggcgcatcaagatgctggagtatgccctgaagcaggagcgggccaagtaccacaagctgaagtttggaacagacctgaaccagggcgagaagaaggcagatgtgtctgagcaggtgtccaatggacctgtggagagcgtgaccctggagaacagccccctggtgtggaaggagggccggcagctgctgcggcagtacctggaggaggtgggctacacagacaccatcctggacatgaggagcaagagggtgcgcagcctgctgggccgcagcctggagctgaatggagctgtggagcccagcgagggcgccccccgggcccctcctggccctgctggcctgagcggcggggagagcctgctggtgaagcagatcgaggagcagatcaagagaaatgctgctgggaaggatggcaaggagcggctgggcggctctgtgctgggccagatccccttcctgcagaactgtgaagatgaggacagtgatgaagatgatgagctggacagcgtgcagcacaagaagcagagggtgaagctgcccagcaaggccctggtgcctgagatggaggatgaagatgaagaagatgacagtgaagatgccatcaatgaatttgacttcctgggcagcggggaggatggagagggcgccccagacccccggcgctgcaccgtggatggcagcccccatgagctggagagcagaagagtgaagctgcagggcatcctggccgacctgagagatgtggatggcctgccccccaaggtgactggacctcctcctggcaccccccagccccggccccatgagggcagctttggcttcagcagtgatgtgttcatcatggacaccatcggcggcggggaggtgtccctgggggacctggccgacctgactgtgaccaatgacaatgacctgagctgtgacctgagtgacagcaaggatgccttcaagaagacctggaaccccaagttcaccctgcggagccactatgatggcatccgcagcctggccttccaccacagccagagcgccctgctgacagcctctgaagatggcaccctgaagctgtggaacctgcagaaggctgtgacagccaagaagaatgctgccctggatgtggagcccatccacgccttccgggcccaccggggccctgtgctggccgtggccatgggcagcaacagcgagtactgctacagcggcggcgcagatgcctgcatccacagctggaagatcccagacctgtccatggacccctatgatggctatgaccccagcgtgctgagccacgtgctggagggccatggagatgctgtgtggggcctggccttcagccccaccagccagaggctggccagctgcagcgcagatggcaccgtgcgcatctgggaccccagcagcagcagccctgcctgcctgtgcaccttccccacagccagcgagcacggcgtgcccacctctgtggccttcaccagcacagagcccgcccacatcgtggccagcttccgcagcggggacacagtgctgtatgacatggaggtgggcagcgccctgctgaccctggagagccggggcagcagcggccccacccagatcaaccaggtggtgagccaccccaaccagcccctgaccatcacagcccatgatgaccggggcatccgcttcctggacaacagaacaggcaagcctgtgcacagcatggtggcccacctggatgctgtgacctgcctggccgtggaccccaatggagccttcctgatgagcggcagccatgactgcagcctgcggctgtggagcctggacaacaagacctgtgtgcaggagatcacagcccacaggaagaagcatgaggaggccatccatgctgtggcctgccaccccagcaaggccctgattgccagcgctggagcagatgccctggccaaggtgtttgtgtag

SEQ ID NO: 20315 - DNA, 327 bp, synthetic construct
  source 1..327: mol_type = other DNA; note = Synthetic coding sequence
atgaccccagaggagctgcagaagcgggaggaggaggagttcaacacaggccccctgtctgtgctgacccagagcgtgaagaacaacacccaggtgctgatcaactgcaggaacaacaagaagctgctgggccgggtgaaggcctttgacagacactgcaacatggtgctggagaatgtgaaggagatgtggacagaggtgcccaagagcggcaagggcaagaagaagagcaagcctgtgaacaaggaccgctacatcagcaagatgttcctgcggggggacagcgtgattgtggtgctgaggaaccccctgattgctgggaagtag

SEQ ID NO: 20316 - DNA, 1275 bp, synthetic construct
  source 1..1275: mol_type = other DNA; note = Synthetic coding sequence
atggtgcagaccctgtactacagcgctgaccacaagctgctggatggcaacctgctggatggccaggccgaggtgtttggaagtgatgatgaccacatccagtttgtgcagaagaagcccccaagagaaaatggccacaagcagatcagcagcagcagcacaggctgcctgagcagccccaatgccaccgtgcagagccccaagcatgagtggaagatcgtggccagcgagaagaccagcaacaacacctacctgtgcctggccgtgctggatggcatcttctgtgtgatcttcctgcacggcaggaacagcccccagagcagccccaccagcacccccaagctgagcaagagcctgagctttgagatgcagcaggatgagctgattgagaagcccatgagccccatgcagtatgcccggagcggcctgggcacagctgagatgaatggcaagctgattgctgctgggggctacaaccgggaggagtgcctgaggacagtggagtgctacaacccccacacagaccactggagcttcctggcccccatgaggaccccccgggcccgcttccagatggctgtgctgatgggccagctgtatgtggtgggcggcagcaatggccacagtgatgacctgagctgtggggagatgtatgacagcaacattgatgactggatccctgtgcctgagctgcggaccaaccgctgcaatgctggggtgtgtgccctgaatggcaagctgtacatcgtgggcggcagtgacccctacggccagaagggcctgaagaactgtgatgtgtttgatcctgtgaccaagctgtggaccagctgtgcccccctgaacatcagaagacaccagagcgctgtgtgtgagctgggcggctacctgtacatcattggaggagctgagagctggaactgcctgaacacagtggagcgctacaaccctgagaacaacacctggaccctcatcgcccccatgaatgtggccaggagaggagctggggtggccgtgctgaatggcaagctgtttgtgtgtggcggctttgatggcagccacgccatcagctgtgtggagatgtatgaccccaccagaaatgagtggaagatgatgggcaacatgaccagccccaggagcaatgccggcatcgccaccgtgggcaacaccatctatgctgtgggcggctttgatggaaatgagttcctgaacacagtggaggtgtacaacctggagagcaatgagtggagcccctacaccaagatcttccagttctag

SEQ ID NO: 20317 - DNA, 483 bp, synthetic construct
  source 1..483: mol_type = other DNA; note = Synthetic coding sequence
atgaacaatgcccgctacctgtggaagaggatccccccagccatcaagagcgccaacagcgagctgggcggcatctggagcgtgggccagaggatctggcagagggacttccctggcatctacaccaccatcaatgcccaccagtggagcgagaccgtgcagcccatcatggaggccctgagagatgccacccggcggcgggcctttgccctggtgtcccaggcctacaccagcatcatcgcagatgactttgctgcctttgtgggcctgcctgtggaggaggccgtgaagggcatcctggagcagggctggcaggccgacagcaccaccaggatggtgctgcccaggaagcctgtggccggggccctggatgtgtccttcaacaagttcatccccctgtctgagcccgcccctgtgccccccatccccaatgagcagcagctggcccggctgacagattatgtggccttcctggagaactag

SEQ ID NO: 20318 - DNA, 927 bp, synthetic construct
  source 1..927: mol_type = other DNA; note = Synthetic coding sequence
atgatggaggagatcagcatcatggtggcctatgatgcccacgtgttcagccagctgcatgatgaggacttcctgaccagcctggtggccatcagcaagcccaggtccatggtgcccaccaagaagctgaagaagtatgagaaggagtaccagaccatgagggagagccagctgcagcaggaggaccccatggaccgctacaagcgggagaacagaaggctgcaggaggcctccatgaggctggagcaggagaatgatgacctggcccacgagctggtgaccagcaagatcgccctgagaaatgacctggaccaggccgaggacaaggcagatgtgctgaacaaggagctgctgctgaccaagcagaggctggtggagacagaggaggagaagaggaagcaggaggaggagacagcccagctgaaggaggtgttcaggaagcagctggagaaggccgagtatgagatcaagaagaccacagccatcatcgccgagtacaagcagatctgcagccagctgagcacccggctggagaagcagcaggccgccagcaaggaggagctggaggtggtgaagggcaagatgatggcctgcaagcactgcagcgacatcttcagcaaggagggcgccctgaagctggccgccaccggccgggaggaccagggcattgaaacagatgatgagaaggacagcctgaagaagcagctgcgggagatggagctggagctggcccagaccaagctgcagctggtggaggccaagtgcaagatccaggagctggagcaccagagaggagccctgatgaatgagatccaggccgccaagaacagctggttcagcaagaccctgaacagcatcaagacagccaccggcacccagcccctgcagcctgcccctgtgacccagccccccaaggagagcacctag

SEQ ID NO: 20319 - DNA, 3600 bp, synthetic construct; identical to SEQ ID NO: 18409
  source 1..3600: mol_type = other DNA; note = Synthetic coding sequence

SEQ ID NO: 20320 - DNA, 2337 bp, synthetic construct
  source 1..2337: mol_type = other DNA; note = Synthetic coding sequence
cgcatccaggagcagctggagagcagcttcaccggcctgacagatgagaaggtgaaggcctacctgagcctgcacccccaggtgctggatgaatttgtgtctgagagcgtgtctgctgagaccgtggagaagtggctgaagaggaagaacaacaagtcagaagatgaaagtgcccccaaggaggtgagccgctaccaggacaccaacatgcagggcgtggtgtatgagctgaacagctacatcgagcagaggctggacacaggaggagacaaccagctgctgctgtatgagctgagcagcatcatcaagatcgccaccaaggcagatggctttgccctgtacttcctgggggagtgcaacaacagcctgtgcatcttcaccccacctggcatcaaggagggcaagcccaggctcatcccagctggccccatcacccagggcaccaccgtgtctgcctacgtggccaagagcaggaagaccctgctggtggaggacatcctgggagatgagcgcttcccccggggcaccggcctggagagcggcacccgcatccagagcgtgctgtgcctgcccatcgtgacagccatcggggacctgattggcatcctggagctgtaccgccactggggcaaggaggccttctgcctgagccaccaggaggtggccacagccaacctggcctgggcctctgtggccatccaccaggtgcaggtgtgccggggcctggccaagcagacagagctgaatgacttcctgctggatgtgtccaagacctactttgacaacatcgtggccatcgacagcctgctggagcacatcatgatctatgccaagaacctggtgaatgctgacagatgtgccctcttccaggtggaccacaagaacaaggagctgtacagcgacctgtttgatattggagaggagaaggagggcaagcctgtgttcaagaagaccaaggagatccgcttcagcattgaaaaaggaattgctggccaggtggccaggactggagaggtgctgaacatcccagatgcctatgctgacccccgcttcaaccgggaggtggacctgtacacaggctacaccaccaggaacatcctgtgcatgcccatcgtgtcccggggcagcgtcatcggcgtggtgcagatggtgaacaagatcagcggcagcgccttcagcaagacagatgagaacaacttcaagatgtttgctgtgttctgtgccctggccctgcactgtgccaacatgtaccaccgcatccgccacagcgagtgcatctacagagtgaccatggagaagctgagctaccacagcatctgcaccagcgaggagtggcagggcctgatgcagttcaccctgcctgtgcggctgtgcaaggagattgagctgttccactttgacatcggcccctttgagaacatgtggccaggcatctttgtgtacatggtgcacaggagctgtggcaccagctgctttgagctggagaagctgtgccgcttcatcatgtctgtgaagaagaactacagaagagtgccctaccacaactggaagcatgctgtgacagtggcccactgcatgtatgccatcctgcagaacaaccacaccctcttcacagacctggagaggaagggcctgctgattgcctgcctgtgccacgacctggaccaccggggcttcagcaacagctacctgcagaagtttgaccaccccctggccgccctgtacagcaccagcaccatggagcagcaccacttcagccagacagtgtccatcctgcagctggagggccacaacatcttcagcaccctgagcagcagtgaatatgagcaggtgctggagatcatcaggaaggccatcatcgccacagacctggccctgtacttcggcaacaggaagcagctggaggagatgtaccagacaggcagcctgaacctgaacaaccagagccaccgggacagagtgattggcctgatgatgacagcctgtgacctgtgcagcgtgaccaagctgtggcctgtgaccaagctgacagccaatgacatctatgcagagttctgggccgagggagatgagatgaagaagctgggcatccagcccatccccatgatggaccgggacaagaaggatgaggtgccccagggccagctgggcttctacaatgctgtggccatcccctgctacaccaccctgacccagatcctgcccccaacagagcccctgctgaaggcctgccgggacaacctgagccagtgggagaaggtgatccggggggaggagacagccacctggatcagcagccccagcgtggcccagaaggccgccgcctctgaagattag

SEQ ID NO: 20321 - DNA, 1281 bp, synthetic construct; identical to SEQ ID NO: 19686
  source 1..1281: mol_type = other DNA; note = Synthetic coding sequence

SEQ ID NO: 20322 - DNA, 1779 bp, synthetic construct
  source 1..1779: mol_type = other DNA; note = Synthetic coding sequence
atggatgtgatgctggagaactactgccacctgatctctgtgggctgccacatgaccaagccagatgtgatcctgaagctggagcggggggaggagccctggaccagctttgctggccacacctgcctggaggagaactggaaggccgaggacttcctggtgaagttcaaggagcaccaggagaagtacagccgctctgtggtgtccatcaaccacaagaagctggtgaaggagaagagcaagatctatgagaagaccttcaccctgggcaagaaccctgtgaacagcaagaacctgcccccagaatatgacacccacggccgcatcctgaagaatgtgtctgagctgatcatcagcaacctgaacccagccaggaagaggctgtctgagtacaacggctacggcaagagcctgctgagcaccaagcaggagaccacccaccctgaggtgaagagccacaaccagagcgcccgggccttcagccacaatgaggtgctgatgcagtaccagaagacagagaccccagcccagagctttggctacaatgactgtgagaagagcttcctgcagaggggcggcctcatcacccacagccggccctacaagggggagaaccccagcgtgtacaacaagaagagaagagccaccaacatcgagaagaagcacacctgcaatgaatgtgggaagagcttctgcaggaagtctgtgctgatcctgcaccagggcatccacagcgaggagaagccctaccagtgccaccagtgtggaaatgccttccggaggaagagctacctgattgaccaccagaggacccacactggagagaagccctttgtgtgcaatgaatgtgggaagagcttccggctgaagacagccctgacagaccaccagaggacccacactggagagaagagctatgaatgtctgcagtgcagaaatgccttccggctgaagagccacctgatccgccaccagaggacccacactggagagaagccctatgaatgtaatgactgtgggaagagcttccggcagaagaccaccctgagcctgcaccagaggatccacactggagagaagccctacatctgcaaggaatgtgggaagagcttccaccagaaggccaacctgactgtgcaccagaggacccacactggagagaagccctacatctgcaatgaatgtgggaagagcttcagccagaagaccaccctggccctgcacgagaagacccacaatgaggagaagccctacatctgcagtgaatgtgggaagagcttccggcagaagaccaccctggtggcccaccagaggacccacactggagagaagagctatgaatgtccccactgcggcaaggccttcaggatgaagagctacctgattgaccaccacaggacccacactggagagaagccctatgaatgtaatgaatgtgggaagagcttcagccagaagaccaacctgaacctgcaccagaggatccacactggagagaagccctacgtgtgcaatgaatgtgggaagagcttccggcagaaggccaccctgactgtgcaccagaagatccacacaggccagaagagctatgaatgtccccagtgtgggaaggccttcagcaggaagagctacctgatccaccaccagaggacccacactggagagaagccctacaagtgcagtgaatgtgggaagtgcttccggcagaagaccaacctgattgtgcaccagaggacccacactggaggagaagatggcctgaccggctgcctgtcctag

SEQ ID NO: 20323 - DNA, 645 bp, synthetic construct
  source 1..645: mol_type = other DNA; note = Synthetic coding sequence
atggaggtgactggagtgtctgcccccaccgtgaccgtcttcatcagcagcagcctgaacaccttccgctctgagaagcgctacagccgcagcctgaccatcgccgagttcaagtgcaagctggagctgctggtgggcagccctgccagctgcatggagctggagctgtatggagtggatgacaagttctacagcaagctggaccaggaggatgccctgctgggcagctaccctgtggatgatggctgccgcatccacgtgattgaccacagcggggcccggctgggggagtatgaagatgtgtcccgggtggagaagtacaccatcagccaggaggcctatgaccagaggcaggacacagtgcgctccttcctgaagaggagcaagctgggccgctacaatgaggaggagcgggcccagcaggaggccgaggccgcccagaggctggccgaggagaaggcccaggccagcagcatccctgtgggcagccgctgtgaggtgcgggccgccggccagagcccccggcggggcaccgtgatgtatgtgggcgcctggctggccggccctgtgcccggcagccgggcccccaggcctggaggaaatgtgggcggcaccgtggagccccggcggcccaggtctgcctag

SEQ ID NO: 20324 - DNA, 189 bp, synthetic construct
  source 1..189: mol_type = other DNA; note = Synthetic coding sequence
atgagcatccagtggaagacccggcagctgcagagcaagctgcatgaagctgacatcgtggtgctgggcagccccaagccagaggagatccccctgacctggatccagcccggcaccaccgtgctgaactgcagccatgacttcctgtctgagagcctcatcatcatccggaggatggccatcttctag

SEQ ID NO: 20325 - DNA, 1269 bp, synthetic construct
  source 1..1269: mol_type = other DNA; note = Synthetic coding sequence
atgtaccccaaccccctcatctactgcacctgctgggacccctggaacctgggccccaggaagctgatcaagaccccccagctgcccaggaagaacagcacaggcagcagcaagctgacccccctggtgcctgcccccaagaaccacaactacctgcagcccaccaagcctgtggtgagccccaagatgaagatccacagcgcccggcaggaggagaccaacaagagcttctatgaggtgatcaacgtgtccccaggctaccagctggtgaggaaccgggagcagatctctgtgaccctgggagatgagatgtttgacaggaagaagcgctgggagagcgagatcccagacaagggccgcttcagcaggaccaacatcatcagtgacctggaggagcagatcagcgagctgacagccatcatcgagcagatgaacagagaccaccagagcgcccagaagctgctgagcagcgagatggacctgcgctgtgccgagatgaagcagaactttgagaacaagaaccgggagctgaaggaggcccatgaagctgagctgtctgagctggagaacaactacaaggccgccctgaaggccgagaagctggccgcccaggagaagctggaggagatgggcaaggagtacaagtacctgaagaacatgttccgcacctaccaggacagcatctatgatgagatggaggagaagtggagcaagcagaaggccaagtggaagaaggatgagaagtttgagcgggagaacatcctgctgcagcagaagaagaagatgaccaagaagtttgagatggagagcggggaggaggacaagaagatcaatgaaagctgcagcgctgtgtttgagaacttcatccaggagaaggaggagctgctgaagcagcaccagagcgacaccctgcagctggaggagctgaggaagaccaaggaggtgatgcaggaggagctgcacgcccaggccctgatcctggagagcctgaacaccaacctgtactacacccagctggagctgcagaaggagaaggccatcgtgggcaacctggagaagatgctgcagaccaagtttgctgagacagaggagaagtacaagcacaccatccagatcctgacagaggagaacatccacctgaagcagaagatcatcagcaagaatgaggagatctgtgagggctgcagcggccgcctggccagcatcaccgtgtccaaggatgacagcgacacagtgcaggacggcagcaagaagggccaggagagctag

SEQ ID NO: 20326 - DNA, 1380 bp, synthetic construct
  source 1..1380: mol_type = other DNA; note = Synthetic coding sequence
atggtgcccttcggcccctttgccttcatgcctgggaagctggtgcacaccaatgaggtgacagtgctgctgggggacaactggtttgccaagtgcagcgccaagcaggccgtgggcctggtggagcacaggaaggagcacgtgaggaagaccattgatgacctgaagaaggtgatgaagaactttgagagccgggtggagttcacagaggacctgcagaagatgtctgatgctgctggggacatcgtggacatccgggaggagatcaagtgtgactttgagttcaaggccaagcacagaattgcccacaagccccacagcaagcccaagaccagtgacatctttgaagctgacatcgccaatgatgtgaagagcaaggacctgctggccgacaaggagctgtgggcccggctggaggagctggagcggcaggaggagctgctgggggagctggacagcaagccagacacagtgattgccaatggagaggacaccaccagcagcgaggaggagaaggaggacaggaacaccaacgtgaatgccatgcaccaggtgacagacagccacaccccctgccacaaggatgtggccagcagcgagcccttcagcggccaggtgaacagccagctgaactgcagcgtgaatggcagcagcagctaccacagtgatgatgatgatgatgatgatgatgatgatgatgatgacaacattgatgatgatgatggagacaatgaccacgaggccctgggcgtgggggacaacagcatccccaccatctacttcagccacacagtggagcccaagagggtgcgcatcaacacaggcaagaacaccaccctgaagttcagcgagaagaaggaggaggccaagaggaagaggaagaacagcactggaagtggccacagcgcccaggagctgcccaccatccgcaccccagctgacatctaccgggcctttgtggatgtggtgaatggagaatatgtgcccaggaagagcatcctgaagagccgcagccgggagaacagcgtgtgcagcgacaccagcgagagcagcgctgctgagtttgatgaccggcggggcgtgctgcggagcatcagctgtgaggaggccacctgcagcgacaccagcgagagcatcctggaggaggagccccaggagaaccagaagaagctgctgcccctgtctgtgaccccagaggccttcagcggcaccgtcatcgagaaggagtttgtgagccccagcctgaccccacctccagccatcgcccacccagccctgcccaccatccctgagaggaaggaggtgctgctggaggccagcgaggagaccgggaagagggtgtccaagttcaaggccgcccggctgcagcagaaggactag

SEQ ID NO: 20327 - DNA, 1068 bp, synthetic construct
  source 1..1068: mol_type = other DNA; note = Synthetic coding sequence
atgagggagatcgtgcacatccaggccggccagtgtggcaaccagatcggggccaagttctgggaggtgatcagtgatgagcacggcatcgaccccaccggcagctaccatggagacagcgacctgcagctgctgacccacagcctgggcggcggcactggaagtggcatgggcaccctgctgatcagcaagatccgggaggagtacccagaccgcatcatgaacaccttctctgtgatgcccagccccaaggtgtctgacacagtggtggagccctacaatgccaccctgtctgtgcaccagctggtggagaacacagatgagacctacagcattgacaatgaggccctgtatgacatctgcttccgcaccctgaagctgaccacccccacctacggggacctgaaccacctggtgtctgccaccatgtctggagtgaccacctgcctgcgcttccctggccagctgaatgctgacctgaggaagctggccgtgaacatggtgcccttcccccggctgcacttcttcatgcctggctttgcccccctgaccagccggggcagccagcagtaccgggccctgactgtgcctgagctgacccagcagatgtttgacagcaagaacatgatggccgcctgtgaccccaggcatggccgctacctgactgtggccgccatcttccggggccgcatgtccatgaaggaggtggatgagcagatgctgaatgtgcagaacaagaacagcagctactttgtggagtggatccccaacaacgtgaagacagctgtgtgtgacatccccccccggggcctgaagatgtctgccaccttcatcggcaacagcacagccatccaggagctgttcaagaggatcagcgagcagttcaccgccatgttccggaggaaggccttcctgcactggtacacaggagagggcatggatgagatggagttcacagaagctgagagcaacatgaatgacctggtgtctgagtaccagcagtaccaggatgccacagcagatgagcagggcgagtttgaggaggaggagggggaggatgaggcctag

SEQ ID NO: 20328 - DNA, 255 bp, synthetic construct; identical to SEQ ID NO: 19329
  source 1..255: mol_type = other DNA; note = Synthetic coding sequence

SEQ ID NO: 20329 - DNA, 1416 bp, synthetic construct
  source 1..1416: mol_type = other DNA; note = Synthetic coding sequence
atgaagatgcaggtgttctgcaagagcattgaggacatgacagtgaaggccgagcagagccagcaggaggccgccaagaagcatgaggaggagaagaaggagctggagaggaagctgagtgacctggagaagaagatggagaccagccacaaccagtgccaggagctgaaggcccgctatgaaagagccaccagcgagaccaagaccaagcatgaggagatcctgcagaacctgcagaagaccctgctggacacagaggacaagctgaagggggcccgggaggagaacagcggcctgctgcaggagctggaggagctgaggaagcaggccgacaaggccaaggccgcccagacagcagaagatgccatgcagatcatggagcagatgaccaaggagaagacagagaccctggccagcctggaggacaccaagcagaccaatgccaagctgcagaatgagctggacaccctgaaggagaacaacctgaagaatgtggaggagctgaacaagagcaaggagctgctgactgtggagaaccagaagatggaggagttcaggaaggagattgagaccctgaagcaggccgccgcccagaagagccagcagctgagcgccctgcaggaggagaatgtgaagctggccgaggagctgggccgcagcagagatgaggtgaccagccaccagaagctggaggaggagaggtctgtgctgaacaaccagctgctggagatgaagaagcgggagagcaagttcatcaaggatgctgatgaggagaaggccagcctgcagaagagcatcagcatcaccagcgccctgctgacagagaaggatgctgagctggagaagctgagaaatgaggtgacagtgctgcggggagaaaatgccagcgccaagagcctgcacagcgtggtgcagaccctggagagtgacaaggtgaagctggagctgaaggtgaagaacctggagctgcagctgaaggagaacaagaggcagctgagcagcagcagcggcaacacagacacccaggctgatgaagatgagcgggcccaggagagccaggtgatgattgacttcctgaacagcgtgattgtggacctgcagaggaagaaccaggacctgaagatgaaggtggagatgatgtctgaggccgccctgaatggaaatggagatgacctgaacaactatgacagtgatgaccaggagaagcagagcaagaagaagcccaggctcttctgtgacatctgtgactgctttgacctgcatgacacagaggactgccccacccaggcccagatgtctgaggaccccccccacagcacccaccacggcagcagaggagaggagcggccctactgtgagatctgtgagatgtttggccactgggccaccaactgcaatgatgatgagaccttctag

SEQ ID NO: 20330 - DNA, 1602 bp, synthetic construct
  source 1..1602: mol_type = other DNA; note = Synthetic coding sequence
atgagcagctgtgtgagcagccagcccagcagcaacagagctgccccccaggatgagctgggcggccggggcagcagcagcagcgagagccagaagccctgtgaggccctgcggggcctgagcagcctgagcatccacctgggcatggagagcttcatcgtggtgacagaatgtgagcccggctgtgctgtggacctgggcctggcccgggaccggcccctggaggctgatggccaggaggtgcccctggacaccagcggcagccaggcccggccccacctgagcggcaggaagctgagcctgcaggagaggagccagggcggcctggccgccggcggcagcctggacatgaatggccgctgcatctgccccagcctgccctacagccctgtgagcagcccccagagcagcccccggctgccccggcggcccaccgtggagagccaccacgtgtccatcaccggcatgcaggactgtgtgcagctgaaccagtacaccctgaaggatgaaattggcaagggcagctatggagtggtgaagctggcctacaatgaaaatgacaacacctactatgccatgaaggtgctgagcaagaagaagctgatccggcaggccggcttcccccggcggcccccaccccggggcaccaggcctgcccctgggggctgcatccagccccggggccccatcgagcaggtgtaccaggagatcgccatcctgaagaagctggaccaccccaacgtggtgaagctggtggaggtgctggatgaccccaatgaagaccacctgtacatggtgtttgagctggtgaaccagggccctgtgatggaggtgcccaccctgaagcccctgtctgaggaccaggcccgcttctacttccaggacctgatcaagggcatcgagtacctgcactaccagaagatcatccaccgggacatcaagcccagcaacctgctggtgggggaggatggccacatcaagattgctgactttggagtgtccaatgagttcaagggcagtgatgccctgctgagcaacacagtgggcaccccagccttcatggcccctgagagcctgtctgagaccaggaagatcttcagcggcaaggccctggatgtgtgggccatgggcgtgaccctgtactgctttgtgtttggccagtgccccttcatggatgagcgcatcatgtgcctgcacagcaagatcaagagccaggccctggagttcccagaccagcctgacattgctgaggacctgaaggacctgatcaccaggatgctggacaagaaccctgagagcagaattgtggtgcctgagatcaagctgcacccctgggtgaccaggcatggagctgagcccctgcccagtgaagatgagaactgcaccctggtggaggtgacagaggaggaggtggagaacagcgtgaagcacatccccagcctggccaccgtcatcctggtgaagaccatgatcaggaagaggagctttggaaacccctttgagggcagccggcgggaggagaggagcctgagcgcccctggcaacctgctgaccaagaagcccacccgggagtgtgagagcctgtctgagctgaagacctag

SEQ ID NO: 20331 - DNA, 1671 bp, synthetic construct
  source 1..1671: mol_type = other DNA; note = Synthetic coding sequence
atgagcagctgtgtgagcagccagcccagcagcaacagagctgccccccaggatgagctgggcggccggggcagcagcagcagcgagagccagaagccctgtgaggccctgcggggcctgagcagcctgagcatccacctgggcatggagagcttcatcgtggtgacagaatgtgagcccggctgtgctgtggacctgggcctggcccgggaccggcccctggaggctgatggccaggaggtgcccctggacaccagcggcagccaggcccggccccacctgagcggcaggaagctgagcctgcaggagaggagccagggcggcctggccgccggcggcagcctggacatgaatggccgctgcatctgccccagcctgccctacagccctgtgagcagcccccagagcagcccccggctgccccggcggcccaccgtggagagccaccacgtgtccatcaccggcatgcaggactgtgtgcagctgaaccagtacaccctgaaggatgaaattggcaagggcagctatggagtggtgaagctggcctacaatgaaaatgacaacacctactatgccatgaaggtgctgagcaagaagaagctgatccggcaggccggcttcccccggcggcccccaccccggggcaccaggcctgcccctgggggctgcatccagccccggggccccatcgagcaggtgtaccaggagatcgccatcctgaagaagctggaccaccccaacgtggtgaagctggtggaggtgctggatgaccccaatgaagaccacctgtacatggtgtttgagctggtgaaccagggccctgtgatggaggtgcccaccctgaagcccctgtctgaggaccaggcccgcttctacttccaggacctgatcaagggcatcgagtacctgcactaccagaagatcatccaccgggacatcaagcccagcaacctgctggtgggggaggatggccacatcaagattgctgactttggagtgtccaatgagttcaagggcagtgatgccctgctgagcaacacagtgggcaccccagccttcatggcccctgagagcctgtctgagaccaggaagatcttcagcggcaaggccctggatgtgtgggccatgggcgtgaccctgtactgctttgtgtttggccagtgccccttcatggatgagcgcatcatgtgcctgcacagcaagatcaagagccaggccctggagttcccagaccagcctgacattgctgaggacctgaaggacctgatcaccaggatgctggacaagaaccctgagagcagaattgtggtgcctgagatcaagctgcacccctgggtgaccaggcatggagctgagcccctgcccagtgaagatgagaactgcaccctggtggaggtgacagaggaggaggtggagaacagcgtgaagcacatccccagcctggccaccgtcatcctggtgaagaccatgatcaggaagaggagctttggaaacccctttgagggcagccggcgggaggagaggagcctgagcgcccctggcaacctgctgaccaagaagcccacccgggagtgtgagagcctgtctgagctgaagggcaccaagaagaagaagggcctggacagcatgaccagcacagtggccgccggctggctggaccggcgggtgtag

SEQ ID NO: 20332 - DNA, 309 bp, synthetic construct
  source 1..309: mol_type = other DNA; note = Synthetic coding sequence
atgctgtctgaggaggagaaggaggagctgaaggccgagctggtgcagctggaggatgagatcaccaccctgcggcaggtgctgagcgccaaggagcggcacctggtggagatcaagcagaagctgggcatgaacctgatgaatgagctgaagcagaacttcagcaagtcctggcatgacatgcagaccaccacagcctacaagaagacccatgagaccctgagccatgctggccagaaggccacagctgccttcagcaatgtgggcacagccatcagcaagaagtttggagacatgaggaggaagtag

SEQ ID NO: 20333 - DNA, 615 bp, synthetic construct
  source 1..615: mol_type = other DNA; note = Synthetic coding sequence
atggaggccgagcccaagggcctgctggagacagagcccctgcagggcacagatgaagatgctgtggccagcgctgacttcagctccatgctgtctgaggaggagaaggaggagctgaaggccgagctggtgcagctggaggatgagatcaccaccctgcggcaggtgctgagcgccaaggagcggcacctggtggagatcaagcagaagctgggcatgaacctgatgaatgagctgaagcagaacttcagcaagtcctggcatgacatgcagaccaccacagcctacaagaagacccatgagaccctgagccacgccggccagaaggccacagctgccttcagcaatgtgggcacagccatcagcaagaagtttggagacatgagctacagcatccgccacagcatctccatgcctgccatgaggaacagccccaccttcaagagctttgaggagcgggtggagaccaccgtgaccagcctgaagaccaaggtgggcggcaccaaccccaatggaggcagctttgaggaggtgctgagcagcacagcccacgccagcgcccagagcctggccggcggcagcaggaggaccaaggaggaggagctgcagtgctag

SEQ ID NO: 20334 - DNA, 369 bp, synthetic construct
  source 1..369: mol_type = other DNA; note = Synthetic coding sequence
tgatacctggtggccctgggctgcatcaagcccctgtgtgacctgctgactgtgatggacagcaagatcgtgcaggtggccctgaatggcctggagaacatcctgcggctgggggagcaggagagcaagcagaatggaattggcatcaacccctactgtgccctgattgaggaggcctacggcctggacaagattgagttcctgcagagccatgagaaccaggagatctaccagaaggcctttgacctgattgagcactactttggagtggaggaggatgaccccagcatcgtgccccaggtggatgagaaccagcagcagttcatcttccagcagcaggaggcccccatggatggcttccagctgtag

SEQ ID NO: 20335 - DNA, 1137 bp, synthetic construct
  source 1..1137: mol_type = other DNA; note = Synthetic coding sequence
atggaggtgaagcccccacctggccggccccagcctgacagcggcagaagaagaagaagaagaggagaggagggccatgaccccaaggagcctgagcagctgaggaagctgttcatcggcggcctgagctttgagaccacagatgacagcctgcgggagcactttgagaagtggggcaccctgacagactgtgtggtgatgagggacccccagaccaagaggagccggggcttcggctttgtgacctacagctgtgtggaggaggtggatgctgccatgtgtgcccggccccacaaggtggatggccgggtggtggagcccaagagagctgtgtcccgggaggacagcgtgaagccaggggcccacctgactgtgaagaagatctttgtgggcggcatcaaggaggacacagaggagtacaacctgcgggactactttgagaagtatggcaagattgagaccatcgaggtgatggaggaccggcagagcggcaagaagaggggctttgcctttgtgacctttgatgaccatgacacagtggacaagatcgtggtgcagaagtaccacaccatcaatggccacaactgtgaggtgaagaaggccctgagcaagcaggagatgcagagcgctggcagccagaggggccggggcggcggcagcggcaacttcatgggccggggcggcaactttggaggcggcggcggcaactttggccggggcggcaactttggaggccggggcggctatggaggcggcggcggcggcagccggggcagctatggaggaggagatggcggctacaacggctttggaggagatggcggcaactatggaggcggccctggctacagcagcagaggaggctatggaggcggcggccctggctacggcaaccagggcggcggctatggaggcggcggcggctatgatggctacaatgaaggaggcaactttggaggcggcaactatggaggcggcggcaactacaatgactttggaaactacagcggccagcagcagagcaactacggccccatgaagggcggcagctttggaggccgcagcagcggcagcccctacggcggcggctacggcagcggcggcggcagcggcggctacggcagccgccgcttctag

SEQ ID NO: 20336 - DNA, 3063 bp, synthetic construct
  source 1..3063: mol_type = other DNA; note = Synthetic coding sequence
atgaggcgcttcctgcggcccggccatgaccctgtgcgggagcggctgaagagggacctcttccagttcaacaagacagtggagcacggcttcccccaccagcccagcgccctgggctacagccccagcctgcgcatcctggccatcggcaccaggtctggggccatcaagctgtatggagcccctggggtggagttcatgggcctgcaccaggagaacaatgctgtgacccagatccacctgctgcccggccagtgccagctggtgaccctgctggatgacaacagcctgcacctgtggagcctgaaggtgaagggcggggccagcgagctgcaggaggatgagagcttcaccctgcggggccccccaggagctgcccccagcgccacccagatcaccgtggtgctgccccacagcagctgtgagctgctgtacctgggcacagagagcggaaatgtgtttgtggtgcagctgcctgccttccgggccctggaggacaggaccatcagcagtgatgctgtgctgcagaggctgcctgaggaggcccggcacagaagagtgtttgagatggtggaggccctgcaggagcacccccgggaccccaaccagatcctgattggctacagccggggcctggtggtgatctgggacctgcagggcagccgggtgctgtaccacttcctgagcagccagcagctggagaacatctggtggcagagagatggccgcctgctggtgtcctgccacagtgatggcagctactgccagtggcctgtgtcctctgaggcccagcagcctgagcccctgcggagcctggtgccctacggccccttcccctgcaaggccatcacccgcatcctgtggctgaccacccggcagggcctgcccttcaccatcttccagggcggcatgccccgggccagctatggagacagacactgcatcagcgtcatccatgatggccagcagacagcctttgacttcaccagccgggtgattggcttcaccgtgctgacagaagctgaccctgctgccacctttgatgacccctatgccctggtggtgctggccgaggaggagctggtggtgattgacctgcagacagctggctggccccctgtgcagctgccctacctggccagcctgcactgcagcgccatcacctgcagccaccacgtgagcaacatccccctgaagctgtgggagcgcatcatcgctgctggcagccggcagaatgcccacttcagcaccatggagtggcccattgatggcggcaccagcctgaccccagccccaccccagagggacctgctgctgaccggccatgaagatggcaccgtgcgcttctgggatgccagcggcgtgtgcctgcggctgctgtacaagctgagcacagtgcgggtcttcctgacagacacagaccccaatgaaaacttcagcgcccagggagaagatgagtggccacccctgaggaaggtgggcagctttgacccctacagtgatgacccccggctgggcatccagaagatcttcctgtgcaagtacagcggctacctggccgtggccggcacagctggccaggtgctggtgctggagctgaatgatgaagctgctgagcaggccgtggagcaggtggaggccgacctgctgcaggaccaggagggctaccgctggaagggccacgagcggctggccgcccggagcggccctgtgcgctttgagcccggcttccagccctttgtgctggtgcagtgccagcccccagctgtggtgaccagcctggccctgcacagcgagtggaggctggtggccttcggcaccagccacggcttcggcctgtttgaccaccagcagaggcggcaggtgtttgtgaagtgcaccctgcaccccagcgaccagctggccctggagggccccctgagccgggtgaagagcctgaagaagagcctgcggcagagcttccggaggatgaggaggagccgggtgagcagcaggaagaggcaccctgctggccccccaggagaggcccaggagggcagcgccaaggccgagcggcccggcctgcagaacatggagctggcccctgtgcagaggaagattgaggcccggtctgctgaggacagcttcaccggctttgtgaggaccctgtactttgctgacacctacctgaaggacagcagccgccactgccccagcctgtgggccggcaccaacggcggcaccatctatgccttcagcctgcgggtgcccccagctgagaggaggatggatgagcctgtgcgggcagagcaggccaaggagatccagctgatgcaccgggcccctgtggtgggcatcctggtgctggatggccacagcgtgcccctgcctgagcccctggaggtggcccatgacctgagcaagagcccagacatgcagggcagccaccagctgctggtggtgtctgaggagcagttcaaggtgttcaccctgcccaaggtgtctgccaagctgaagctgaagctgacagccctggagggcagccgggtgcggcgggtgtctgtggcccacttcggcagccggcgggcagaagattatggagagcaccacctggccgtgctgaccaacctgggggacatccaggtggtgtccctgcccctgctgaagccccaggtgcgctacagctgcatcagaagagaagatgtgtctggcatcgccagctgtgtgttcaccaagtatggccagggcttctacctgatcagccccagcgagtttgagcgcttcagcctgagcaccaagtggctggtggagccccgctgcctggtggacagcgctgagaccaagaaccacaggcctggaaatggagctggccccaagaaggcccccagccgggccagaaattctggcacccagagtgatggagaggagaagcagcccggcctggtgatggagcgggccctgctgagtgatgagcgggtgctgaaggagatccagagcaccctggagggggaccggggcagcggcaactggaggagccacagagctgctgtgggctgcagcctgagcaatggaggagctgagtag

SEQ ID NO: 20337 - DNA, 1458 bp, synthetic construct
  source 1..1458: mol_type = other DNA; note = Synthetic coding sequence
atggctgctgagctgtatgccccagccagcgctgctgctgctgacctggccaacagcaatgctggagctgctgtgggcaggaaggccggccccaggagcccccccagcgccccagccccagcccctcctcctccagccccagccccacccaccctgggcaacaaccaccaggagagccctggctggcgctgctgccggcccaccctgcgggagagaaatgccctgatgttcaacaatgagctgatggctgatgtgcactttgtggtgggccccccaggggccaccaggacagtgcctgcccacaagtatgtgctggccgtgggcagcagcgtcttctacgccatgttttatggagacctggccgaggtgaagtctgagatccacatcccagatgtggagcctgctgccttcctgatcctgctgaagtacatgtacagtgatgaaattgacctggaggccgacacagtgctggccaccctgtatgctgccaagaagtacatcgtgcctgccctggccaaggcctgtgtgaacttcctggagaccagcctggaggccaagaatgcctgtgtgctgctgagccagagccggctgtttgaggagcctgagctgacccagcgctgctgggaggtgattgatgcccaggccgagatggccctgcggtctgagggcttctgtgaaattgaccggcagaccctggagatcatcgtgacccgggaggccctgaacaccaaggaggccgtggtgtttgaagctgtgctgaactgggccgaggccgagtgcaagaggcagggcctgcccatcacccccaggaacaagagacatgtgctgggccgggccctgtacctggtgcgcatccccaccatgaccctggaggagtttgccaatggagctgcccagagcgacatcctgaccctggaggagacccacagcatcttcctgtggtacacagccaccaacaagccccggctggacttccccctgaccaagaggaagggcctggccccccagcgctgccaccgcttccagagcagcgcctaccgcagcaaccagtggagataccggggccgctgtgacagcatccagtttgctgtggaccggcgggtcttcatcgccggcctgggcctgtatggcagcagcagcggcaaggccgagtacagcgtgaagattgagctgaagaggctgggcgtggtgctggcccagaacctgaccaagttcatgtctgatggcagcagcaacaccttccctgtgtggtttgagcaccctgtgcaggtggagcaggacaccttctacacagccagcgctgtgctggatggcagcgagctgagctacttcggccaggagggcatgacagaggtgcagtgtgggaaggtggccttccagttccagtgcagcagtgacagcaccaatggaactggagtgcagggcggccagatccctgagctgatcttctacgcctag

SEQ ID NO: 20338 - DNA, 2883 bp, synthetic construct; identical to SEQ ID NO: 18452
  source 1..2883: mol_type = other DNA; note = Synthetic coding sequence

SEQ ID NO: 20339 - DNA, 669 bp, synthetic construct
  source 1..669: mol_type = other DNA; note = Synthetic coding sequence
atggagcgcatcgagggcgcctctgtgggccgctgtgccgccagcccctacctgcggcccctgaccctgcactaccggcagaatggagcccagaagtcctgggacttcatgaagacccatgacagcgtgacagtgctgctcttcaacagcagccgccgcagcctggtgctggtgaagcagttccggcctgctgtgtatgctggggaggtggagcggcgcttccctggcagcctggccgctgtggaccaggacggcccccgggagctgcagcctgccctgcccggcagcgctggggtgacagtggagctgtgtgccggcctggtggaccagcccggcctgagcctggaggaggtggcctgcaaggaggcctgggaggagtgtggctaccacctggcccccagcgacctgcggcgggtggccacctactggagcggcgtgggcctgaccggcagccggcagaccatgttctacacagaggtgacagatgcccagaggagcggccctgggggcggcctggtggaggagggggagctgattgaggtggtgcacctgcccctggagggcgcccaggcctttgctgatgatcctgacatccccaagaccctgggcgtcatcttcggcgtgtcctggttcctgagccaggtggcccccaacctggacctgcagtag

SEQ ID NO: 20340 - DNA, 876 bp, synthetic construct
  source 1..876: mol_type = other DNA; note = Synthetic coding sequence
atgaacatgatctggaggaacagcatcagctgcctgcggctgggcaaggtgccccaccgctaccagagcggctaccaccctgtggcccccctgggcagccgcatcctgacagatcctgccaaggtgtttgagcacaacatgtgggaccacatgcagtggagcaaggaggaggaggccgccgccaggaagaaggtgaaggaaaattctgctgtgcgggtgctgctggaggagcaggtgaagtatgagcgggaggccagcaagtactgggacaccttctacaagatccacaagaacaagttcttcaaggacaggaactggctgctgcgggagttccctgagatcctgcctgtggaccagaagccagaggagaaggcccgggagagctcctgggaccacgtgaagaccagcgccaccaaccgcttcagcaggatgcactgccccaccgtgcctgatgagaagaaccactatgagaagagcagcggcagcagcgagggccagagcaagacagaaagtgacttcagcaacctggacagcgagaagcacaagaagggccccatggagaccggcctcttccctggcagcaatgccaccttccgcatcctggaggtgggctgtggggccggcaacagcgtcttccccatcctgaacaccctggagaacagccctgagagcttcctgtactgctgtgactttgccagcggggctgtggagctggtgaagagccacagcagctaccgggccacccagtgctttgcctttgtgcatgatgtgtgtgatgatggcctgccctaccccttcccagatggcatcctggatgtgatcctgctggtgtttgtgctgagcagcatccacccagacaggaccctcttcatctag

SEQ ID NO: 20341 - DNA, 630 bp, synthetic construct; identical to SEQ ID NO: 18435
  source 1..630: mol_type = other DNA; note = Synthetic coding sequence

SEQ ID NO: 20342 - DNA, 504 bp, synthetic construct
  source 1..504: mol_type = other DNA; note = Synthetic coding sequence
atgcctgcctaccacagcagcctgatggaccctgacaccaagctgattggcaacatggccctgctgcccatccgcagccagttcaagggccctgccccccgggagaccaaggacacagacatcgtggatgaggccatctactacttcaaggccaacgtgttcttcaagaactatgagatcaagaatgaggccgacaggaccctcatctacatcaccctgtacatcagtgaatgtctgaagaagctgcagaagtgcaacagcaagagccagggcgagaaggagatgtacaccctgggcatcaccaacttccccatccctggagagcccggcttccccctgaatgccatctatgccaagccagccaacaagcaggaggatgaggtgatgagggcctacctgcagcagctgcggcaggagaccggcctgcggctgtgtgagaaggtgatcaagggggacctgaagttctctgctgccctgaagctggccctgaacaagaacaagtag

SEQ ID NO: 20343 - DNA, 4074 bp, synthetic construct; identical to SEQ ID NO: 19592
  source 1..4074: mol_type = other DNA; note = Synthetic coding sequence

SEQ ID NO: 20344 - DNA, 288 bp, synthetic construct
  source 1..288: mol_type = other DNA; note = Synthetic coding sequence
atgctgaagaacaagggccacagcagcaagaaggacaacctggccgtgaatgctgtggccctgcaggaccacatcctgcatgacctgcagctgaggaacctgtctgtggccgaccacagcaagacccaggtgcagaagaaggagaacaagagcctgaagagggacaccaaggccatcatcgacaccggcctgaagaagaccacccagtgccccaagctggaggacagcgagaaggagtatgtgctggaccccaagcccccacccctgaccctgggctaccacagctag

SEQ ID NO: 20345 - DNA, 708 bp, synthetic construct
  source 1..708: mol_type = other DNA; note = Synthetic coding sequence
atgctgaagaacaagggccacagcagcaagaaggacaacctggccgtgaatgctgtggccctgcaggaccacatcctgcatgacctgcagctgaggaacctgtctgtggccgaccacagcaagacccaggtgcagaagaaggagaacaagagcctgaagagggacaccaaggccatcatcgacaccggcctgaagaagaccacccagtgccccaagctggaggacagcgagaaggagtatgtgctggaccccaagcccccacccctgaccctggcccagaagctgggcctcatcggccccccacctccacccctgagcagtgatgagtgggagaaggtgaagcagaggagcctgctgcagggcgacagcgtgcagccctgccccatctgcaaggaggagtttgagctgcggccccaggtgctgctgagctgcagccacgtgttccacaaggcctgcctgcaggcctttgagaagttcaccaacaagaagacctgccccctgtgcaggaagaaccagtaccagaccagggtcatccatgatggagcccggctcttccgcatcaagtgtgtgacccgcatccaggcctactggaggggctgtgtggtgaggaagtggtacagaaacctgaggaagacagtgcccccaacagatgccaagctgaggaagaagttctttgagaagaagacccaggactggaagccagcctag

SEQ ID NO: 20346 - DNA, 1089 bp, synthetic construct; identical to SEQ ID NO: 18944
  source 1..1089: mol_type = other DNA; note = Synthetic coding sequence

SEQ ID NO: 20347 - DNA, 1278 bp, synthetic construct; identical to SEQ ID NO: 18416
  source 1..1278: mol_type = other DNA; note = Synthetic coding sequence

SEQ ID NO: 20348 - DNA, 639 bp, synthetic construct
  source 1..639: mol_type = other DNA; note = Synthetic coding sequence
atggccccctggggcaagaggctggccggcgtgcggggcgtgctgctggacatctctggagtgctgtatgattctggagctgggggcggcacagccatcgccggctctgtggaggccgtggcccggctgaagaggagccggctgaaggtgcgcttctgcaccaatgaaagccagaagagcagagctgagctggtgggccagctgcagaggctgggctttgacatcagcgagcaggaggtgacagccccagccccagctgcctgccagatcctgaaggagcagggcctgcggccctacctgctgattcatgatggagtgcgctcagaatttgaccagattgacaccagcaaccccaactgtgtggtgattgctgatgctggggagagcttctcctaccagaacatgaacaatgccttccaggtgctgatggagctggagaagcctgtgctgatcagcctgggcaagggccgctactacaaggagaccagcggcctgatgctggatgtgggcccctacatgaaggccctggagtatgcctgtggcatcaaggccgaggtggtgggcaagcccagccctgagttcttcaagagcgccctgcaggccatcggcgtggaggcccaccagctgctgtctgtgtag

SEQ ID NO: 20349 - DNA, 2868 bp, synthetic construct
  source 1..2868: mol_type = other DNA; note = Synthetic coding sequence
atggaggtgggcagcgaggaggagaagtgggagaagctggatgctgagtttgaccactttgtggtggacatgaagccctttgtgctgaagctgccccacaggacagagcggcagagatgtgccctgtggatcaggaagctgtgtgagcccagcggcactggagctggcatcatgggcaggaagaacagaaacctgtatgccaagctgctgctgcacatgctgaagagaggagccctggagggccccttcacccacaggcctgagcccggcaccctgaagatcctgcccagctacatgagcatctactttgatgagcccaacccagcccgggccaagggcagcagccctgagggcctgcctgcctgggtgctgggggagctggagaccagcgagcacaagctgaatgaatcctggaagctgagcagcggggaggacaacaccctggtgcagagccccacagatgtgtacagccgggagcagtacaccgggaagctgcgggtgcgcagccacagcctgagccccacccaccgggaggatggccagaacatcacccccaagatctgtgaggtgtacagcaagaagagccctgtgtccctggatgacagcgacatcgaggcccggctgaacagctggaacctgggcatcgagaacccccgctacctgcggcagaagcccatccctgtgtccctgatgacccccaagttcagcctgaggaagagcagcagcttccatgatgaccacttcctgagccgcatccgggagaaggagctggacatgaagaccaagatgatggaggccaagttccacgaggagaagctgaagctgcagcagaagcatgatgctgatgtgcagaagatcctggagaggaagaacaatgaaattgaggagctgaagaccctgtaccgcagcaagcagcacgagacagaggagaccatcaggaagctggagaagaaggtgcagaccctcatccgggactgccaggtgatccgggagaccaaggaggaccagattgctgagctgaagaagatctgtgagcagagcacagagagcctgaacaatgactgggagaagaagctgcacaatgctgtggccgagatggagcaggagaagtttgacctgcagaagcagcacacagagaacatccaggagctgctggaggacaccaacgtgcggctgaacaagatggagagcgagtacatggcccagacccagagcaccaaccacatgatcaaggagctggaggcccgggtgcagcagctgactggagaggccgagaacagcaacctgcagaggcagaagctgatccaggagaaggccgagctggagcgctgctaccagatcacctgcagcgagctgcaggaggtgaaggcccggaggaacaccctgcacaaggagaaggaccacctggtgaatgactatgagcagaacatgaagctgctgcagaccaagtatgatgctgacatcaacctgctgaagcaggagcacgccctgagcgccagcaaggccagctccatgattgaggagctggagcagaatgtgtgccagctgaagcagcagctgcaggagagcgagctgcagaggaagcagcagctgcgggaccaggagaacaagttccagatggagaagagccacctgaagcacatctatgagaagaaggcccatgacctgcagagcgagctggacaagggcaaggaggacacccagaagaagatccacaagtttgaggaggccctgaaggagaaggaggagcagctgaccagggtgacagaggtgcagaggctgcaggcccagcaggctgatgctgccctggaggagttcaagaggcaggtggagctgaacagcgagaaggtgtatgcagagatgaaggagcagatggagaaggtggaggccgacctgaccaggagcaagagcctgcgggagaagcagagcaaggagttcctgtggcagctggaggacatccggcagagatatgagcagcagatcgtggagctgaagctggagcacgagcaggagaagacccacctgctgcagcagcacaatgctgagaaggacagcctggtgcgggaccacgagcgggagattgagaacctggagaagcagctgcgggccgccaacatggagcacgagaaccagatccaggagttcaagaagagagatgcccaggtgattgctgacatggaggcccaggtgcacaagctgcgggaggagctgatcaacgtgaacagccagaggaagcagcagctggtggagctgggcctgctgcgggaggaggagaagcagagggccacccgggagcacgagatcgtggtgaacaagctgaaggccgagagcgagaagatgaagattgagctgaagaagacccatgctgctgagacagagatgaccctggagaaggccaacagcaagctgaagcagatcgagaaggagtacacccagaagctggccaagagcagccagatcatcgccgagctgcagaccaccatcagcagcctgaaggaggagaacagccagcagcagctggccgctgagcggcggctgcaggatgtgcggcagaagtttgaagatgagaagaagcagctgatccgggacaatgaccaggccatcaaggtgctgcaggatgagctggagaacagaagcaaccaggtgcgctgtgccgagaagaagctgcagcacaaggagctggagagccaggagcagatcacctacatccggcaggagtatgagaccaagctgaagggcctgatgcctgccagcctgcggcaggagctggaggacaccatcagcagcctgaagagccaggtgaacttcctgcagaagagggccagcatcctgcaggaggagctgaccacctaccagggcagaagatag

SEQ ID NO: 20350 - DNA, 1269 bp, synthetic construct
  source 1..1269: mol_type = other DNA; note = Synthetic coding sequence
atgcccaggaagggcacccagcccagcacagccaggagaagagaggagggccccccaccacccagcccagatggagccagcagtgatgctgagcctgagccccccagcggccgcacagagagccctgccacagctgctgagacagccagcgaggagctggacaacagaagcctggaggagatcctgaacagcatccccccacctcctcctccagccatgaccaatgaagctggggccccccggctgatgatcacccacatcgtgaaccagaacttcaagagctatgctggggagaagatcctgggccccttccacaagcgcttcagctgcatcatcggccccaatggaagtggcaagagcaatgtgattgacagcatgctgtttgtgtttggctaccgggcccagaagatccgcagcaagaagctgtctgtgctgatccacaacagtgatgagcacaaggacatccagagctgcaccgtggaggtgcacttccagaagatcatcgacaaggagggagatgattatgaagtcatccccaacagcaacttctacgtgtccaggacagcctgccgggacaacacctctgtgtaccacatcagcggcaagaagaagaccttcaaggatgtgggcaacctgctgcggagccacggcatcgacctggaccacaaccgcttcctgatcctgcagggcgaggtggagcagatcgccatgatgaagcccaagggccagacagaacatgatgagggcatgctggagtacctggaggacatcatcggctgcggccgcctgaatgagcccatcaaggtgctgtgccggcgggtggagatcctgaatgagcacagaggagagaagctgaacagagtgaagatggtggagaaggagaaggatgccctggagggggagaagaacatcgccatcgagttcctgaccctggagaatgagatcttcaggaagaagaaccacgtgtgccagtactacatctatgagctgcagaagagaattgctgagatggagacccagaaggagaagatccacgaggacaccaaggagatcaatgagaagagcaacatcctgagcaatgagatgaaggccaagaacaaggatgtgaaggacacagagaagaagctgaacaagatcaccaagttcatcgaggagaacaaggagaagttcacccagctggacctggaggatgtgcaggtgcgggagaagctgaagcacgccaccagcaaggccaagacaggagagaccaccagcaagaggaagaagtag

SEQ ID NO: 20351 - DNA, 303 bp, synthetic construct
  source 1..303: mol_type = other DNA; note = Synthetic coding sequence
atgaggaagaggctgagcgcccctgagctgcggctgagcctgaccaagggccctggaaatgatggagccagccccacccagagcgcccccagcagcccagatggcagcagtgacctggagattgatgagctggagacccccagcgacagcgagcagctggacagcggccatgaatttgagtgggaggatgagctgcccagggctgagggcctgggcaccagcgagacagctgagcggctgggccggggctgcatgtgggatgtgactggagaagatggccaccactggagggtcttcagatag

SEQ ID NO: 20352 - DNA, 1059 bp, synthetic construct
  source 1..1059: mol_type = other DNA; note = Synthetic coding sequence
atgggcaaggtggagaacagcaagagcgcccagggcctggccggcctgaggaacctgggcaacacctgcttcatgaacagcatcctgcagtgcctgagcaacacccgggagctgcgggactactgcctgcagaggctgtacatgagggacctgcaccacggcagcaatgcccacacagccctggtggaggagtttgccaagctgatccagaccatctggaccagcagccccaatgatgtggtgagccccagcgagttcaagacccagatccagagatatgcccccaggtttgtgggctacaaccagcaggatgcccaggagttcctgcgcttcctgctggatggcctgcacaatgaggtgaacagagtgaccctgcggcccaagagcaaccctgagaacctggaccacctgcctgatgatgagaagggccggcagatgtggaggaagtacctggagcgggaggacagccgcatcggggacctgtttgtgggccagctgaagagcagcctgacctgcacagactgtggctactgcagcacagtgtttgaccccttctgggacctgagcctgcccatcgccaagaggggctacccagaggtgaccctgatggactgcatgaggctcttcaccaaggaggatgtgctggatggagatgagaagcccacctgctgccgctgccggggcaggaagcgctgcatcaagaagttcagcatccagcgcttccccaagatcctggtgctgcacctgaagcgcttcagcgagagccgcatccgcaccagcaagctgaccacctttgtgaacttccccctgcgggacctggacctgcgggagtttgccagcgagaacaccaaccacgctgtgtacaacctgtatgctgtgagcaaccacagcggcaccaccatgggcggccactacacagcctactgccgcagccctggcaccggggagtggcacaccttcaatgacagctctgtgacccccatgagcagcagccaggtgaggaccagtgatgcctacctgctcttctatgagctggccagcccccccagcaggatgtag

SEQ ID NO: 20353 - DNA, 1497 bp, synthetic construct
  source 1..1497: mol_type = other DNA; note = Synthetic coding sequence
atggtgattgaggaggtgaacttcatgcagaaccacctggagattgagaagacctgccgggagagcgctgaggccctggccaccaagctgaacaaggagaacaagaccctgaagaggatctccatgctgtacatggccaagctgggcccagatgtgatcacagaggagatcaacattgatgatgaggacagcaccacagacacagatggagctgctgagacctgtgtgtctgtgcagtgccagaagcagatcaaggagctgcgggaccagatcgtgtctgtgcaggaggagaagaagatcctggccatcgagctggagaacctgaagagcaagctggtggaggtgattgaggaggtgaacaaggtgaagcaggagaagacagtgctgaacagcgaggtgctggagcagaggaaggtgctggagaagtgcaacagagtgtccatgctggccgtggaggagtatgaggagatgcaggtgaacctggagctggagaaggacctgaggaagaaggccgagagctttgcccaggagatgttcatcgagcagaacaagctgaagaggcagagccacctgctgctgcagagcagcatcccagaccagcagctgctgaaggccctggatgaaaatgccaagctgacccagcagctggaggaggagcgcatccagcaccagcagaaggtgaaggagctggaggagcagctggagaatgagaccctgcacaaggagatccacaacctgaagcagcagctggagctgctggaggaggacaagaaggagctggagctgaagtaccagaacagcgaggagaaggccaggaacctgaagcacagcgtggatgagctgcagaagagggtgaaccagagtgaaaattctgtgcccccacctcctcctcctcctccacccctgcccccacctccacccaaccccatccgcagcctgatgtccatgatcaggaagaggagccaccccagcggcagcggggccaagaaggagaaggccacccagcctgagaccacagaggaggtgacagacctgaagaggcaggccgtggaggagatgatggaccgcatcaagaagggcgtgcacctgcggcctgtgaaccagacagcccggcccaagaccaagccagagagcagcaagggctgtgagagcgctgtggatgagctgaagggcatcctgggcaccctgaacaagagcaccagcagccgcagcctgaagagcctggaccctgaaaattctgaaacagagctggagcgcatcctgcggcggaggaaggtgacagctgaggccgacagcagcagccccaccggcatcctggccaccagcgagagcaagtccatgcctgtgctgggctctgtgtcctctgtgaccaagacagccctgaacaagaagaccctggaggccgagttcaacagccccagcccccccaccccagagcccggggagggccccaggaagctggagggctgcaccagcagcaaggtgaccttccagtag

SEQ ID NO: 20354 - DNA, 1950 bp, synthetic construct
  source 1..1950: mol_type = other DNA; note = Synthetic coding sequence
atgaacagcagtgatgaggagaagcagctgcagctgatcaccagcctgaaggagcaggccatcggggagtatgaggacctgcgggcagagaaccagaagaccaaggagaagtgtgacaagatccggcaggagagagatgaggccgtgaagaagctggaggagttccagaagatcagccacatggtgattgaggaggtgaacttcatgcagaaccacctggagattgagaagacctgccgggagagcgctgaggccctggccaccaagctgaacaaggagaacaagaccctgaagaggatctccatgctgtacatggccaagctgggcccagatgtgatcacagaggagatcaacattgatgatgaggacagcaccacagacacagatggagctgctgagacctgtgtgtctgtgcagtgccagaagcagatcaaggagctgcgggaccagatcgtgtctgtgcaggaggagaagaagatcctggccatcgagctggagaacctgaagagcaagctggtggaggtgattgaggaggtgaacaaggtgaagcaggagaagacagtgctgaacagcgaggtgctggagcagaggaaggtgctggagaagtgcaacagagtgtccatgctggccgtggaggagtatgaggagatgcaggtgaacctggagctggagaaggacctgaggaagaaggccgagagctttgcccaggagatgttcatcgagcagaacaagctgaagaggcagagccacctgctgctgcagagcagcatcccagaccagcagctgctgaaggccctggatgaaaatgccaagctgacccagcagctggaggaggagcgcatccagcaccagcagaaggtgaaggagctggaggagcagctggagaatgagaccctgcacaaggagatccacaacctgaagcagcagctggagctgctggaggaggacaagaaggagctggagctgaagtaccagaacagcgaggagaaggccaggaacctgaagcacagcgtggatgagctgcagaagagggtgaaccagagtgaaaattctgtgcccccacctcctcctcctcctccacccctgcccccacctccacccaaccccatccgcagcctgatgtccatgatcaggaagaggagccaccccagcggcagcggggccaagaaggagaaggccacccagcctgagaccacagaggaggtgacagacctgaagaggcaggccgtggaggagatgatggaccgcatcaagaagggcgtgcacctgcggcctgtgaaccagacagcccggcccaagaccaagccagagagcagcaagggctgtgagagcgctgtggatgagctgaagggcatcctgggcaccctgaacaagagcaccagcagccgcagcctgaagagcctggaccctgaaaattctgaaacagagctggagcgcatcctgcggcggaggaaggtgacagctgaggccgacagcagcagccccaccggcatcctggccaccagcgagagcaagtccatgcctgtgctgggctctgtgtcctctgtgaccaagacagccctgaacaagaagaccctggaggccgagttcaacagccccagcccccccaccccagagcccggggagggccccaggaagctggagggctgcaccagcagcaaggtgaccttccagccccccagcagcatcggctgcaggaagaagtacattgatggagagaagcaggccgagcctgtggtggtgctggaccctgtgtccacccatgagccccagaccaaggaccaggtggccgagaaggaccccacccagcacaaggaggatgaaggagagatccagcctgagaacaaggaggacagcattgagaacttcttccccttccacttcggctttgagggcgtgctgcccctggccggcgtgaccctgagcaccaaggcccgggaccccaagtag

SEQ ID NO: 20355 - DNA, 837 bp, synthetic construct; identical to SEQ ID NO: 18620
  source 1..837: mol_type = other DNA; note = Synthetic coding sequence

SEQ ID NO: 20356 - DNA, 1368 bp, synthetic construct
  source 1..1368: mol_type = other DNA; note = Synthetic coding sequence
atgttcacagaaggagaggagatgtacctgcagggcagcacagtgtggcacccagactgcaagcagagcaccaagacagaggagaagctgcggctgcccaacatccgccgcagcagcagtgacttcttctacagcaagagcctcatccggaggacaggccgcagccccagcctgcagcccaccaggaccagcagcgagagcatctacagccggcccggcagcagcatccctggcagccctggccacaccatctatgccaaggtggacaatgagatcctggactacaaggacctggccgccatccccaaggtgaaggccatctatgacatcgagaggccagacctgatcacctatgagcccttctacaccagcggctatgatgacaagcaggagcggcagagcctgggggagagccccaggaccctgagccccaccccatctgctgagggctaccaggatgtgcgggacaggatgatccacaggagcaccagccagggcagcatcaacagccctgtgtacagccgccacagctacacccccaccaccagccgcagcccccagcacttccacaggccagaccagggcatcaacatctacaggaagccacccatctacaagcagcacgccgccctggccgcccagagcaagagcagcgaggacatcatcaagttcagcaagtttcctgctgcccaggccccagaccccagcgagacccccaagattgaaacagaccactggccaggccccccatcctttgctgtggtgggccctgacatgaagagaagaagcagcggccgggaggaggatgatgaggagctgctgcggcggcggcagctgcaggaggagcagctgatgaagctgaacagcggcctgggccagctgatcctgaaggaggagatggagaaggagagccgggagaggagcagcctgctggccagccgctatgacagccccatcaacagcgccagccacatccccagcagcaagacagccagcctgcccggctacggcagaaatggcctgcacaggcctgtgtccacagactttgcccagtacaacagctatggagatgtgtctggaggagtgcgggactaccagaccctgcctgatggccacatgcctgccatgaggatggacagaggagtgtccatgcccaacatgctggagcccaagatcttcccctatgagatgctgatggtgaccaacagaggaagaaacaagatcctgcgggaggtggacaggacccggctggagcggcacctggcccctgaggtgttccgggagatcttcggcatgagcatccaggagtttgaccggctgcccctgtggaggagaaatgacatgaagaagaaggccaagctgttctag

SEQ ID NO: 20357 - DNA, 1959 bp, synthetic construct
  source 1..1959: mol_type = other DNA; note = Synthetic coding sequence
tgaagccacgccttcatcagccagtgggtgtgccgccactggagggaccctgtggcccacccccaggacccccaccaccccagcgagaagcctgtgatccactgccacaagtgtggggagccctgcaagggggaggtgctgcgggtgcagaccaagcacttccacatcaagtgcttcacctgcaaggtgtgtggctgtgacctggcccagggcggcttcttcatcaagaatggagagtacctgtgcaccctggactaccaccccaactgctttgcctgcaccatctgcaagaggcccttccccccaggggacagagtgaccttcaacggccgggactgcctgtgccagctgtgtgcccagcccatgagcagcagccccaaggagaccaccttcagcagcaactgtgccggctgcggccgggacatcaagaatggccaggccctgctggccctggacaagcagtggcacctgggctgcttcaagtgcaagagctgtgggaaggtgctgaccggggagtacatcagcaaggatggagccccctactgtgagaaggactaccagggcctgtttggagtgaagtgtgaggcctgccaccagttcatcaccgggaaggtgctggaggccggggacaagcactaccaccccagctgtgcccgctgcagccgctgcaaccagatgttcacagaaggagaggagatgtacctgcagggcagcacagtgtggcacccagactgcaagcagagcaccaagacagaggagaagctgcggcccaccaggaccagcagcgagagcatctacagcaggcctggcagcagcatccctggcagccctggccacaccatctatgccaaggtggacaatgagatcctggactacaaggacctggccgccatccccaaggtgaaggccatctatgacatcgagaggccagacctgatcacctatgagcccttctacaccagcggctatgatgacaagcaggagcggcagagcctgggggagagccccaggaccctgagccccacccccagcgctgagggctaccaggatgtgcgggacaggatgatccacaggagcaccagccagggcagcatcaacagccctgtgtacagccgccacagctacacccccaccaccagccgcagcccccagcacttccacaggccagaccagggcatcaacatctacaggaagccacccatctacaagcagcacgccgccctggccgcccagagcaagagcagcgaggacatcatcaagttcagcaagtttcctgctgcccaggccccagaccccagcgagacccccaagattgaaacagaccactggccaggcccccccagctttgctgtggtgggccctgacatgaagaggaggagcagcggccgggaggaggatgatgaggagctgctgcggcggcggcagctgcaggaggagcagctgatgaagctgaacagcggcctgggccagctgatcctgaaggaggagatggagaaggagagccgggagaggagcagcctgctggccagccgctatgacagccccatcaacagcgccagccacatccccagcagcaagacagccagcctgcccggctatggaagaaatggcctgcacaggcctgtgtccacagactttgcccagtacaacagctatggagatgtgtctgggggcgtgcgggactaccagaccctgcctgatggccacatgcctgccatgaggatggaccggggcgtgtccatgcccaacatgctggagcccaagatcttcccctatgagatgctgatggtgaccaacagaggaagaaacaagatcctgcgggaggtggacaggacccggctggagcggcacctggcccctgaggtgttccgggagatcttcggcatgagcatccaggagtttgaccggctgcccctgtggaggagaaatgacatgaagaagaaggccaagctgttctag

SEQ ID NO: 20358 - DNA, 837 bp, synthetic construct
  source 1..837: mol_type = other DNA; note = Synthetic coding sequence
atgacccagcagtggagggaggtgaatgaagatcgggaggccgtggcccaggcccgctcctggcagagcctgaacctgggggaccgggacatgggcgtgtccttcatcgagacagccctggccctgtctgctgcccgggcccggcggcccctgctgaccagccacccccccagccggcccttccagccccccaagcacacccccagccccccaccagccccccgggtgaacagccgccaccctggccgctctgtgtccctgagcctgcccagcgccagccaggcccctcctgtgcccctggccagccctgagggccggccccacacagtgggcgccccccacgccagcacctggaagaggacccggggccggcagagggcccggccccccaagatcgtgaaggaggccgaggtgccccaggccgccctgggcgtgcctgcccagggcaccggggacaatggccacacccctgtggaggaggaggtgggcggcatccctgtgcctgcccctggcctgctgcaggtgacagagcggcggcagcccctgagctctgtgagcagcctggaggtgcactttgacctgctggacctgacagagctgacagacatgtctgaccaggagctggccgaggtgtttgctgacagtgatgatgagaacctgaacacagagagccctgctggcctgcaccccctgccccgggccggctacctgcggagccccagctggaccaggaccagggctgagcagagccatgagaagcagcccctgggggaccctgagcggcaggccaccgtgctggacaccttcctgactgtggagcggccccaggaggactag

SEQ ID NO: 20359 - DNA, 540 bp, synthetic construct
  source 1..540: mol_type = other DNA; note = Synthetic coding sequence
atgacagacctggtggccgtgtgggatgtggccctgagtgatggagtgcacaagattgaatttgaacatggcaccaccagcggcaagagggtggtgtatgtggatggcaaggaggagatcaggaaggagtggatgttcaagctggtgggcaaggagaccttctacgtgggcgccgccaagaccaaggccaccatcaacattgatgccatcagcggctttgcctatgagtacaccctggagatcaacgggaagagcctgaagaagtacatggaggacaggagcaagaccaccaacacctgggtgctgcacatggatggagagaacttcagaattgtgctggagaaggatgccatggatgtgtggtgcaatggcaagaagctggagacagctggggagtttgtggatgatggaacagagacccacttcagcatcggcaaccacgactgctacatcaaggctgtgagcagcggcaagaggaaggagggcatcatccacaccctcatcgtggacaaccgggagatccctgagatcgccagctag

SEQ ID NO: 20360 - DNA, 540 bp, synthetic construct; identical to SEQ ID NO: 20359
  source 1..540: mol_type = other DNA; note = Synthetic coding sequence

SEQ ID NO: 20361 - DNA, 1053 bp, synthetic construct
  source 1..1053: mol_type = other DNA; note = Synthetic coding sequence
atgggcccctgcaacctgagcagcgctgctggccccacagctgagaagtctgtgccctaccagaggaccctgaaggagggccagggcacctctgtggtggcccagggccccagccggcccctgcccagcacagccaacgtggtggtgattggaggcggcagcctgggctgccagaccctgtaccacctggccaagctgggcatgtctggagctgtgctgctggagcgggagcggctgaccagcggcaccacctggcacacagctggcctgctgtggcagctgcggcccagtgatgtggaggtggagctgctggcccacacccggcgggtggtgtcccgggagctggaggaggagaccggcctgcacacaggctggatccagaatggaggcctcttcatcgccagcaaccggcagaggctggatgagtacaagaggctgatgagcctgggcaaggcctatggagtggagagccacgtgctgagccctgctgagaccaagaccctgtaccccctgatgaatgtggatgacctgtatggcaccctgtatgtgccccatgatggcaccatggaccctgctggcacctgcaccaccctggcccgggccgccagcgcccggggggcccaggtgattgagaactgccctgtgacaggcatccgggtgtggacagatgactttggagtgcggcgggtggccggcgtggagacccagcacggcagcatccagaccccctgtgtggtgaactgtgccggcgtgtgggccagcgctgtgggccgcatggccggcgtgaaggtgcccctggtggccatgcaccacgcctacgtggtgacagaaagaattgagggcatccagaacatgcccaacgtgcgggaccatgatgcctctgtgtacctgcggctgcagggagatgccctgtctgtgggcggctatgaggccaaccccatcttctgggaggaggccgtgaagtaccggcccagggctgctgggggcctgtgcctgaagaccagcacagagaaggtgtgtgctgtgtggagcgatgacctgcggcgggcctag

SEQ ID NO: 20362 - DNA, 2001 bp, synthetic construct
  source 1..2001: mol_type = other DNA; note = Synthetic coding sequence
atggcccgggccggcagctgtggcggcgctgctgctggggccggccggcctgagccctgggagctgagcctggaggaggtgctgaaggcctatgagcagcccctgaatgaggagcaggcctgggccgtgtgcttccagggctgccggggcctgcggggcagccctggaagaaggctgcgggacaccggggacctgctgctgcggggagatggctctgtgggcgcccgggagcctgaggccgctgagcccgccaccatggtggtgcccctggccagcagcgaggcccagacagtgcagagcctgggctttgccatctaccgggccctggactggggcctggatgagagcgaggagcgggagctgagcccccagctggagcggctgattgacctgatggccaacaatgattctgaggacagcggctgtggggctgctgatgagggctatggaggccctgaggaggaggaggaggccgagggcgtgcccaggtctgtgaggacctttgcccaggccatgaggctgtgtgccgcccggctgacagaccccaggggggcccaggcccactaccaggccgtgtgccgggccctgtttgtggagaccctggagctgcgggccttcctggcccgggtgcgggaggccaaggagatgctgcagaagctgcgggaggatgagccccacctggagacccccagggctgagctggacagcctgggccacacagactgggcccggctgtgggtgcagctgatgagggagctgcggcggggcgtgaagctgaagaaggtgcaggagcaggagttcaaccccctgcccacagagttccagctgaccccatttgagatgctgatgcaggacatccgggccaggaactacaagctgaggaaggtgatggtggatggagacatccccccccgggtgaagaaggatgcccacgagctgatcctggacttcatccgcagccggccccccctgaagcaggtgtctgagcggcggctgcggcccctgccccccaagcagaggagcctgcacgagaagatcctggaggagatcaagcaggagcggcggctgcggcctgtgcggggggagggctgggccgcccggggcttcggcagcctgccctgcatcctgaatgcctgcagcggagatgccaagagcaccagctgcatcaacctgtctgtgacagatgctgggggcagcgcccagaggccccggccccgggtgctgctgaaggcccccaccctggccgagatggaggagatgaacaccagcgaggaggaggagagcccctgtggggaggtgaccctgaagagggacaggagcttcagcgagcatgacctggcccagctgcggtctgaggtggccagcggcctgcagagcgccacccaccccccaggcggcacagagcccccccggccccgggccggcagcgcccacgtgtggaggcctggcagccgggaccagggcacctgcccagcctctgtgtctgaccccagccaccccctgctgagcaacagaggcagcagcggggacaggcctgaggcctccatgaccccagatgccaagcacctgtggctggagttcagccaccctgtggagagcctggccctgactgtggaggaggtgatggatgtgagaagagtgctggtgaaggccgagatggagaagttcctgcagaacaaggagctgttcagcagcctgaagaagggcaagatctgctgctgctgccgggccaagttccccctcttctcctggccacccagctgcctcttctgcaagaggagcctgcagggcccccagtggcagagcgtggaggaggccttcccccacatctacagccacggctgtgtgctgaaggatgtgtgcagtgaatgtaccagctttgtggctgatgtggtgcgcagcagcaggaagtctgtggatgtgctgaacaccaccccaagaagaagccggcagacccagagcctgtacatccccaacaccaggaccctggacttcaagtag

SEQ ID NO: 20363 - DNA, 474 bp, synthetic construct
  source 1..474: mol_type = other DNA; note = Synthetic coding sequence
atggagaccctgcagagcgagaccaagaccagggtgctgcccagctggctgacagcccaggtggccaccaagaatgtggcccccatgaaggcccccaagaggatgaggatggctgctgtgcctgtggccgccgcccggctgcctgccaccaggacagtgtactgcatgaatgaagctgagatcgtggatgtggccctgggcatcctgattgagagcaggaagcaggagaaggcctgtgagcagcctgccctggccggggctgacaaccctgagcacagccccccctgcagcgtgagcccccacaccagcagcggcagcagcagcgaggaggaggacagcggcaagcaggccctggcccctggcctgagccccagccagaggcctgggggcagcagcagcgcctgcagccgcagccctgaggaggaggaggaggaggatgtgctgaagtatgtgcgggagatcttcttctcctag

SEQ ID NO: 20364 - DNA, 804 bp, synthetic construct
  source 1..804: mol_type = other DNA; note = Synthetic coding sequence
atggccaactgtgagaggaccttcatcgccatcaagccagatggagtgcagaggggcctggtgggggagatcatcaagagatttgagcagaagggcttccggctggtgggcctgaagttcatgcaggccagcgaggacctgctgaaggagcactacgtggacctgaaggaccggcccttctttgctggcctggtgaagtacatgcacagcggccctgtggtggccatggtgtgggagggcctgaatgtggtgaagacaggccgggtgatgctgggggagaccaacccagctgacagcaagccaggcaccatccggggggacttctgcatccaggtgggccgcaccatggccaacctggagaggaccttcatcgccatcaagccagatggagtgcagaggggcctggtgggggagatcatcaagagatttgagcagaagggcttccggctggtggccatgaagttcctgcgggccagcgaggagcacctgaagcagcactacatcgacctgaaggaccggcccttcttccctggcctggtgaagtacatgaacagcggccctgtggtggccatggtgtgggagggcctgaatgtggtgaagacaggccgggtgatgctgggggagaccaacccagctgacagcaagccaggcaccatccggggggacttctgcatccaggtgggcaggaacatcatccacggcagtgacagcgtgaagtctgctgagaaggagatcagcctgtggttcaagccagaggagctggtggactacaagagctgtgcccatgactgggtgtatgaatag

SEQ ID NO: 20365 - DNA, 879 bp, synthetic construct
  source 1..879: mol_type = other DNA; note = Synthetic coding sequence
atggtgctgctgagcaccctgggcatcgtgttccagggcgagggcccccccatcagcagctgtgacaccggcaccatggccaactgtgagaggaccttcatcgccatcaagccagatggagtgcagaggggcctggtgggggagatcatcaagagatttgagcagaagggcttccggctggtgggcctgaagttcatgcaggccagcgaggacctgctgaaggagcactacgtggacctgaaggaccggcccttctttgctggcctggtgaagtacatgcacagcggccctgtggtggccatggtgtgggagggcctgaatgtggtgaagacaggccgggtgatgctgggggagaccaacccagctgacagcaagccaggcaccatccggggggacttctgcatccaggtgggccgcaccatggccaacctggagaggaccttcatcgccatcaagccagatggagtgcagaggggcctggtgggggagatcatcaagagatttgagcagaagggcttccggctggtggccatgaagttcctgcgggccagcgaggagcacctgaagcagcactacatcgacctgaaggaccggcccttcttccctggcctggtgaagtacatgaacagcggccctgtggtggccatggtgtgggagggcctgaatgtggtgaagacaggccgggtgatgctgggggagaccaacccagctgacagcaagccaggcaccatccggggggacttctgcatccaggtgggcaggaacatcatccacggcagtgacagcgtgaagtctgctgagaaggagatcagcctgtggttcaagccagaggagctggtggactacaagagctgtgcccatgactgggtgtatgaatag

SEQ ID NO: 20366 - DNA, 492 bp, synthetic construct
  source 1..492: mol_type = other DNA; note = Synthetic coding sequence
atgaagagcagccagacctttgaggagcagacagagtgcatcgtgaacaccctgctgatggacttcctgagccccaccctgcaggtggccagcaggaacctgtgctgcgtggatgaggtggacagcggggagccctgcagctttgatgtggccatcatcgccggccgcctgaggatgctgggggaccagttcaatggagagctggaggccagcgccaagaatgtgattgctgagaccatcaagggccagacaggagccatcctgcaggacacagtggagagcctgagcaagacctggtgtgcccaggacagcagcctggcctatgaaagagccttcctggccgtgtctgtgaagctgctggagtacatggcccacatcgcccctgaggtggtgggccaggtggccatccccatgacaggcatgatcaatggaaaccaggccatccgggagttcatccagggccagggcggctgggagaacctggagagctag

SEQ ID NO: 20367 - DNA, 558 bp, synthetic construct
  source 1..558: mol_type = other DNA; note = Synthetic coding sequence
atgggcaagaagcagaacaagaagaaggtggaggaggtgctggaggaggaggaggaggagtatgtggtggagaaggtgctggacagaagagtggtgaagggcaaggtggagtacctgctgaagtggaagggcttcagtgatgaggacaacacctgggagcctgaggagaacctggactgcccagacctgattgctgagttcctgcagagccagaagacagcccatgaaacagacaagtctgagggcggcaagaggaaggctgacagcgacagcgaggacaagggggaggagagcaagcccaagaagaagaaggaggagagcgagaagccccggggctttgcccggggcctggagcctgagcgcatcattggagccacagacagcagtggagagctgatgttcctgatgaagtggaagaacagtgatgaggccgacctggtgcctgccaaggaggccaacgtgaagtgcccccaggtggtgatctccttctatgaggagcggctgacctggcacagctaccccagtgaagatgatgacaagaaggatgacaagaactag

SEQ ID NO: 20368 - DNA, 1350 bp, synthetic construct; identical to SEQ ID NO: 19455
  source 1..1350: mol_type = other DNA; note = Synthetic coding sequence

SEQ ID NO: 20369 - DNA, 741 bp, synthetic construct
  source 1..741: mol_type = other DNA; note = Synthetic coding sequence
atgtctggggccggggaggccctggcccctggccctgtgggcccccagagggtggccgaggccggcggcggccagctgggcagcacagcccagggcaaatgtgacaaggacaacacagagaaggacatcacccaggccaccaacagccacttcacccatggagagatgcaggaccagagcatctggggcaaccccagtgatggagagctgatccgcacccagccccagaggctgccccagctgcagaccagcgcccaggtgcccagcggggaggagatcggcaagatcaagaatggccacacaggcctgagcaatggaaatggcatccaccacggggccaagcacggcagcgctgacaacaggaagctgagcgcccctgtgtcccagaagatgcacaggaagatccagagcagcctgtctgtgaacagcgacatcagcaagaagagcaaggtgaatgctgtgttcagccagaagacaggcagcagccctgaggactgctgcgtgcactgcatcctggcctgcctcttctgtgagttcctgaccctgtgcaacatcgtgctgggccaggccagctgtggcatctgcaccagcgaggcctgctgctgctgctgcggagatgagatgggagatgactgcaactgcccctgtgacatggactgtggcatcatggatgcctgctgtgagagcagtgactgcctggagatctgcatggagtgctgcggcatctgcttccccagctag

SEQ ID NO: 20370 - DNA, 30 bp, synthetic construct
  source 1..30: mol_type = other DNA; note = Synthetic coding sequence
atgagctactaccagaggcccttctcctag

SEQ ID NO: 20371 - DNA, 2001 bp, synthetic construct
  source 1..2001: mol_type = other DNA; note = Synthetic coding sequence
atgaacacaggccgggacagccagagcccagacagcgccaagggcttccgctctgtgcggcccaacctgcaggacaagaggagccccacccagagccagatcaccgtgaatggaaacagcggcggcgctgtgagccccatgagctactaccagaggcccttcagccccagcgcctacagcctgcctgccagcctgaacagcagcatcgtgatgcagcacggcaccagcctggacagcacagacacctacccccagcacgcccagagcctggatggcaccaccagcagcagcatccccctgtaccgcagcagcgaggaggagaagagggtgaccgtcatcaaggccccccactacccaggcatcggccctgtggatgaaagtggcatccccacagccatccgcaccaccgtggaccggcccaaggactggtacaagaccatgttcaagcagatccacatggtgcacaagccagatgatgacacagacatgtacaacaccccctacacctacaatgccggcctgtacaaccccccctacagcgcccagagccaccctgctgccaagacccagacctaccggcccctgagcaagagccacagcgacaacagccccaatgccttcaaggatgccagcagccctgtgcccccaccccacgtgcccccacctgtgccccccctgcggccccgggacaggagcagcacagagaagcatgactgggaccccccagacaggaaggtggacaccaggaagttccgctctgagcccaggagcatctttgaatatgagcccgggaagagcagcatcctgcagcacgagcggcccacagaccgcatcaacccagatgacatcgacctggagaatgagccctggtacaagttcttcagcgagctggagtttggccggcccccacccaagaagcccctggactatgtgcaggaccacagcagcggggtcttcaatgaggccagcctgtaccagagcagcattgacaggagcctggagcggcccatgagcagcgcctccatggccagtgacttcaggaagaggaggaagtctgagcctgctgtgggccccccccggggcctgggggaccagagcgccagcaggaccagccctggccgggtggacctgcccggcagcagcaccaccctgaccaagagcttcaccagcagcagccccagcagccccagccgggccaaggaccgggagagccccaggagctacagcagcaccctgacagacatgggccgcagcgccccccgggagcggcggggcaccccagagaaggagaagctgcctgccaaggctgtgtatgacttcaaggcccagaccagcaaggagctgtccttcaagaagggggacacagtgtacatcctgaggaagattgaccagaactggtatgaaggagagcaccacggccgggtgggcatcttccccatctcctatgtggagaagctgaccccacctgagaaggcccagcctgcccggcccccacctccagcccagcctggagagatcggggaggccatcgccaagtacaacttcaatgctgacaccaacgtggagctgagcctgaggaaaggagacagagtcatcctgctgaagagggtggaccagaactggtatgagggcaagatccctggcaccaaccggcagggcatcttccctgtgtcctatgtggaggtggtgaagaagaacaccaagggagctgaggactacccagacccccccatcccccacagctacagcagtgaccgcatccacagcctgagcagcaacaagccccagaggcctgtgttcacccatgagaacatccagggcggcggggagcccttccaggccctgtacaactacaccccaagaaatgaagatgagctggagctgcgggagagtgatgtgattgatgtgatggagaagtgtgatgatggctggtttgtgggcaccagcaggaggaccaagttcttcggcaccttccctggcaactacgtgaagaggctgtag

SEQ ID NO: 20372 - DNA, 2472 bp, synthetic construct
  source 1..2472: mol_type = other DNA; note = Synthetic coding sequence
atgaccctgctgagcagccagagcagcagcctggtggcccccagcggctctgtgtctgcagaaaatcctgagcagaggatgctggagaagagggccaaggtgattgaggagctgctgcagacagagcgggactacatccgggacctggagatgtgcatcgagcgcatcatggtgcccatgcagcaggcccaggtgcccaacatcgactttgagggcctgtttggaaacatgcagatggtgatcaaggtgtccaagcagctgctggccgccctggagatcagtgatgctgtgggccctgtgttcctgggccacagagatgagctggagggcacctacaagatctactgccagaaccatgatgaggccatcgccctgctggagatctatgagaaggatgagaagatccagaagcacctgcaggacagcctggccgacctgaacagcctggtgctgaagaagggctgcaccaactacatcaacctgggcagcttcctgatcaagcctgtgcagagggtgatgagataccccctgctgctgatggagctgctgaacagcaccccagagagccacccagacaaggtgcccctgaccaatgctgtgctggccgtgaaggagatcaacgtgaacatcaatgagtacaagaggaggaaggacctggtgctgaagtacagaaaaggagatgaggacagcctgatggagaagatcagcaagctgaacatccacagcatcatcaagaagagcaacagagtgagcagccacctgaagcacctgaccggctttgccccccagatcaaggatgaggtgtttgaggagacagagaagaacttcaggatgcaggagcggctcatcaagagcttcatccgggacctgagcctgtacctgcagcacatccgggagagcgcctgtgtgaaggtggtggccgctgtgtccatgtgggatgtgtgcatggagcggggccaccgggacctggagcagtttgagcgggtgcaccgctacatcagtgaccagctgttcaccaacttcaaggagaggacagagcggctggtgatcagccccctgaaccagctgctgtccatgttcaccggcccccacaagctggtgcagaagagatttgacaagctgctggacttctacaactgcacagagcgggcagagaagctgaaggacaagaagaccctggaggagctgcagagcgccaggaacaactatgaggccctgaatgcccagctgctggatgagctgcccaagttccaccagtatgcccagggcctcttcaccaactgtgtgcacggctatgcagaggcccactgtgactttgtgcaccaggccctggagcagctgaagcccctgctgagcctgctgaaggtggccggccgggagggcaacctgattgccatcttccacgaggagcacagccgggtgctgcagcagctgcaggtgttcaccttcttccctgagagcctgcctgccaccaagaagccctttgagaggaagaccatcgaccggcagagcgccaggaagcccctgctgggcctgcccagctacatgctgcagagcgaggagctgcgggccagcctgctggcccgctacccacctgagaagctgttccaggccgagaggaacttcaatgctgcccaggacctggatgtgtccctgctggagggggacctggtgggcgtcatcaagaagaaggaccccatgggcagccagaaccgctggctgattgacaatggagtgaccaagggctttgtgtacagcagcttcctgaagccctacaaccccaggaggagccacagtgatgcctctgtgggcagccacagcagcacagaaagtgaacatggcagcagcagcccccgcttcccccggcagaacagcggcagcaccctgaccttcaaccccagctccatggctgtgtccttcaccagcggcagctgccagaagcagccccaggatgccagccccccacccaaggaatgtgaccagggcaccctgagcgccagcctgaaccccagcaacagcgagagcagccccagccgctgccccagcgaccctgacagcaccagccagcccaggtctggggacagcgcagatgtggccagagatgtgaagcagcccacagccacccccaggagctacagaaacttccgccaccctgagatcgtgggctacagcgtgcccggcagaaatggccagagccaggacctggtgaagggctgtgccaggacagcccaggccccagaagatagaagcacagagccagatggcagcgaggccgagggcaaccaggtgtactttgctgtgtacaccttcaaggccaggaaccccaatgagctgtctgtgtctgccaaccagaagctgaagatcctggagttcaaggatgtgactggaaacacagagtggtggctggccgaggtgaatggcaagaagggctacgtgcccagcaactacatcaggaagacagagtacacctag

SEQ ID NO: 20373 - DNA, 2964 bp, synthetic construct
  source 1..2964: mol_type = other DNA; note = Synthetic coding sequence
atggccgagagcagcagcgagagtgaccacttccgctgccgggaccggctgagcccctgggccgcccggagcacccaccggggcaccaggagcctgcccaccgtggaggtgacagagaaggtgaacaccatcaccagcaccctgcaggacaccagcaggaacctgcggcaggtggaccagatgctgggccgctaccgggagtacagcaatggccaggccggggccatcgagcacctgaaggagagcctggagcagagcattgaccagctgcggagccagaggctgctgagaaattctgggggccgcagcatctctgtgaccagcctgagcgccagtgacctggatggcggcaccggcagcgagctgcaccacttcccccccaccagccccctgaaggactatggagacccccagggcatcaagaggatgaggagcaggactggagtgcgctttgtgcaggagacagatgacatgacccagctgcacggcttccaccagagcctgcgggacctgagcagcgagcagatccggctgggagatgacttcaaccgggagctgagccgccgcagcagaagtgatgctgagaccaagagggccctggaggagctgacagagaagctgaatgaggcccagaagcaggaggtggtgtctgacagagtggagcggcggctgcaggagctggagcgggagatgaggacagagcgggagctggtggagcggcggcaggaccagctgggcctgatgagcctgcagctgcaggaggccctgaagaagcaggaggccaaggcagatgagcacgagggcgccatcaagaacaagctgcggcagacagaaacagagaagaaccagctggagcaggagctggagctgagccggcggctgctgaaccagagcgagggcagccgggagaccctgctgcaccaggtggaggagctgcggacccagctgaccaaggccgagggggacaggaagggcctgcagcaccaggtgtcccagatcagcaagcagcagagcaactaccaggatgagcagggcgaggactggaggttcagaagaggagtggagcgggagaagcaggacctggagaagcagatgtctgacctgcgggtgcagctgaacttcagcgccatggccagcgagctggaggaggtgaagcgctgcatggagaggaaggacaaggagaaggcccacctggccagccaggtggagaacctgacccgggagctggagaatggagagaagcagcagctgcagatgctggaccggctgaaggagatccagaaccactttgacacctgtgaggccgagaggaagcacgccgacctgcagatcagcgagctgaccaggcatgctgaagatgccaccaagcaggccgagcgctacctgtctgagctgcagcagagcgaggccctgaaggaggaggccgagaagaggcgggaggacctgaagctgaaggcccaggagagcatccggcagtggaagctgaagcacaagaagctggagcgggccctggagaagcagagcgagaccgtggatgagctgaccgggaagaacaaccagatcctgaaggagaaggatgagctgaagacccagctgtatgctgccctgcagcagatcgagaacctgaggaaggagctgaatgatgtgctgaccaagagggccctgcaggaggaggagctgcacagcaaggaggagaagctgcgggacatcaagagccaccaggccgacctggagctggaggtgaagaacagcctggacaccatccaccggctggagagcgagctgaagaagcagagcaagatccagagccagatgaaggtggagaaggcccacctggaggaggagattgctgagctgaagaagagccaggcccaggacaaggccaagctgctggagatgcaggagagcatcaaggacctgagcgccatccgggctgacctggccaacaagctggccgaggaggagcgggccaagaaggctgtgctgaaggacctgagtgacctgacagcccaggccaagagcagagatgaggagacagccaccatcatcacccagctgaagctggagagagatgtgcaccagcgggagctgaaggacctgaccagcagcctgcagagcgtgaagaccaagcatgagcagaacatccaggagctgatgaagcacttcaagaaggagaagtctgaggccgagaaccacatccgcaccctgaaggccgagagcctggaggagaagaacatggccaagatccaccggggccagctggagaagctgaagagccagtgtgaccggctgacagaggagctgacccagaatgaaaatgaaaacaagaagctgaagctgaagtaccagtgcctgaaggaccagctggaggagcgggagaagcacatcagcattgaggaggagcacctgcggaggatggaggaggcccggctgcagctgaaggaccagctgctgtgcctggagacagagcaggagagcatcctgggcgtgattggcaaggagattgatgctgcctgcaagaccttcagcaaggacagcgtggagaagctgaaggtgttcagcagcggccctgacatccactatgacccccaccgctggctggccgagagcaagaccaagctgcagtggctgtgtgaggagctgaaggagagagaaaatcgggagaagaacctgcggcaccagctgatgctgtgccggcagcagctgaggaacctgacagagaacaaggagagcgagctgcagtgcctcttccagcagatcgagcggcaggagcagctgctggatgagatccaccgggagaagagggacctgctggaggagacccagaggaaggatgaggagatgggcagcctgcaggacagagtcatcgccctggagaccagcacccaggtggccctggaccacctggagagcgtgcctgagaagctgagcctgctggaggacttcaaggacttcagaagatag

SEQ ID NO: 20374 - DNA, 5157 bp, synthetic construct
  source 1..5157: mol_type = other DNA; note = Synthetic coding sequence
atgagcggcaccagcagccctgaggccgtgaagaagctgctggagaacatgcagagcgacctgcgggccctgagcctggagtgcaagaagaagtttcctcctgtgaaggaggccgctgagagcggcatcatcaaggtgaagaccatcgccgccaggaacacagagatcctggccgccctgaaggagaacagcagcgaggtggtgcagcccttcctgatgggctgcggcaccaaggagcccaagatcacccagctgtgcctggccgccatccagaggctgatgagccatgaggtggtgtctgaaacagctgctggcaacatcatcaacatgctgtggcagctgatggagaacagcctggaggagctgaagctgctgcagacagtgctggtgctgctgaccaccaacacagtggtgcatgatgaggccctgagcaaggccatcgtgctgtgcttccggctgcacttcaccaaggacaacatcaccaacaacacagctgctgccaccgtgcggcaggtggtgacagtggtgtttgagaggatggtggctgaagatgagcggcaccgggacatcatcgagcagcctgtgctggtgcagggcaacagcaacagaagatctgtgtccaccctgaagccctgtgccaaggatgcctacatgctgttccaggacctgtgccagctggtgaatgctgatgccccctactggctggtgggcatgacagagatgaccaggaccttcggcctggagctgctggagagcgtgctgaatgacttcccccaggtgttcctgcagcaccaggagttctccttcctgctgaaggagcgggtgtgccccctggtgatcaagctgttcagccccaacatcaagttccggcagggcagcagcaccagcagcagccctgcccctgtggagaagccctacttccccatctgcatgaggctgctgcgggtggtgtctgtgctgatcaagcagttctacagcctgctggtgacagaatgtgagatcttcctgagcctgctggtgaagttcctggatgctgacaagccccagtggctgcgggctgtggccgtggagagcatccaccgcttctgtgtgcagccccagctgctgcgctccttctgccagagctatgacatgaagcagcacagcaccaaggtgttccgggacatcgtgaatgccctgggcagcttcatccagagcctcttcctggtgccccccaccggcaacccagccaccagcaaccaggccggcaacaacaacctgggcggctctgtgtctgccccagccaacagcggcatggtgggcattggaggcggcgtgaccctgctgcctgcctttgagtaccggggcacctggatccccatcctgaccatcaccgtgcagggcagcgccaaggccacctacctggagatgctggacaaggtggagccccccaccatccctgagggctacgccatgtctgtggccttccactgcctgctggacctggtgcggggcatcacctccatgattgaaggagagctgggggagctggagacagagtgccagaccaccacagaggagggcagcagccccacccagagcacagagcagcaggacctgcagagcaccagtgaccagatggacaaggagatcgtgtccagagctgtgtgggaggagatggtgaatgcctgctggtgtggcctgctggccgccctgagcctgctgctggatgccagcacagatgaggccgccacagagaacatcctgaaggccgagctgaccatggccgccctgtgtggccgcctgggcctggtgaccagcagagatgccttcatcacagccatctgcaagggcagcctgcccccccactacgccctgactgtgctgaacaccaccacagctgccaccctgagcaacaagagctacagcgtgcagggccagagcgtgatgatgatcagccccagcagcgagagccaccagcaggtggtggccgtgggccagcccctggccgtgcagccccagggcaccgtgatgctgaccagcaagaacatccagtgcatgaggaccctgctgaacctggcccactgccacggggctgtgctgggcacctcctggcagctggtgctggccaccctgcagcacctggtgtggatcctgggcctgaagcccagcagcggcggggccctgaagccaggccgggctgtggagggccccagcacagtgctgaccacagctgtgatgacagacctgcccgtcatcagcaacatcctgagccggctgtttgagagcagccagtacctggatgatgtgtccctgcaccacctgatcaatgccctgtgcagcctgagcctggaggccatggacatggcctacggcaacaacaaggagcccagcctgtttgctgtggccaagctgctggagaccggcctggtgaacatgcacagaattgagatcctgtggaggcccctgaccggccacctgctggagaaggtgtgccagcaccccaacagcaggatgagggagtggggcgctgaggccctgaccagcctcatcaaggccggcctgaccttcaaccacgacccccccctgagccagaaccagaggctgcagctgctgctgctgaaccccctgaaggagatgagcaacatcaaccacccagacatccggctgaagcagctggagtgtgtgctgcagatcctgcagagccagggcgacagcctgggccctggctggcccctggtgctgggcgtgatgggcgccatcagaaatgaccagggcgagagcctcatcagaacagccttccagtgcctgcagctggtggtgacagacttcctgcccaccatgccctgcacctgcctgcagatcgtggtggatgtggccggcagctttggcctgcacaaccaggagctgaacatcagcctgaccagcatcggcctgctgtggaacatcagtgactacttcttccagagaggagagaccatcgagaaggagctgaacaaggaggaggccgcccagcagaagcaggccgaggagaagggcgtggtgctgaaccggcccttccacccagcccccccatttgactgcctgtggctgtgcctgtatgccaagctgggggagctgtgtgtggaccccaggcctgctgtgaggaagtctgctggccagaccctcttcagcaccatcggggcccacggcaccctgctgcagcacagcacctggcacacagtcatctggaaggtgctcttccacctgctggacagagtgcgggagagcagcaccacagctgacaaggagaagattgagagcggcggcggcaacatcctgatccaccacagccgggacacagctgagaagcagtgggccgagacctgggtgctgaccctggccggcgtggcccgcatcttcaacacccggcgctacctgctgcagcccctgggggacttcagccgggcctgggatgtgctgctggaccacatccagagcgctgccctgagcaagaacaatgaggtgtccctggccgccctgaagagcttccaggagatcctgcagatcgtgtcccctgtgcgggacagcgacaagccagagaccccacctgtggtgaatgtgcctgtgcctgtgctgattggccccatcagcggcatgagccggccctttgtgaggacagacagcatcggggagaagctgggccgctacagcagcagcgagccccccatcgtgacagatgagctggaggacctgaacctgtggtgggccgcctggaacacctggtacagaattggcagcgagagcaccaagccacccatcacctttgacaagctgaccttcatccccagccagcccttcctgacagccctgatccagatcttccctgccctgtaccagcacatcaagacaggcttcaacatggatgacctgcagaagctgggcgtcatcctgcacagcgccatctctgtgcccatcagcagtgatgccagccccttcatcctgcccagctacacagaagctgtgctgaccagcctgcaggaggccgtgctgacagccctggatgtgctgcagaaggccatctgtgtgggccctgagaacatgcagatcatgtacccagccatctttgaccagctgctggcctttgtggagttcagctgcaagccaccccagtatggccagctggagaccaagcacatcgccaatgccaagtacaaccagatccagctgtttgccccagctgagtgggtggccctgaactacgtgccctttgctgagaggagcctggaggtggtggtggacctgtaccagaagacagcctgccacaaggctgtggtgaatgagaaggtgctgcagaacatcatcaagaccctgcgggtgcccctgagcctgaagtacagctgccccagcgagagcacctggaagctggccgtgagcagcctgctgcgggtgctgagcatcggcctgcctgtggcccggcagcacgccagcagcggcaagtttgacagcatgtggccagagctggccaacacctttgaggacttcctgttcaccaagagcatccccccagacaacctgagcatccaggagttccagagaaatgaaaatattgatgtggaggtggtgcagctgatcagcaatgagatcctgccctatgccaacttcatccccaaggagtttgtgggccagatcatgaccatgctgaacaagggcagcatccacagccagagcagcagcttcacagaagctgagattgacatccggctgcgggaggagttcagcaagatgtgctttgagaccctgctgcagttctccttcagcaacaaggtgaccaccccccaggagggctacatcagcaggatggccctgtctgtgctgctgaagaggagccaggatgtgctgcaccgctacattgaagatgagcggctgagcggcaagtgccccctgccccggcagcaggtgacagagatcatctttgtgctgaaggctgtgtccaccctgattgacagcctgaagaagacccagccagaaaatgtggatggcaacacctgggcccaggtgattgccctgtaccccaccctggtggagtgcatcacctgcagcagcagcgaggtgtgcagcgccctgaaggaggccctggtgcccttcaaggacttcatgcagcccccagccagccgggtgcagaatggagagagctag

SEQ ID NO: 20375 - DNA, 2100 bp, synthetic construct
  source 1..2100: mol_type = other DNA; note = Synthetic coding sequence
atgagcagcaggaaggtgctggccatccaggccaggaagaggcggcccaagcgggagaagcaccccaagaagccagagccccagcagaaggcccccctggtgcccccacctcctcctcctcctcctcctcctcctccacccctgcctgaccccaccccacctgagcctgaggaggagatcctgggcagtgatgatgaggagcaggaggaccctgctgactactgcaagggcggctaccaccctgtgaagatcggggacctcttcaacggccgctaccacgtgatcaggaagctgggctggggccacttcagcacagtgtggctgtgctgggacatgcagggcaagagatttgtggccatgaaggtggtgaagagcgcccagcactacacagaaacagccctggatgagatcaagctgctgaagtgtgtgcgggagagtgaccccagcgaccccaacaaggacatggtggtgcagctgattgatgacttcaagatcagcggcatgaatggcatccacgtgtgcatggtgtttgaggtgctgggccaccacctgctgaagtggatcatcaagagcaactaccagggcctgcctgtgcgctgtgtgaagagcatcatccggcaggtgctgcagggcctggactacctgcacagcaagtgcaagatcatccacacagacatcaagccagagaacatcctgatgtgtgtggatgatgcctacgtgcggaggatggctgctgaggccacagagtggcagaaggccggggcccctcctccttctggcagcgctgtgtccacagccccccagcagaagcccatcggcaagatcagcaagaacaagaagaagaagctgaagaagaagcagaagaggcaggccgagctgctggagaagaggctgcaggagattgaggagctggagcgggaggccgagaggaagatcatcgaggagaacatcaccagcgctgcccccagcaatgaccaggatggagagtactgcccagaggtgaagctgaagaccaccggcctggaggaggccgctgaggccgagacagccaaggacaatggagaggccgaggaccaggaggagaaggaggatgctgagaaggagaacatcgagaaggatgaagatgatgtggaccaggagctggccaacatcgaccccacctggattgagagccccaagaccaacggccacattgaaaatggccccttcagcctggagcagcagctggatgatgaagatgatgatgaggaggactgccccaaccctgaggagtacaacctggatgagcccaatgctgagagtgactacacctacagcagcagctatgagcagttcaacggggagctgcccaacggccgccacaagatccctgagagccagtttcctgagttcagcaccagcctcttcagcggcagcctggagcctgtggcctgtggctctgtgctgtctgagggcagccccctgacagagcaggaggagagcagccccagccatgacaggagcaggacagtgtctgccagcagcactggagacctgcccaaggccaagaccagggctgctgacctgctggtgaaccccctggaccccagaaatgctgacaagatccgggtgaagattgctgacctgggcaatgcctgctgggtgcacaagcacttcacagaggacatccagacccggcagtaccgcagcattgaggtgctgattggagctggctacagcaccccagctgacatctggagcacagcctgcatggcctttgagctggccaccggggactacctgtttgagccccacagcggggaggactacagcagagatgaggaccacatcgcccacatcatcgagctgctgggcagcatccccaggcactttgccctgagcggcaagtacagccgggagttcttcaacagaagaggagagctgcggcacatcaccaagctgaagccctggagcctgtttgatgtgctggtggagaagtatggctggccccatgaagatgctgcccagttcacagacttcctgatccccatgctggagatggtgcctgagaagagggccagcgctggggagtgcctgcggcacccctggctgaacagctag

SEQ ID NO: 20376 - DNA, 1113 bp, synthetic construct
  source 1..1113: mol_type = other DNA; note = Synthetic coding sequence
atgggcttcaaccggcccagcaagatccaggagaatgccctgcccctgatgctggccgagcccccccagaacctgattgcccagagccagagcggcaccgggaagacagctgcctttgtgctggccatgctgagccaggtggagcccgccaacaagtacccccagtgcctgtgcctgagccccacctatgagctggccctgcagacaggcaaggtgattgagcagatgggcaagttctacccagagctgaagctggcctatgctgtgcggggcaacaagctggagcggggccagaagatcagcgagcagatcgtcatcggcaccccaggcaccgtgctggactggtgcagcaagctgaagttcatcgaccccaagaagatcaaggtgtttgtgctggatgaagcagatgtgatgattgccacccagggccaccaggaccagagcatccgcatccagaggatgctgcccaggaactgccagatgctgctcttcagcgccacctttgaagattctgtgtggaagtttgcccagaaggtggtgcctgaccccaacgtcatcaagctgaagcgggaggaggagaccctggacaccatcaagcagtactacgtgctgtgcagcagcagagatgagaagttccaggccctgtgcaacctgtatggagccatcaccatcgcccaggccatgatcttctgccacaccaggaagacagcctcctggctggccgctgagctgagcaaggagggccaccaggtggccctgctgtctggagagatgatggtggagcagagagctgctgtgattgagcgcttccgggagggcaaggagaaggtgctggtgaccaccaacgtgtgtgcccggggcattgatgtggagcaggtgtctgtggtgatcaactttgacctgcctgtggacaaggatggcaacccagacaatgagacctacctgcaccgcatcggccgcacaggccgctttgggaagaggggcctggccgtgaacatggtggacagcaagcacagcatgaacatcctgaaccgcatccaggagcacttcaacaagaagattgaaaggctggacacagatgacctggatgaaattgagaagatcgccaactag

SEQ ID NO: 20377 - DNA, 2640 bp, synthetic construct
  source 1..2640: mol_type = other DNA; note = Synthetic coding sequence
atgttctggaagtttgacctgcacagcagcagccacatcgacaccctgctggagcgggaggatgtgaccctgaaggagctgatggatgaagaagatgtgctgcaggagtgcaaggcccagaacaggaagctgattgagttcctgctgaaggccgagtgcctggaggacctggtgtccttcatcatcgaggagcccccccaggacatggatgagaagatccgctacaagtaccccaacatcagctgtgagctgctgaccagtgatgtgtcccagatgaatgaccggctgggggaggatgagagcctgctgatgaagctgtacagcttcctgctgaatgacagccccctgaaccccctgctggccagcttcttcagcaaggtgctgagcatcctgatcagcaggaagccagagcagatcgtggacttcctgaagaagaagcatgactttgtggacctgatcatcaagcacatcggcaccagcgccatcatggacctgctgctgcggctgctgacctgcatcgagcccccccagccccggcaggatgtgctgaactggctgaatgaggagaagatcatccagaggctggtggagatcgtgcaccccagccaggaggaggacagacacagcaatgccagccagagcctgtgtgagatcgtgcggctgagccgggaccagatgctgcagatccagaacagcacagagccagaccccctgctggccaccctggagaagcaggagatcatcgagcagctgctgagcaacatcttccacaaggagaagaatgaaagtgccatcgtgtctgccatccagatcctgctgaccctgctggagacccggcggcccacctttgagggccacatcgagatctgccccccaggcatgagccacagcgcctgcagcgtgaacaagtctgtgctggaggccatccggggccgcctgggcagcttccacgagctgctgctggagccccccaagaagtctgtgatgaagaccacctggggcgtgctggacccccctgtgggcaacacccggctgaatgtcatccgcctcatcagcagcctgctgcagaccaacaccagcagcatcaatggagacctgatggagctgaacagcattggagtcatcctgaacatgttcttcaagtacacctggaacaacttcctgcacacccaggtggagatctgcatcgccctgatcctggccagcccctttgaaaatacagaaaatgccaccatcacagaccaggacagcactggagacaacctgctgctgaagcacctgttccagaagtgccagctgattgaaagaatcctggaggcctgggagatgaatgagaagaagcaggccgagggcggcagaagacatggctacatgggccacctgacccgcatcgccaactgcatcgtgcacagcacagacaagggccccaacagcgccctggtgcagcagctgatcaaggacctgcctgatgaggtgcgggagcgctgggagaccttctgcaccagcagcctgggggagaccaacaagaggaacacagtggacctggtgaccacctgccacatccacagcagcagtgatgatgaaattgacttcaaggagaccggcttcagccaggacagcagcctgcagcaggccttcagtgactaccagatgcagcagatgaccagcaacttcatcgaccagtttggcttcaatgatgagaagtttgctgaccaggatgacattggaaatgtgtcctttgacagagtgtctgacatcaacttcaccctgaacaccaatgaaagtggcaacatcgccctgtttgaggcctgctgcaaggagcgcatccagcagtttgatgatggcggcagtgatgaggaggacatctgggaggagaagcacatcgccttcaccccagagagccagaggaggagcagcagcggcagcacagattctgaggagagcacagattctgaggaggaggatggagccaagcaggacctgtttgagcccagcagcgccaacacagaggacaagatggaggtggacctgtctgagccccccaactggagcgccaactttgatgtgcccatggagaccacccatggagcccccctggacagcgtgggcagtgatgtgtggagcacagaggagcccatgcccaccaaggagaccggctgggccagcttcagcgagttcaccagcagcctgagcaccaaggacagcctgcggagcaacagccctgtggagatggagaccagcacagagcccatggaccccctgaccccatctgctgctgccctggccgtgcagcctgaggccgccggctctgtggccatggaggccagcagtgatggagaagaagatgctgagagcacagacaaggtgacagagaccgtgatgaatggaggcatgaaggagaccctgagcctgactgtggatgccaagacagaaacagctgtgttcaagaggctgctgggcggctgcagcgaggagggcaagctgagcaccagccaggatgctgcctgcaaggatgctgaagaatgtcctgagacagctgaggccaagtgtgccgcccccaggcctcccagcagcagccctgagcagaggacaggccagcccagcgcccctggggacacctctgtgaatggacctgtgtag

SEQ ID NO: 20378 - DNA, 2622 bp, synthetic construct
  source 1..2622: mol_type = other DNA; note = Synthetic coding sequence
atgttctggaagtttgacctgcacagcagcagccacatcgacaccctgctggagcgggaggatgtgaccctgaaggagctgatggatgaagaagatgtgctgcaggagtgcaaggcccagaacaggaagctgattgagttcctgctgaaggccgagtgcctggaggacctggtgtccttcatcatcgaggagcccccccaggacatggatgagaagatccgctacaagtaccccaacatcagctgtgagctgctgaccagtgatgtgtcccagatgaatgaccggctgggggaggatgagagcctgctgatgaagctgtacagcttcctgctgaatgacagccccctgaaccccctgctggccagcttcttcagcaaggtgctgagcatcctgatcagcaggaagccagagcagatcgtggacttcctgaagaagaagcatgactttgtggacctgatcatcaagcacatcggcaccagcgccatcatggacctgctgctgcggctgctgacctgcatcgagcccccccagccccggcaggatgtgctgaactggctgaatgaggagaagatcatccagaggctggtggagatcgtgcaccccagccaggaggaggacagacacagcaatgccagccagagcctgtgtgagatcgtgcggctgagccgggaccagatgctgcagatccagaacagcacagagccagaccccctgctggccaccctggagaagcaggagatcatcgagcagctgctgagcaacatcttccacaaggagaagaatgaaagtgccatcgtgtctgccatccagatcctgctgaccctgctggagacccggcggcccacctttgagggccacatcgagatctgccccccaggcatgagccacagcgcctgcagcgtgaacaagtctgtgctggaggccatccggggccgcctgggcagcttccacgagctgctgctggagccccccaagaagtctgtgatgaagaccacctggggcgtgctggacccccctgtgggcaacacccggctgaatgtcatccgcctcatcagcagcctgctgcagaccaacaccagcagcatcaatggagacctgatggagctgaacagcattggagtcatcctgaacatgttcttcaagtacacctggaacaacttcctgcacacccaggtggagatctgcatcgccctgatcctggccagcccctttgaaaatacagaaaatgccaccatcacagaccaggacagcactggagacaacctgctgctgaagcacctgttccagaagtgccagctgattgaaagaatcctggaggcctgggagatgaatgagaagaagcaggccgagggcggcagaagacatggctacatgggccacctgacccgcatcgccaactgcatcgtgcacagcacagacaagggccccaacagcgccctggtgcagcagctgatcaaggacctgcctgatgaggtgcgggagcgctgggagaccttctgcaccagcagcctgggggagaccaacaagaggaacacagtggacctggtgaccacctgccacatccacagcagcagtgatgatgaaattgacttcaaggagaccggcttcagccaggacagcagcctgcagcaggccttcagtgactaccagatgcagcagatgaccagcaacttcatcgaccagtttggcttcaatgatgagaagtttgctgaccaggatgacattggaaatgtgtcctttgacagagtgtctgacatcaacttcaccctgaacaccaatgaaagtggcaacatcgccctgtttgaggcctgctgcaaggagcgcatccagcagtttgatgatggcggcagtgatgaggaggacatctgggaggagaagcacatcgccttcaccccagagagccagaggaggagcagcagcggcagcacagattctgaggagagcacagattctgaggaggaggatggagccaagcaggacctgtttgagcccagcagcgccaacacagaggacaagatggaggtggacctgtctgagccccccaactggagcgccaactttgatgtgcccatggagaccacccatggagcccccctggacagcgtgggcagtgatgtgtggagcacagaggagcccatgcccaccaaggagaccggctgggccagcttcagcgagttcaccagcagcctgagcaccaaggacagcctgcggagcaacagccctgtggagatggagaccagcacagagcccatggaccccctgaccccatctgctgctgccctggccgtgcagcctgaggccgccggctctgtggccatggaggccagcagtgatggagaagaagatgctgagagcacagacaaggtgacagagaccgtgatgaatggaggcatgaaggagaccctgagcctgactgtggatgccaagacagaaacagctgtgttcaagtctgaggagggcaagctgagcaccagccaggatgctgcctgcaaggatgctgaagaatgtcctgagacagctgaggccaagtgtgccgcccccaggcctcccagcagcagccctgagcagaggacaggccagcccagcgcccctggggacacctctgtgaatggacctgtgtag

SEQ ID NO: 20379 - DNA, 2640 bp, synthetic construct
  source 1..2640: mol_type = other DNA; note = Synthetic coding sequence
atgttctggaagtttgacctgcacagcagcagccacatcgacaccctgctggagcgggaggatgtgaccctgaaggagctgatggatgaagaagatgtgctgcaggagtgcaaggcccagaacaggaagctgattgagttcctgctgaaggccgagtgcctggaggacctggtgtccttcatcatcgaggagcccccccaggacatggatgagaagatccgctacaagtaccccaacatcagctgtgagctgctgaccagtgatgtgtcccagatgaatgaccggctgggggaggatgagagcctgctgatgaagctgtacagcttcctgctgaatgacagccccctgaaccccctgctggccagcttcttcagcaaggtgctgagcatcctgatcagcaggaagccagagcagatcgtggacttcctgaagaagaagcatgactttgtggacctgatcatcaagcacatcggcaccagcgccatcatggacctgctgctgcggctgctgacctgcatcgagcccccccagccccggcaggatgtgctgaactggctgaatgaggagaagatcatccagaggctggtggagatcgtgcaccccagccaggaggaggacagacacagcaatgccagccagagcctgtgtgagatcgtgcggctgagccgggaccagatgctgcagatccagaacagcacagagccagaccccctgctggccaccctggagaagcaggagatcatcgagcagctgctgagcaacatcttccacaaggagaagaatgaaagtgccatcgtgtctgccatccagatcctgctgaccctgctggagacccggcggcccacctttgagggccacatcgagatctgccccccaggcatgagccacagcgcctgcagcgtgaacaagtctgtgctggaggccatccggggccgcctgggcagcttccacgagctgctgctggagccccccaagaagtctgtgatgaagaccacctggggcgtgctggacccccctgtgggcaacacccggctgaatgtcatccgcctcatcagcagcctgctgcagaccaacaccagcagcatcaatggagacctgatggagctgaacagcattggagtcatcctgaacatgttcttcaagtacacctggaacaacttcctgcacacccaggtggagatctgcatcgccctgatcctggccagcccctttgaaaatacagaaaatgccaccatcacagaccaggacagcactggagacaacctgctgctgaagcacctgttccagaagtgccagctgattgaaagaatcctggaggcctgggagatgaatgagaagaagcaggccgagggcggcagaagacatggctacatgggccacctgacccgcatcgccaactgcatcgtgcacagcacagacaagggccccaacagcgccctggtgcagcagctgatcaaggacctgcctgatgaggtgcgggagcgctgggagaccttctgcaccagcagcctgggggagaccaacaagaggaacacagtggacctggtgaccacctgccacatccacagcagcagtgatgatgaaattgacttcaaggagaccggcttcagccaggacagcagcctgcagcaggccttcagtgactaccagatgcagcagatgaccagcaacttcatcgaccagtttggcttcaatgatgagaagtttgctgaccaggatgacattggaaatgtgtcctttgacagagtgtctgacatcaacttcaccctgaacaccaatgaaagtggcaacatcgccctgtttgaggcctgctgcaaggagcgcatccagcagtttgatgatggcggcagtgatgaggaggacatctgggaggagaagcacatcgccttcaccccagagagccagaggaggagcagcagcggcagcacagattctgaggagagcacagattctgaggaggaggatggagccaagcaggacctgtttgagcccagcagcgccaacacagaggacaagatggaggtggacctgtctgagccccccaactggagcgccaactttgatgtgcccatggagaccacccatggagcccccctggacagcgtgggcagtgatgtgtggagcacagaggagcccatgcccaccaaggagaccggctgggccagcttcagcgagttcaccagcagcctgagcaccaaggacagcctgcggagcaacagccctgtggagatggagaccagcacagagcccatggaccccctgaccccatctgctgctgccctggccgtgcagcctgaggccgccggctctgtggccatggaggccagcagtgatggagaagaagatgctgagagcacagacaaggtgacagagaccgtgatgaatggaggcatgaaggagaccctgagcctgactgtggatgccaagacagaaacagctgtgttcaagagggtgctgaagagctaccgggaggagggcaagctgagcaccagccaggatgctgcctgcaaggatgctgaagaatgtcctgagacagctgaggccaagtgtgccgcccccaggcctcccagcagcagccctgagcagaggacaggccagcccagcgcccctggggacacctctgtgaatggacctgtgtag

SEQ ID NO: 20380 - DNA, 1134 bp, synthetic construct
  source 1..1134: mol_type = other DNA; note = Synthetic coding sequence
atgtctgatgaggtgttcagcaccaccctggcctacaccaagagccccaaggtgaccaagaggaccaccttccaggatgagctgatccgggccatcacagcccggagcgcccggcagaggagcagcgagtacagtgatgactttgacagtgatgaaattgtgtccctgggggacttcagtgacaccagcgcagatgagaacagcgtgaacaagaagatgaatgacttccacatcagtgatgatgaggagaagaaccccagcaagctgctcttcctgaagaccaacaagagcaatggaaacatcaccaaggatgagcctgtgtgtgccatcaagaatgaggaggagatggccccagatggctgtgaggacatcgtggtgaagagcttcagcgagagccagaacaaggatgaggagtttgagaaggacaagatcaagatgaagcccaagccccgcatcctgagcatcaagagcaccagcagcgctgagaacaacagcctggacacagatgaccacttcaagcccagcccccggcccaggtccatgctgaagaagaagagccacatggaggagaaggatggcctggaggacaaggagacagccctgtctgaggagctggagctgcacagcgcccccagcagcctgcccacccccaacggcatccagctggaggccgagaagaaggccttcagcgagaacctggaccctgaggacagctgcctgaccagcctggccagcagcagcctgaagcagatcctgggggacagcttcagccctggcagcgagggcaatgccagcggcaaggaccccaatgaggagatcacagagaaccacaacagcctgaagagtgatgagaacaaggaaaattccttctctgctgaccacgtgaccacagctgtggagaagagcaaggagagccaggtgacagcagatgacctggaggaggagaaggccaaggccgagctgatcatggatgatgacagaacagtggaccccctgctgagcaagagccagagcatcctgatcagcaccagcgccacagccagcagcaagaagaccatcgaggacaggaacatcaagaacaagaagagcaccaacaacagagccagcagcgccagcgccagcaaggccagctag

SEQ ID NO: 20381 - DNA, 576 bp, synthetic construct; identical to SEQ ID NO: 18830
  source 1..576: mol_type = other DNA; note = Synthetic coding sequence

SEQ ID NO: 20382 - DNA, 576 bp, synthetic construct; identical to SEQ ID NO: 18830
  source 1..576: mol_type = other DNA; note = Synthetic coding sequence

SEQ ID NO: 20383 - DNA, 570 bp, synthetic construct
  source 1..570: mol_type = other DNA; note = Synthetic coding sequence
atgggcaagagctgcaaggtggtggtgtgtggccaggcctctgtgggcaagaccagcatcctggagcagctgctgtatggcaaccacgtggtggccatgattgagacccaggaggacatctacgtgggcagcattgaaacagaccggggcgtgcgggagcaggtgcgcttctatgacacccggggcctgagagatggagctgagctgcccaggcactgcttcagctgcacagatggctacgtgctggtgtacagcacagacagccgggagagcttccagagggtggagctgctgaagaaggagattgacaagagcaaggacaagaaggaggtgaccatcgtggtgctgggcaacaagtgtgacctgcaggagcagaggagagtggaccctgatgtggcccagcactgggccaagtctgagaaggtgaagctgtgggaggtgtctgtggccgaccggcgcagcctgctggagccctttgtgtacctggccagcaagatgacccagccccagagcaagagcgccttccccctgagcaggaagaacaagggcagcggcagcctggatggatag

SEQ ID NO: 20384 - DNA, 576 bp, synthetic construct; identical to SEQ ID NO: 18830
  source 1..576: mol_type = other DNA; note = Synthetic coding sequence

SEQ ID NO: 20385 - DNA, 1005 bp, synthetic construct
  source 1..1005: mol_type = other DNA; note = Synthetic coding sequence
atggccgaggaggtgcggcgggaggaggccagcggcgtgggccgggcccggacccccacccctggggccctgcgggccccccagctggtgacagaggccccacccctgcaccctggccacaccctgatgaaggccaccgtgctgatgaggcagcccggccgggtgcaggagatcgtgggcgccctgaggaagggcggcggggaccggctgcaggtgatcagtgactttgacatgaccctgagcagatttgcctacaacgggaagcgctgccccagcagctacaacatcctggacaacagcaagatcatcagcgaggagtgcaggaaggagctgacagccctgctgcaccactactaccccattgaaattgacccccacaggacagtgaaggagaagctgccccacatggtggagtggtggaccaaggcccacaacctgctgtgccagcagaagatccagaagttccagatcgcccaggtggtgcgggagagcaatgccatgctgcgggagggctacaagaccttcttcaacaccctgtaccacaacaacatccccctcttcatcttctctgctggcattggagacatcctggaggagatcatccggcagatgaaggtgttccaccccaacatccacatcgtgagcaactacatggacttcaatgaagatggcttcctgcagggcttcaagggccagctgatccacacctacaacaagaacagcagcgcctgtgaaaattctggctacttccagcagctggagggcaagaccaacgtcatcctgctgggggacagcatcggggacctgaccatggctgatggagtgcctggggtgcagaacatcctgaagattggcttcctgaatgacaaggtggaggagcggcgggagcgctacatggacagctatgacatcgtgctggagaaggatgagaccctggatgtggtgaatggcctgctgcagcacatcctgtgccagggcgtgcagctggagatgcagggcccctag

SEQ ID NO: 20386 - DNA, 531 bp, synthetic construct; identical to SEQ ID NO: 18672
  source 1..531: mol_type = other DNA; note = Synthetic coding sequence

SEQ ID NO: 20387 - DNA, 912 bp, synthetic construct
  source 1..912: mol_type = other DNA; note = Synthetic coding sequence
atggacagcctgcctgatgagttctttgtgcgccaccctgctgtggaggaccagaggaaggaggagacagagaacaagctggagaagagcagcggccagctgaacaagcaggagaatgacatccccacagacctggtgcctgtgaacctgctgctggaggtgaagaagctgctgaatgccatcaacaccctgcccaagggcgtggtgccccacatcaagaagttcctgcaggaggacttctccttccagaccatgcagcgggaggtggccgccaacagccagaatggagaggagatcgtgcctgccctgaccctgcgcttcctgatcacccagctggaggccgccctgaggaacatccaggccggcaactacacagcccaccagatcaacatcggctactacctgaccctgctcttcctgtatggagtggccctgacagagcggggcaagaaggaggactacacagaagctgagaacaagttcctggtgatgaagatgatgatccaggagaatgagatctgtgagaacttcatgagcctggtgtacttcggccggggcctgctgcgctgtgcccagaagcgctacaacggcggcctgctggagttccacaagagcctgcaggagattggagacaagaatgaccactggtttgatattgaccccacagaagatgaggacctgcccaccaccttcaaggacctgctgaacaacttcatcaagaccacagagagcaacatcatgaagcagaccatctgcagctacctggactgtgagaggagctgtgaggccgacatcctgaagaacaccagctacaagggcttcttccagctgatgtgcagcaagagctgctgcgtgtacttccacaagatctgctggaagaagttcaagaacctgaagtacccaggcttctag

SEQ ID NO: 20388 - DNA, 1869 bp, synthetic construct
  source 1..1869: mol_type = other DNA; note = Synthetic coding sequence
atggacctgctgaccagagaaaatgtggccctgaaggtggagagcgcccagcagcccaagcaggtgctgaagatggaggtggccgtgctgaagaagctgcagggcaaggaccacgtgtgccgcttcatcggctgcggcagaaatgagaagttcaactacgtggtgatgcagctgcagggcaggaacctggccgacctgcggcgcagccagccccggggcaccttcaccctgagcaccaccctgcggctgggcaagcagatcctggagagcattgaggccatccacagcgtgggcttcctgcaccgggacatcaagcccagcaactttgccatgggccgcctgcccagcacctacaggaagtgctacatgctggactttggcctggcccggcagtacaccaacaccactggagatgtgcggcccccaagaaatgtggccggcttccggggcaccgtgcgctatgcctctgtgaatgcccacaagaaccgggagatgggcagacatgatgacctgtggagcctcttctacatgctggtggagtttgctgtgggccagctgccctggaggaagatcaaggacaaggagcaggtgggcatgatcaaggagaagtatgagcacaggatgctgctgaagcacatgcccagcgagttccacctgttcctggaccacatcgccagcctggactacttcaccaagccagactaccagctgatcatgtctgtgtttgaaaattccatgaaggagcggggcattgctgaaaatgaggcctttgactgggagaaggccggcacagatgccctgctgagcaccagcaccagcaccccaccccagcagaacacccggcagacagctgccatgtttggagtggtgaatgtgacccctgtgcctggggacctgctgcgggagaacacagaagatgtgctgcagggcgagcacctgagtgaccaggagaatgccccacccatcctgcccggccggcccagcgagggcctgggccccagcccccacctggtgccccaccctgggggccctgaggccgaggtgtgggaggagacagatgtgaacagaaacaagctgcgcatcaacatcggcaagagcccctgtgtggaggaggagcagagccggggcatgggcgtgcccagcagccctgtgcgggcccccccagacagccccaccacccctgtgcgcagcctgcgctacagaagagtgaacagccctgagagcgagcggctgagcacagcagatggccgggtggagctgcctgagaggaggagcaggatggacctgcccggcagccccagccggcaggcctgcagcagccagcctgcccagatgctgtctgtggacaccggccatgctgaccggcaggccagcggccgcatggatgtgtctgcctctgtggagcaggaggccctgagcaatgccttccgctctgtgcccctggccgaggaggaggactttgacagcaaggagtgggtgatcatcgacaaggagacagagctgaaggacttccccccaggagctgagcccagcaccagcggcaccacagatgaggagcctgaggagctgcggcccctgcctgaggagggggaggagcggcggcggctgggcgctgagccccccttccccctgaccccagccctgggcaccccacccagcacagagcgggtgggcccccaccggcccacagaaacagtgggcggcggccagaccctgggcgccctgcccccagctgtgcagcccccagccaccactggagtgctgcgggtgctgctgctgcatgctggagatggagccctgcccagccccaggagaagaaggctgctgggcctgctgcgcttcccccacagcgcccagcccctgggctag

SEQ ID NO: 20389 - DNA, 447 bp, synthetic construct
  source 1..447: mol_type = other DNA; note = Synthetic coding sequence
atggctgctgccatggtgcccggccgctctgagagctgggagcggggggagcccggccgcccagccctgtacttctgtggcagcatccggggcggccgggaggacaggaccctgtatgagcgcatcgtgtcccggctgcggagatttggaacagtgctgacagagcacgtggccgctgctgagctgggcgcccggggggaggaggccgccggcggggacaggctcatccacgagcaggacctggagtggctgcagcaggctgatgtggtggtggccgaggtgacccagcccagcctgggcgtgggctatgagctgggccgggctgtggccttcaacaagaggatcctgtgcctcttccggccccagagcggccgcggggagcaccccaagcccccatcctggctgtccatggaccctgccctgagcagcttccctgggggcctgtag

SEQ ID NO: 20390 - DNA, 606 bp, synthetic construct
  source 1..606: mol_type = other DNA; note = Synthetic coding sequence
atggtgaacagctgctgcggctctgtgtgcagcgaccagggctgcggcctggagaactgctgccggcccagctgctgccagaccacctgctgcaggaccacctgctgccggcccagctgctgcgtgagcagctgctgccggccccagtgctgccagagcgtgtgctgccagcccacctgctgccggcccagctgctgccagaccacctgctgcaggaccacctgctgccggcccagctgctgcgtgagcagctgctgccggccccagtgctgccagagcgtgtgctgccagcccacctgctgccggcccagctgctgccagaccacctgctgcaggaccacctgctgccggcccagctgctgcgtgagcagctgctgccggccccagtgctgccagagcgtgtgctgccagcccacctgctgccggcccagctgctgcatcagcagcagctgctgccccagctgctgtgagagcagctgctgccggccctgctgctgcctgcggcctgtgtgtggccgggtgtcctgccacaccacctgctaccggcccacctgtgtgatcagcacctgcccccggcccctgtgctgtgccagcagctgctgctag

SEQ ID NO: 20391 - DNA, 387 bp, synthetic construct; identical to SEQ ID NO: 20290
  source 1..387: mol_type = other DNA; note = Synthetic coding sequence

SEQ ID NO: 20392 - DNA, 1140 bp, synthetic construct
  source 1..1140: mol_type = other DNA; note = Synthetic coding sequence
atgagcctgcggctgagcagcgccagccgccgcagctgcccccggcccaccaccggcagcctgcggctgtatggaggcggcaccagctttggcaccggcaacagctgtggcatctctggaattggcagcggcttcagcagcgcctttggaggcagcagcagcggcggcaacacaggaggcggcaacccctgtgccggcttcaccgtgaatgaaagaggcctgctgtctggaaatgagaaggtgaccatgcagaacctgaatgaccggctggccagctacctggacagcgtgcacgccctggaggaggccaatgctgacctggagcagaagatcaagggctggtatgagaagtttggacctggcagctgccggggcctggaccatgactacagccgctacttccccatcattgatgacctgaagaaccagatcatcgccagcaccaccagcaatgccaatgctgtgctgcagattgacaatgcccggctgacagcagatgacttccggctgaagtatgaaaatgagctggccctgcaccagagcgtggaggctgatgtgaatggcctgcggcgggtgctggatgagatcaccctgtgcaggacagacctggagatccagtatgagaccctgtctgaggagatgacctacctgaagaagaaccacaaggaggagatgcaggtgctgcagtgtgccgccggcggcaatgtgaatgtggagattgagctgcagagcctgctggccaccaagcacagcctggagtgcagcctgacagaaacagagagcaactactgtgcccagctggcccagatccaggcccagatcggggccctggaggagcagctgcaccaggtgaggacagaaacagagggccagaagctggagtatgagcagctgctggacatcaagctgcacctggagaaggagattgagacctactgcctgctgattggaggagatgatggagcctgcaagagcggcggctacaagagcaaggactatggcagcggaaatgtgggcagccaggtgaaggaccctgccaaggccatcgtggtgaagaaggtgctggaggaggtggaccagaggagcaagatcctgaccacccggctgcacagcctggaggagaagagccagagcaactag

SEQ ID NO: 20393 - DNA, 768 bp, synthetic construct
  source 1..768: mol_type = other DNA; note = Synthetic coding sequence
atggacaaggatgaggaggccctgaaggccgcccaggccgagctgaaggaggcccggcggcagtggcaccacctgcaggtggagattgagagcctgcatgctgtggagcggggcctggagaacagcctgcacgccagcgagcagcactaccagatgcagctgcaggacctggagaccgtgattgagggcctggagaaggagctgcaggaggtgcggcggggcatcgagaagcagctgcaggagcacgagatgctgctgaacaccaagatgaggctggagcaggagatcgccacctaccgccacctgctggagaaggaggagatccgctactacggctgcatccagggcggcaagaaggacaagaagcccaccaccagccgggtgggctttgtgctgcccagcgccatcatcaatgagatctccttcaccaccaaggtgccccagaagtatgaaaatgaaaatgtggagaccgtgaccaagcaggccatcctgaatggcagcatcgtgaaggagagcacagaggcccacggcaccatccagacagagaaggtggatgaagtcatcaaggagtgggagggcagcttcttcaaggacaacccccggctgaggaagaagtctgtgtccctgcgctttgacctgcacctggccgccacagatgagggctgcctggagaccaagcaggacaacctgcctgacatcgaggtgcggctcatcatgaggaggagctgcagcatccccagcatcaagccacccagcacagccaactag

SEQ ID NO: 20394 - DNA, 888 bp, synthetic construct
  source 1..888: mol_type = other DNA; note = Synthetic coding sequence
atggagctgagccagctgctgaatgagatccgggccaactatgagaagatcctgaccaggaaccagattgaaacagtgctgagcacccgcatccagctggaggaggacatcagcaagaagatggacaaggatgaggaggccctgaaggccgcccaggccgagctgaaggaggcccggcggcagtggcaccacctgcaggtggagattgagagcctgcatgctgtggagcggggcctggagaacagcctgcacgccagcgagcagcactaccagatgcagctgcaggacctggagaccgtgattgagggcctggagaaggagctgcaggaggtgcggcggggcatcgagaagcagctgcaggagcacgagatgctgctgaacaccaagatgaggctggagcaggagatcgccacctaccgccacctgctggagaaggaggagatccgctactacggctgcatccagggcggcaagaaggacaagaagcccaccaccagccgggtgggctttgtgctgcccagcgccatcatcaatgagatctccttcaccaccaaggtgccccagaagtatgaaaatgaaaatgtggagaccgtgaccaagcaggccatcctgaatggcagcatcgtgaaggagagcacagaggcccacggcaccatccagacagagaaggtggatgaagtcatcaaggagtgggagggcagcttcttcaaggacaacccccggctgaggaagaagtctgtgtccctgcgctttgacctgcacctggccgccacagatgagggctgcctggagaccaagcaggacaacctgcctgacatcgaggtgcggctcatcatgaggaggagctgcagcatccccagcatcaagccacccagcacagccaactag

SEQ ID NO: 20395 - DNA, 1860 bp, synthetic construct; identical to SEQ ID NO: 19352
  source 1..1860: mol_type = other DNA; note = Synthetic coding sequence

SEQ ID NO: 20396 - DNA, 1860 bp, synthetic construct; identical to SEQ ID NO: 19352
  source 1..1860: mol_type = other DNA; note = Synthetic coding sequence

SEQ ID NO: 20397 - DNA, 1170 bp, synthetic construct
  source 1..1170: mol_type = other DNA; note = Synthetic coding sequence
atgctgcgctggacagtgcacctggagggcggccccaggagagtgaaccacgccgctgtggccgtgggccaccgggtgtacagctttggaggctactgcagcggggaggactatgagaccctgcggcagattgatgtgcacatcttcaatgctgtgtccctgcgctggaccaagctgccccctgtgaagagcgccatccggggccaggcccctgtggtgccctacatgagatatggccacagcacagtgctgattgatgacacagtgctgctgtggggcggcagaaatgacacagagggcgcctgcaatgtgctgtatgcctttgatgtgaacacccacaagtggttcaccccccgggtgtctggaacagtgcctggggccagagatggccacagcgcctgtgtgctgggcaagatcatgtacatctttggaggctatgagcagcaggccgactgcttcagcaatgacatccacaagctggacaccagcaccatgacctggaccctcatctgcaccaagggcagccctgcccgctggagggacttccacagcgccaccatgctgggcagccacatgtatgtgtttggaggccgggctgaccgcttcggccccttccacagcaacaatgagatctactgcaaccgcatccgggtgtttgacaccaggacagaggcctggctggactgcccccccacccctgtgctgcctgagggcagaagaagccacagcgccttcggctacaacggggagctgtacatctttggaggctacaatgcccggctgaacagacacttccatgacctgtggaagttcaaccctgtgtccttcacctggaagaagattgagcccaagggcaagggcccctgcccccggcggcggcagtgctgctgcatcgtgggggacaagatcgtgctgtttggaggcaccagccccagccctgaggagggcctgggagatgaatttgacctgattgaccacagcgacctgcacatcctggacttcagccccagcctgaagaccctgtgcaagctggccgtcatccagtacaacctggaccagagctgcctgccccatgacatccgctgggagctgaatgccatgaccaccaacagcaacatcagccggcccatcgtgagcagcccctttgcctaccccctgcccagcgcctag

SEQ ID NO: 20398 - DNA, 549 bp, synthetic construct
  source 1..549: mol_type = other DNA; note = Synthetic coding sequence
atgcccatccccccacctcctcctcctcctcctggccccccacctccacccaccttccaccaggccaacacagagcagcccaagctgagcagagatgagcagaggggccgcggggccctgctgcaggacatctgcaagggcaccaagctgaagaaggtgaccaacatcaatgacagaagtgcccccatcctggagaccccacctcctcctcctcctgtgatcagaaatggagccagagatgcccctcctcctcctccaccctacaggatgcacggcagcgagccccccagccggggcaagcccccacctccacccagcaggaccccagctggccccccacctcctcctcctccacccctgagaaatggccaccgggacagcatcaccaccgtgcgctccttcctggatgactttgagagcaagtacagcttccaccctgtggaggacttccctgcccctgaggagtacaagcacttccagaggatctaccccagcaagaccaacagagctgcccggggggccccacccctgccccccatcctgaggtag

SEQ ID NO: 20399 - DNA, 831 bp, synthetic construct
  source 1..831: mol_type = other DNA; note = Synthetic coding sequence
atgaccagcttccggctggccctgatccagctgcagatcagcagcatcaagagtgacaacgtgacccgggcctgcagcttcatccgggaggccgccacccagggcgccaagatcgtgtccctgcctgagtgcttcaacagcccctatggagccaagtacttcccagaatatgcagagaagatccctggagagagcacccagaagctgtctgaggtggccaaggaatgttccatctacctgattggaggcagcatccctgaggaggatgctgggaagctgtacaacacctgtgctgtgtttggaccagatggcaccctgctggccaagtacaggaagatccacctgtttgatattgatgtgcctgggaagatcaccttccaggagagcaagaccctgagccctggggacagcttcagcacctttgacaccccctactgccgggtgggcctgggcatctgctatgacatgagatttgctgagctggcccagatctatgcccagaggggctgccagctgctggtgtacccaggggccttcaacctgaccactggacctgcccactgggagctgctgcagaggagcagagctgtggacaaccaggtgtatgtggccacagccagccctgccagagatgacaaggccagctatgtggcctggggccacagcacagtggtgaacccctggggcgaggtgctggccaaggccggcacagaggaggccatcgtgtacagcgacatcgacctgaagaagctggccgagatccggcagcagatccctgtgttccggcagaagagaagtgacctgtatgctgtggagatgaagaagccctag

SEQ ID NO: 20400 - DNA, 1476 bp, synthetic construct; identical to SEQ ID NO: 18372
  source 1..1476: mol_type = other DNA; note = Synthetic coding sequence

SEQ ID NO: 20401 - DNA, 1089 bp, synthetic construct
  source 1..1089: mol_type = other DNA; note = Synthetic coding sequence
atggcccacagcagcttcttcccagatgagtacttcacctgcagcagcctgtgcctgagctgtggggtgggctgcaagaagtccatgaaccacggcaaggagggcgtgccccatgaggccaagagccgctgccgctacagccaccagtatgacaacagagtgtacacctgcaaggcctgctatgagcggggggaggaggtgtctgtggtgcccaagaccagcgccagcacagacagcccctggatgggcctggccaagtatgcctggagcggctacgtgattgaatgtcccaactgtggggtggtgtaccgcagccggcagtactggtttggaaaccaggaccctgtggacacagtggtgaggacagagatcgtgcacgtgtggccaggcacagatggcttcctgaaggacaacaacaatgctgcccagaggctgctggatggcatgaacttcatggcccagagcgtgtctgagctgagcctgggccccaccaaggctgtgacctcctggctgacagaccagatcgccccagcctactggaggcccaacagccagatcctgagctgcaacaagtgtgccaccagcttcaaggacaatgacaccaagcaccactgccgggcctgtggggagggcttctgtgacagctgcagcagcaagaccaggcctgtgcctgagcggggctggggccctgcccctgtgcgggtgtgtgacaactgctatgaggccagaaatgtgcagctggccgtgacagaggcccaggtggatgatgagggcggcaccctcatcgccaggaaggtgggggaggccgtgcagaacaccctgggcgctgtggtgacagccatcgacatccccctgggcctggtgaaggatgctgcccggcctgcctactgggtgcctgaccacgagatcctgcactgccacaactgcaggaaggagttcagcatcaagctgagcaagcaccactgccgggcctgtggccagggcttctgtgatgagtgcagccatgacagaagagctgtgcccagccggggctgggaccaccctgtgcgggtgtgcttcaactgcaacaagaagccaggggacctgtag

SEQ ID NO: 20402 - DNA, 348 bp, synthetic construct
  source 1..348: mol_type = other DNA; note = Synthetic coding sequence
atgtctggagagcccggccagacctctgtggcccctcctcctgaggaggtggagcccggcagcggcgtgagaattgtggtggagtactgtgagccctgtggctttgaggccacctacctggagctggccagcgctgtgaaggagcagtacccaggcattgaaattgagagccggctgggcggcaccggggcctttgaaattgagatcaatggccagctggtgttcagcaagctggagaatggaggcttcccctatgagaaggacctgattgaggccatccggcgggccagcaatggagagaccctggagaagatcaccaacagccggcccccctgcgtcatcctgtag

SEQ ID NO: 20403 - DNA, 507 bp, synthetic construct
  source 1..507: mol_type = other DNA; note = Synthetic coding sequence
atgctgttccggctgtctgagcacagcagccctgaggaggaggccagcccccaccagagggccagcggggagggccaccacctgaagagcaagaggcccaacccctgtgcctacaccccacccagcctgaaggctgtgcagagaattgctgagagccacctgcagagcatcagcaacctgaatgaaaaccaggccagcgaggaggaggatgagctgggggagctgcgggagctgggctacccccgggaggaggatgaggaggaggaggaggatgatgaggaggaggaggaggaggaggacagccaggccgaggtgctgaaggtgatccggcagagcgctggccagaagaccacctgtggccagggcctggagggcccctgggagcggcccccacccctggatgagagcgagagagatggcggcagcgaggaccaggtggaggaccctgccctgtctgagcccggggaggagccccagaggcccagccccagcgagcccggcacctag

SEQ ID NO: 20404 - DNA, 507 bp, synthetic construct; identical to SEQ ID NO: 20403
  source 1..507: mol_type = other DNA; note = Synthetic coding sequence

SEQ ID NO: 20405 - DNA, 648 bp, synthetic construct
  source 1..648: mol_type = other DNA; note = Synthetic coding sequence
atggaccccaaggacaggaagaagatccagttctctgtgcctgccccacccagccagctggacccccggcaggtggagatgatcagaagaagaagacccaccccagccatgctgttccggctgtctgagcacagcagccctgaggaggaggccagcccccaccaggtgacccccctgacctggcacttcccctggcagagggccagcggggagggccaccacctgaagagcaagaggcccaacccctgtgcctacaccccacccagcctgaaggctgtgcagagaattgctgagagccacctgcagagcatcagcaacctgaatgaaaaccaggccagcgaggaggaggatgagctgggggagctgcgggagctgggctacccccgggaggaggatgaggaggaggaggaggatgatgaggaggaggaggaggaggaggacagccaggccgaggtgctgaaggtgatccggcagagcgctggccagaagaccacctgtggccagggcctggagggcccctgggagcggcccccacccctggatgaaagtgaaagagatggcggcagcgaggaccaggtggaggaccctgccctgtctgagcctggagaggagccccagaggcccagccccagcgagcccggcacctag

SEQ ID NO: 20406 - DNA, 5169 bp, synthetic construct
  source 1..5169: mol_type = other DNA; note = Synthetic coding sequence
atggagagcaacttcaaccaggagggcgtgccccggcccagctatgtgttttctgctgaccccatcgcccggcccagcgagatcaactttgatggcatcaagctggacctgagccatgagttcagcctggtggcccccaacacagaggccaacagctttgagagcaaggactacctgcaggtgtgcctgcgcatccggcccttcacccagagcgagaaggagctggagagcgagggctgtgtgcacatcctggacagccagacagtggtgctgaaggagccccagtgcatcctgggccgcctgtctgagaagagcagcggccagatggcccagaagttctccttcagcaaggtgtttggacctgccaccacccagaaggagttcttccagggctgcatcatgcagcctgtgaaggacctgctgaagggccagagccgcctcatcttcacctacggcctgaccaacagcggcaagacctacaccttccagggcacagaagaaaatattggcatcctgcccaggaccctgaatgtgctgtttgacagcctgcaggagcggctgtacaccaagatgaacctgaagccccacaggagccgggagtacctgcggctgagcagcgagcaggagaaggaggagatcgccagcaagagcgccctgctgcggcagatcaaggaggtgacagtgcacaatgacagtgatgacaccctgtatggcagcctgaccaacagcctgaacatcagcgagtttgaggagagcatcaaggactatgagcaggccaacctgaacatggccaacagcatcaagttctctgtgtgggtgtccttctttgagatctacaatgagtacatctatgacctgtttgtgcctgtgagcagcaagttccagaagaggaagatgctgcggctgagccaggatgtgaagggctacagcttcatcaaggacctgcagtggatccaggtgtctgacagcaaggaggcctaccgcctgctgaagctgggcatcaagcaccagagcgtggccttcaccaagctgaacaatgccagcagccgcagccacagcatcttcaccgtgaagatcctgcagattgaagattctgagatgagcagggtcatccgggtgtctgagctgagcctgtgtgacctggccggcagcgagaggaccatgaagacccagaatgaaggagagcggctgcgggagaccggcaacatcaacaccagcctgctgaccctgggcaagtgcatcaacgtgctgaagaacagcgagaagagcaagttccagcagcacgtgcccttccgggagagcaagctgacccactacttccagagcttcttcaacgggaagggcaagatctgcatgattgtgaacatcagccagtgctacctggcctatgatgagaccctgaatgtgctgaagttcagcgccatcgcccagaaggtgtgtgtgcctgacaccctgaacagcagccaggagaagctgtttggacctgtgaagagcagccaggatgtgtccctggacagcaacagcaacagcaagatcctgaatgtgaagagggccaccatctcctgggagaacagcctggaggacctgatggaggatgaggacctggtggaggagctggagaatgctgaggagacccagaatgtggagaccaagctgctggatgaggacctggacaagaccctggaggagaacaaggccttcatcagccatgaggagaagaggaagctgctggacctgattgaggacctgaagaagaagctgatcaatgagaagaaggagaagctgaccctggagttcaagatccgggaggaggtgacccaggagttcacccagtactgggcccagcgggaggccgacttcaaggagaccctgctgcaggagcgggagatcctggaggagaatgctgagcggcggctggccatcttcaaggacctggtgggcaaatgtgacacccgggaggaggccgccaaggacatctgtgccaccaaggtggagacagaggagacccacaactacgtgggctttgaggacatcatcgacagcctgcaggacaacgtggccgacatcaagaagcaggccgagatcgcccacctgtacatcgccagcctgcctgacccccaggaggccacagcctgcctggagctgaagttcaaccagatcaaggccgagctggccaagaccaagggggagctgatcaagaccaaggaggagctgaagaagcgggagaatgaaagtgacagcctcatccaggagctggagaccagcaacaagaagatcatcacccagaaccagaggatcaaggagctgatcaacatcatcgaccagaaggaggacaccatcaatgagttccagaacctgaagagccacatggagaacaccttcaagtgcaatgacaaggctgacaccagcagcctcatcatcaacaacaagctgatctgcaatgagaccgtggaggtgcccaaggacagcaagagcaagatctgcagcgagaggaagagggtgaatgaaaatgagctgcagcaggatgagcccccagccaagaagggcagcatccacgtgtcctctgccatcacagaggaccagaagaagtctgaggaggtgcggcccaacattgctgagattgaggacatccgggtgctgcaggagaacaatgaaggcctgcgggccttcctgctgaccattgaaaatgagctgaagaatgagaaggaggagaaggccgagctgaacaagcagatcgtgcacttccagcaggagctgagcctgtctgagaagaagaacctgaccctgagcaaggaggtgcagcagatccagagcaactatgacatcgccatcgccgagctgcacgtgcagaagagcaagaaccaggagcaggaggagaagatcatgaagctgagcaatgaaattgaaacagccaccaggagcatcaccaacaacgtgtcccagatcaagctgatgcacaccaagattgatgagctgcggaccctggacagcgtgtcccagatcagcaacatcgacctgctgaacctgcgggacctgagcaatggcagcgaggaggacaacctgcccaacacccagctggacctgctgggcaatgactacctggtgtccaagcaggtgaaggagtaccgcatccaggagcccaaccgggagaacagcttccacagcagcattgaggccatctgggaggagtgcaaggagatcgtgaaggccagcagcaagaagagccaccagatcgaggagctggagcagcagatcgagaagctgcaggccgaggtgaagggctacaaggatgagaacaaccggctgaaggagaaggagcacaagaaccaggatgacctgctgaaggagaaggagaccctcatccagcagctgaaggaggagctgcaggagaagaatgtgaccctggatgtgcagatccagcacgtggtggagggcaagagggccctgtctgagctgacccagggcgtgacctgctacaaggccaagatcaaggagctggagaccatcctggagacccagaaggtggagtgcagccacagcgccaagctggagcaggacatcctggagaaggagagcatcatcctgaagctggagaggaacctgaaggagttccaggagcacctgcaggacagcgtgaagaacaccaaggacctgaatgtgaaggagctgaagctgaaggaggagatcacccagctgaccaacaacctgcaggacatgaagcacctgctgcagctgaaggaggaggaggaggagaccaaccggcaggagacagagaagctgaaggaggagctgagcgccagcagcgcccggacccagaacctgaaggctgacctgcagaggaaggaggaggactatgctgacctgaaggagaagctgacagatgccaagaagcagatcaagcaggtgcagaaggaggtgtctgtgatgagagatgaggacaagctgctgcgcatcaagatcaatgagctggagaagaagaagaaccagtgcagccaggagctggacatgaagcagaggaccatccagcagctgaaggagcagctgaacaaccagaaggtggaggaggccatccagcagtatgaaagagcctgcaaggacctgaatgtgaaggagaagatcatcgaggacatgaggatgaccctggaggagcaggagcagacccaggtggagcaggaccaggtgctggaggccaagctggaggaggtggagcggctggccacagagctggagaagtggaaggagaagtgcaatgacctggagaccaagaacaaccagaggagcaacaaggagcacgagaacaacacagatgtgctgggcaagctgaccaacctgcaggatgagctgcaggagagcgagcagaagtacaatgctgacaggaagaagtggctggaggagaagatgatgctgatcacccaggccaaggaggccgagaacatccggaacaaggagatgaagaagtatgcagaagatcgggagcgcttcttcaagcagcagaatgagatggagatcctgacagcccagctgacagagaaggacagcgacctgcagaagtggagggaggagcgggaccagctggtggccgccctggagatccagctgaaggccctgatcagcagcaatgtgcagaaggacaatgaaattgagcagctgaagaggatcatcagcgagaccagcaagattgagacccagatcatggacatcaagcccaagaggatcagcagcgctgaccctgacaagctgcagacagagcccctgagcaccagctttgagatcagcaggaacaagattgaagatggctctgtggtgctggacagctgtgaggtgtccacagaaaatgaccagagcacccgcttccccaagccagagctggagatccagttcacccccctgcagcccaacaagatggctgtgaagcaccctggctgcaccacccctgtgacagtgaagatccccaaggccaggaagaggaagagcaatgagatggaggagagcgccagccccccacccaaggaatgtagcagcagccctgccatggagcagagctggaaggaaaatgactttgacaagctgcgggaggagggcttccgccgcagcaactacagcgagctgcaggaggagatccagaccaagggcaaggaggtggagaactttgagaagaacctggactag

SEQ ID NO: 20407 - DNA, 1215 bp, synthetic construct
  source 1..1215: mol_type = other DNA; note = Synthetic coding sequence
atgagaagagatgtgaatggagtgaccaagagcagatttgagatgttcagcaacagtgatgaggccgtcatcaacaagaagctgcccaaggagctgctgctgcgcatcttctccttcctggatgtggtgaccctgtgccgctgtgcccaggtgtcccgggcctggaatgtgctggccctggatggcagcaactggcagagaattgacctgtttgacttccagagggacatcgagggccgggtggtggagaacatcagcaagagatgtggcggcttcctgaggaagctgagcctgcggggctgcctgggcgtgggggacaatgccctgcggacctttgcccagaactgcagaaatattgaggtgctgaacctgaatggctgcaccaagaccacagatgctgagggctgccccctgctggagcagctgaacatctcctggtgtgaccaggtgaccaaggatggcatccaggccctggtgcggggctgcggcggcctgaaggccctcttcctgaagggctgcacccagctggaggatgaggccctgaagtacatcggggcccactgcccagagctggtgaccctgaacctgcagacctgcctgcagatcacagatgagggcctcatcaccatctgccggggctgccacaagctgcagagcctgtgtgccagcggctgcagcaacatcacagatgccatcctgaatgccctgggccagaactgcccccggctgcgcatcctggaggtggcccgctgcagccagctgacagatgtgggcttcaccaccctggccaggaactgccacgagctggagaagatggacctggaggagtgtgtgcagatcacagacagcaccctcatccagctgagcatccactgcccccggctgcaggtgctgagcctgagccactgtgagctgatcacagatgatggcatccgccacctgggcaatggagcctgtgcccatgaccagctggaggtgattgagctggacaactgccccctcatcacagatgccagcctggagcacctgaagagctgccacagcctggagcgcatcgagctgtatgactgccagcagatcaccagggctggcatcaagaggctgcggacccacctgcccaacatcaaggtgcacgcctactttgcccctgtgaccccacctccttctgtgggcggcagccggcagcgcttctgccgctgctgcatcatcctgtag

SEQ ID NO: 20408 - DNA, 1251 bp, synthetic construct
  source 1..1251: mol_type = other DNA; note = Synthetic coding sequence
atggcccacagccctgtggccgtgcaggtgcccggcatgcagaacaacattgctgaccctgaggagctgttcaccaagctggagcgcatcggcaagggcagctttggagaggtgttcaagggcatcgacaacagaacccagcaggtggtggccatcaagatcatcgacctggaggaggctgaagatgaaattgaggacatccagcaggagatcaccgtgctgagccagtgtgacagcagctatgtgaccaagtactacggcagctacctgaagggcagcaagctgtggatcatcatggagtacctgggcggcggcagcgccctggacctgctgcgggccggcccctttgatgagttccagatcgccaccatgctgaaggagatcctgaagggcctggactacctgcacagcgagaagaagatccaccgggacatcaaggccgccaacgtgctgctgtctgagcagggagatgtgaagctggccgactttggagtggccggccagctgacagacacccagatcaagaggaacacctttgtgggcacccccttctggatggcccctgaggtgatccagcagagcgcctatgacagcaaggctgacatctggagcctgggcatcacagccatcgagctggccaagggggagccccccaacagcgacatgcaccccatgagggtgctcttcctgatccccaagaacaacccccccaccctggtgggggacttcaccaagagcttcaaggagttcattgatgcctgcctgaacaaggaccccagcttccggcccacagccaaggagctgctgaagcacaagttcatcgtgaagaacagcaagaagaccagctacctgacagagctgattgaccgcttcaagcgctggaaggccgagggccacagtgatgatgaaagtgacagcgagggcagtgacagcgagagcaccagccgggagaacaacacccaccctgagtggagcttcaccaccgtgaggaagaagccagaccccaagaaggtgcagaatggagctgagcaggacctggtgcagaccctgagctgcctgtccatgatcatcaccccagcctttgctgagctgaagcagcaggatgaaaataatgccagcaggaaccaggccatcgaggagctggagaagagcattgctgtggccgaggccgcctgccccggcatcacagacaagatggtgaagaagctgattgagaagttccagaagtgcagcgcagatgagagcccctag

SEQ ID NO: 20409 - DNA, 1020 bp, synthetic construct
  source 1..1020: mol_type = other DNA; note = Synthetic coding sequence
atggcccacagccctgtggccgtgcaggtgcccggcatgcagggcagcaagctgtggatcatcatggagtacctgggcggcggcagcgccctggacctgctgcgggccggcccctttgatgagttccagatcgccaccatgctgaaggagatcctgaagggcctggactacctgcacagcgagaagaagatccaccgggacatcaaggccgccaacgtgctgctgtctgagcagggagatgtgaagctggccgactttggagtggccggccagctgacagacacccagatcaagaggaacacctttgtgggcacccccttctggatggcccctgaggtgatccagcagagcgcctatgacagcaaggctgacatctggagcctgggcatcacagccatcgagctggccaagggggagccccccaacagcgacatgcaccccatgagggtgctcttcctgatccccaagaacaacccccccaccctggtgggggacttcaccaagagcttcaaggagttcattgatgcctgcctgaacaaggaccccagcttccggcccacagccaaggagctgctgaagcacaagttcatcgtgaagaacagcaagaagaccagctacctgacagagctgattgaccgcttcaagcgctggaaggccgagggccacagtgatgatgaaagtgacagcgagggcagtgacagcgagagcaccagccgggagaacaacacccaccctgagtggagcttcaccaccgtgaggaagaagccagaccccaagaaggtgcagaatggagctgagcaggacctggtgcagaccctgagctgcctgtccatgatcatcaccccagcctttgctgagctgaagcagcaggatgagaacaatgccagcaggaaccaggccatcgaggagctggagaagagcattgctgtggccgaggccgcctgccccggcatcacagacaagatggtgaagaagctgattgagaagttccagaagtgcagcgcagatgagagcccctag

SEQ ID NO: 20410 - DNA, 2625 bp, synthetic construct; identical to SEQ ID NO: 19569
  source 1..2625: mol_type = other DNA; note = Synthetic coding sequence

SEQ ID NO: 20411 - DNA, 1449 bp, synthetic construct
  source 1..1449: mol_type = other DNA; note = Synthetic coding sequence
atggagcagagcaacctggagaagctggagctgaatgtgaggaagctgcagcaggagctggaccagctgaacagagacaagctgagcctgcacaatgacatcagcgccatgcagcagcagctgcaggagaagcgggaggccgtgaacagcctgcaggaggagctggccaacgtgcaggaccacctgaacctggccaagcaggacctgctgcacaccaccaagcaccaggatgtgctgctgtctgagcagacccggctgcagaaggacatcagcgagtgggccaacagatttgaggactgccagaaggaggaggagaccaagcagcagcagctgcaggtgctgcagaatgaaattgaggagaacaagctgaagctggtgcagcaggagatgatgttccagaggctgcagaaggagcgggagagcgagaagagcaagctggaccaggtgctgagcaaggtgctggccgctgaggagcgggtgaggaccctgcaggaggaggagcgctggtgtgagagcctggagaagaccctgagccagaccaagaggcagctgtctgagcgggagcagcagctggtggagaagtctggagagctgctggccctgcagaaggaggccgacagcatgagagctgacttcagcctgctgaggaaccagttcctgacagagaggaagaaggccgagaagcaggtggccagcctgaaggaggccctgaagatccagaggagccagctggagaagaacctgctggagcagaagcaggagaacagctgcatccagaaggagatggccaccatcgagctggtggcccaggacaaccacgagcgggcccggcggctgatgaaggagctgaaccagatgcagtatgagtacacagagctgaagaagcagatggccaaccagaaggacctggagcggcggcagatggagatcagtgatgccatgaggaccctgaagtctgaggtgaaggatgagatccgcaccagcctgaagaacctgaaccagttcctgcctgagctgcctgctgacctggaggccatcctggagagaaatgaaaacctggagggggagctggagagcctgaaggagaacctgcccttcaccatgaatgaaggcccctttgaggagaagctgaacttcagccaggtgcacatcatggatgagcactggagaggagaggccctgcgggagaagctgcggcaccgggaggaccggctgaaggcccagctgcggcactgcatgagcaagcaggccgaggtgctgatcaagggcaagaggcagacagagggcaccctgcacagcctgcggcggcaggtggatgccctgggggagctggtgaccagcaccagcgctgacagcgccagcagccccagcctgagccagctggagagcagcctgacagaggacagccagctgggccagaaccaggagaagaatgccagcgccaggtag

SEQ ID NO: 20412 - DNA, 3780 bp, synthetic construct
  source 1..3780: mol_type = other DNA; note = Synthetic coding sequence
atggccctgcggcctggagctggcagcggcggcggcggcgctgctggagctggagctggcagcgctgggggcggcggcttcatgtttcctgtggccggcggcatccggcccccccaggccggcctgatgcccatgcagcagcagggcttccccatggtgtctgtgatgcagcccaacatgcagggcatcatgggcatgaactacagcagccagatgagccagggccccatcgccatgcaggccggcatccccatgggccccatgcctgctgctggcatgccctacctgggccaggcccccttcctgggcatgaggcctcctggcccccagtacaccccagacatgcagaagcagtttgctgaggagcagcagaagagatttgagcagcagcagaagctgctggaggaggagaggaagaggcggcagtttgaggagcagaagcagaagctgcggctgctgagctctgtgaagcccaagacaggagagaagagcagagatgatgccctggaggccatcaagggcaacctggatggcttcagcagagatgccaagatgcaccccaccccagccagccaccccaagaagccaggagtgggcgtcttccccagccaggaccctgcccagcccaggatgccaccctggatctacaatgaaagcctggtgcctgatgcctacaagaagatcctggagaccaccatgacccccaccggcatcgacacagccaagctgtaccccatcctgatgagcagcggcctgccccgggagaccctgggccagatctgggccctggccaacagaaccaccccaggcaagctgaccaaggaggagctgtacacagtgctggccatgattgctgtgacccagaggggcgtgcctgccatgagcccagatgccctgaaccagtttcctgctgcccccatccccaccctgagcggcttctccatgaccctgcccacccctgtgtcccagcccaccgtcatccccagcggccctgctggctccatgcccctgagcctgggccagcctgtgatgggcatcaacctggtgggccctgtgggcggggccgccgcccaggccagcagcggcttcatccccacctacccagccaaccaggtggtgaagccagaagaagatgacttccaggacttccaggatgccagcaagagcggcagcctggatgacagcttcagtgacttccaggagctgcctgccagcagcaagaccagcaacagccagcacggcaacagcgcccccagcctgctgatgcccctgcccggcaccaaggccctgcccagcatggacaagtatgctgtgttcaagggcattgctgctgacaagagcagtgaaaatacagtgcccccaggggaccccggggacaagtacagcgccttccgggagctggagcagacagctgagaacaagcccctgggggagagctttgctgagttccgctctgctggaacagatgatggcttcacagacttcaagacagctgacagcgtgagccccctggagccccccaccaaggacaagaccttcccccccagcttccccagcggcaccatccagcagaagcagcagacccaggtgaagaaccccctgaacctggccgacctggacatgttcagctctgtgaactgcagcagcgagaagcccctgtccttctctgctgtgttcagcaccagcaagtctgtgtccaccccccagagcactggatctgctgccaccatgacagccctggccgccaccaagaccagcagcctggctgatgactttggagagttcagcctgtttggagagtacagcggcctggcccctgtgggggagcaggatgactttgctgacttcatggccttcagcaacagcagcatcagcagcgagcagaagccagatgacaagtatgatgccctgaaggaggaggccagccctgtgcccctgaccagcaatgtgggcagcacagtgaagggcggccagaacagcacagctgccagcaccaagtatgatgtgttccggcagctgagcctggagggcagcggcctgggcgtggaggacctgaaggacaacaccccatctgggaagagtgatgatgactttgctgacttccacagcagcaagttcagcagcatcaacagcgacaagagcctgggggagaaggctgtggccttccgccacaccaaggaggacagcgcctctgtgaagagcctggacctgcccagcatcggcggcagctctgtgggcaaggaggacagtgaagatgccctgtctgtgcagtttgacatgaagctggctgatgtgggcggggacctgaagcacgtgatgtctgacagcagcctggacctgcccaccgtgtctggccagcaccccccagctgctgacatcgaggacctgaagtatgctgccttcggcagctacagcagcaactttgctgtgtccaccctgaccagctatgactggagcgacagagatgatgccacccagggcaggaagctgagcccctttgtgctgtctgctggcagcggcagccccagcgccaccagcatcctgcagaagaaggagaccagctttggcagcagcgagaacatcaccatgaccagcctgagcaaggtgaccacctttgtgtctgaagatgccctgcctgagaccaccttccctgccctggccagcttcaaggacaccatcccccagaccagcgagcagaaggagtatgaaaatagagactacaaggacttcaccaagcaggacctgcccacagctgagaggagccaggaggccacctgccccagccctgccagcagcggggccagccaggagaccccaaatgaatgttctgatgactttggagagttccagagcgagaagcccaagatcagcaagtttgacttcctggtggccaccagccagagcaagatgaagagcagcgaggagatgatcaagtctgagctggccacctttgacctgtctgtgcagggcagccacaagaggagcctgagcctgggggacaaggagatcagccgcagcagccccagccctgccctggagcagcccttccgggacaggagcaacaccctgaatgagaagccagccctgcccgtcatccgggacaagtacaaggacctgaccggggaggtggaggagaatgaaagatatgcctatgagtggcagcgctgcctgggcagcgccctgaatgtcatcaagaaggccaatgacaccctgaatggcatcagcagcagctctgtgtgcacagaggtgatccagagcgcccagggcatggagtacctgctgggcgtggtggaggtgtacagagtgaccaagagggtggagctgggcatcaaggccacagctgtgtgcagcgagaagctgcagcagctgctgaaggacatcgacaaggtgtggaacaacctgattggcttcatgagcctggccaccctgacctgctgctgggagaagatgaccgtcatcaccaagcacctgagcccctaccacgagctgctggaggagaagccagatgagaacagcctggacttcagcagctgcatgctgcggcccggcatcaagaatgcccaggagctggcctgtggggtgtgcctgctgaatgtggacagccgcagcaggaaggaggagaagccagctgaggagcaccccaagaaggccttcaacagcgagacagacagcttcaagctggcctatggaggccaccagtaccacgccagctgtgccaacttctggatcaactgtgtggagcccaagcccccaggcctggtgctgcctgacctgctgtag

SEQ ID NO: 20413 - DNA, 1158 bp, synthetic construct
  source 1..1158: mol_type = other DNA; note = Synthetic coding sequence
atggccctgcggcctggagctggcagcggcggcggcggcgctgctggagctggagctggcagcgctgggggcggcggcttcatgtttcctgtggccggcggcatccggcccccccaggccggcctgatgcccatgcagcagcagggcttccccatggtgtctgtgatgcagcccaacatgcagggcatcatgggcatgaactacagcagccagatgagccagggccccatcgccatgcaggccggcatccccatgggccccatgcctgctgctggcatgccctacctgggccaggcccccttcctgggcatgaggcctcctggcccccagtacaccccagacatgcagaagcagtttgctgaggagcagcagaagagatttgagcagcagcagaagctgctggaggaggagaggaagaggcggcagtttgaggagcagaagcagaagctgcggctgctgagctctgtgaagcccaagacaggagagaagagcagagatgatgccctggaggccatcaagggcaacctggatggcttcagcagagatgccaagatgcaccccaccccagccagccaccccaagaagccagactgccccaccagcagccacagcaccaagacagtgagccccagccctgccttcctggatgaggaggagttcagtgacttcatgcagggccctgtggaggtgcccccctgtggccccagcagcaccagccagcccttccagagcttccaccccagcacccccctgggccagctgcacacccagaaggccggcacccagcccctgccccccagccagagccctgtgccctttgccctgcacggcgtgcccggccagatcccctacttcagcacagccagcgccagccacagcgtgcctgaggccggccccagcctggaggagaagttcctggtgtcctgtgacatcagcaccagcggccaggagcagatcaagctgaacaccagcgaggtgggccacaaggccctgggccctggcagcagcaagaagtaccccagcctgatggccagcaatggagtggccgtggatggctgtgtgtgggagtacttcccccaccgcatcctgctgagcccagaatgtctgctgggcttcaccatgagggtgtggttccagatgcccatcaggaagagctag

SEQ ID NO: 20414 - DNA, 939 bp, synthetic construct
  source 1..939: mol_type = other DNA; note = Synthetic coding sequence
atggctgactttggcatctctgctggccagtttgtggccgtggtgtgggacaagagcagccctgtggaggccctgaagggcctggtggacaagctgcaggccctgactggaaatgaaggccgggtgtctgtggagaacatcaagcagctgctgcagagcgcccacaaggagagcagctttgacatcatcctgagcggcctggtgcccggcagcaccaccctgcacagcgctgagatcctggccgagatcgcccgcatcctgcggcctgggggctgcctcttcctgaaggagcctgtggagacagctgtggacaacaacagcaaggtgaagacagccagcaagctgtgcagcgccctgaccctgagcggcctggtggaggtgaaggagctgcagcgggagcccctgaccccagaggaggtgcagagcgtgcgggagcacctgggccatgaaagtgacaacctgctgtttgtgcagatcaccgggaagaagcccaactttgaggtgggcagcagccggcagctgaagctgagcatcaccaagaagagcagccccagcgtgaagccagctgtggaccctgctgctgccaagctgtggaccctgagcgccaatgacatggaggatgacagcatggacctgattgacagtgatgagctgctggaccctgaggacctgaagaagccagaccctgccagcctgcgggccgccagctgtggggagggcaagaagaggaaggcctgcaagaactgcacctgtggcctggccgaggagctggagaaggagaagagccgggagcagatgagcagccagcccaagagcgcctgtggcaactgctacctgggagatgccttccgctgtgccagctgcccctacctgggcatgcctgccttcaagccaggagagaaggtgctgctgagtgacagcaacctgcatgatgcctag

SEQ ID NO: 20415 - DNA, 1056 bp, synthetic construct
  source 1..1056: mol_type = other DNA; note = Synthetic coding sequence
atgaatgaaagcaatgacagcaccaactatgacatggccccctactatgaggccctgtgcaagagcctggactggcagattgatgtggacctgctgaacaagatgaagaaggccaatgaagatgagctgaagaggctggatgaggagctggaggatgctgagaagaacctgggggagagcgagatcagagatgccatgatggccaaggccgagtacctgtgccgcatcggggacaaggagggcgccctgacagccttcaggaagacctatgacaagacagtggccctgggccaccggctggacatcgtgttctacctgctgagaattggcctcttctacatggacaatgacctgatcaccaggaacacagagaaggccaagagcctcatcgaggagggcggggactgggacagaagaaaccggctgaaggtgtaccagggcctgtactgtgtggccatccgggacttcaagcaggccgctgagctgttcctggacacagtgtccaccttcaccagctatgagctgatggactacaagacctttgtgacctacacagtgtatgtgtccatgattgccctggagaggccagacctgcgggagaaggtgatcaagggagctgagatcctggaggtgctgcacagcctgcctgctgtgcggcagtacctgttcagcctgtatgaatgtcgctacagcgtcttcttccagagcctggccgtggtggagcaggagatgaagaaggactggctgtttgccccccactaccgctactacgtgcgggagatgaggatccacgcctacagccagctgctggagagctaccgcagcctgaccctgggctacatggccgaggcctttggagtgggcgtggagttcatcgaccaggagctgagccgcttcatcgccgccggccgcctgcactgcaagattgacaaggtgaatgaaattgtggagaccaacagaccagacagcaagaactggcagtaccaggagaccatcaagaagggggacctgctgctgaacagagtgcagaagctgagcagggtcatcaacatgtag

SEQ ID NO: 20416 - DNA, 414 bp, synthetic construct; identical to SEQ ID NO: 19462
  source 1..414: mol_type = other DNA; note = Synthetic coding sequence

SEQ ID NO: 20417 - DNA, 2796 bp, synthetic construct; identical to SEQ ID NO: 18546
  source 1..2796: mol_type = other DNA; note = Synthetic coding sequence

SEQ ID NO: 20418 - DNA, 318 bp, synthetic construct; identical to SEQ ID NO: 19356
  source 1..318: mol_type = other DNA; note = Synthetic coding sequence

SEQ ID NO: 20419 - DNA, 663 bp, synthetic construct
  source 1..663: mol_type = other DNA; note = Synthetic coding sequence
atgaacagcatggacagacacatccagcagaccaatgaccggctgcagtgcatcaagcagcacctgcagaacccagccaacttccacaatgctgccacagagctgctggactggtgtggggacccccgggccttccagaggccctttgagcagagcctgatgggctgcctgactgtggtgtcccgggtggccgcccagcagggctttgacctggacctgggctaccgcctgctggccgtgtgtgccgccaacagagacaagttcacccccaagtctgctgccctgctgagctcctggtgtgaggagctgggccgcctgctgctgctgcggcaccagaagagccggcagagcgaccccccaggcaagctgcccatgcagccccccctgagctccatgagctccatgaagcccaccctgagccacagtgatggcagcttcccctatgacagcgtgccctggctgcctgcctacccagcctgcaccccaccacccagccagagccaccccaacagctgcagcctgaagcagaagcagcccctggccttccccccacccctgtgcagcatctggctgaccaccctgcagggcctgctgggcagcctgagctgtgtgcactttgtgtctggctggagcgtgccccgggagccccacggcctgggctag

SEQ ID NO: 20420 - DNA, 354 bp, synthetic construct
  source 1..354: mol_type = other DNA; note = Synthetic coding sequence
atggtgcagaggctgacctacagaagaaggctgagctacaacacagccagcaacaagacccggctgagcaggaccccaggcaaccgcatcgtgtacctgtacaccaagaaggtgggcaaggcccccaagagcgcctgtggggtgtgccccggccgcctgcggggcgtgcgggctgtgcggcccaaggtgctgatgaggctgagcaagaccaagaagcacgtgtcccgggcctacggcggctccatgtgtgccaagtgtgtgcgggaccgcatcaagagggccttcctgattgaggagcagaagatcgtggtgaaggtgctgaaggcccaggcccagagccagaaggccaagtag

SEQ ID NO: 20421 - DNA, 354 bp, synthetic construct; identical to SEQ ID NO: 20420
  source 1..354: mol_type = other DNA; note = Synthetic coding sequence

SEQ ID NO: 20422 - DNA, 354 bp, synthetic construct; identical to SEQ ID NO: 20420
  source 1..354: mol_type = other DNA; note = Synthetic coding sequence

SEQ ID NO: 20423 - DNA, 1902 bp, synthetic construct; identical to SEQ ID NO: 19558
  source 1..1902: mol_type = other DNA; note = Synthetic coding sequence

SEQ ID NO: 20424 - DNA, 1641 bp, synthetic construct
  source 1..1641: mol_type = other DNA; note = Synthetic coding sequence
atgaaggccatcaagaagagcctgacagaggaggagtacctgtacctggacttcagccaccagacagagggctgcatcttccccctgcacacctctgtgaccctcttcctgctgagctactgtgactgcaagatcttcaagatctgcctggtggtgaccaaggaggtgtcccagtggacccggctgtgtgagctgaccatccccctggccatcgagaacttcctgcgggagagcagtgaccagccccccaccatccctgtggagatcctgcagctggagaagaagctgtctgagcctgtgcgggtgcacaatgatgacaagctgcggcggcagaagctgaagcagcagaaggcagatggagtgggcccccccctgaccaagggcaaggccaagagcaaggtgcacacccaggagaccagcgagggcctggacagcagcagcaagagcctggagctgaaggtggccttcagcaagctgactgtgcaggaggagcccgccaccaccaaccgggagcccagccacatcaggaaggccaaggccagtgacctgccccccctggagcacgtgtttgctgagggcctgtacttcaccctggccgacatcgtgctgctgccctgcatccaccacttcctggtgatcatcagcaggaagttcagcgagaagctggtggagttccccctgctggcctcctggtaccagaggatccaggaggtgcctggggtgaagacagctgccagcaaatgtggcatccagttcctgcacctgcccaagctgctgaccaccagcacagagcagcaccccaacctgtgtgaggtgcctggggtggaggagcagagcgaccccctcttcatcggcggcccccggcccaccatggccaagctgatggagaagggcatcgaggtgatgttcagcccccacccctgccccacctggaccctggactggaatgtgctgcctgctgctgtgagccccaaggagggcaagatgagcagtgaccgggccctgaggaagcagcagcagctgaacaacctggtgtatgtggtgaccaaccaggccaagccaggggaccgcatcgtggacttctgcagcggcggcggccacgtgggcatcgtgctggcccacatgctgcccagctgccaggtgaccctgattgagaacaaggagctgagcctcatccgggccaagaagagaagtgatgagctgggcctgagcaacatctggttcatccaggccaacatggagtacttcaccggcatgttcaacatcggcgtggccctgcacgcctgtggggtggccacagacatggtgattgagcactgcatcaagacccgggccagctttgtgacctgcccctgctgctacggcttcatccagaacaccagcaagttcaacttccccaagtctgagcagttcaagaagaccctgagctacaaggagcacatgatcctgtgccgctttgctgaccagacagctgtgcagctgcccccccagaggcggctgattggcaagcagtgcatgtgcctggtggacctggaccgggcccgggctgctgaagaatgtggctacagcgtgcaggtgatctccatggagcctgagagctgcagccccaagaacaacatgattgtgggcgtgcccatctag

SEQ ID NO: 20425 - DNA, 1542 bp, synthetic construct
  source 1..1542: mol_type = other DNA; note = Synthetic coding sequence
atgctgctggagaacctgacagacaatgaaagtgagaacaccaacctgaagaagaaggtgtttgagaaggaggcccacatccaggagctgagctgcctcttccagagcgagaaggccaacaccctgaaggccaaccgcttcagccagagcgtgaaggtggtgcatgagcggctgcagatccagatccacaagcgggaggccgagaatgacaagctgaaggagtatgtgaagagcctggagaccaagatcgccaagtggaacctgcagagcaggatgaacaagaatgaggccatcgtgatgaaggaggccagccggcagaagacagtggccctgaagaaggccagcaaggtgtacaagcagaggctggaccacttcaccggggccatcgagaagctgaccagccagatccgggaccaggaggccaagctgtctgagaccatcagcgccagcaatgcctggaagagccactatgagaagatcgtcatcgagaagacagagctggaggtgcagatcgagaccatgaagaagcagatcatcaacctgctggaggacctgaagaagatggaggaccacggcaagaacagctgtgaggagatcctgaggaaggtgcacagcattgaatatgaaaatgagaccctgaacctggagaacaccaagctgaagaccaccctggccgccctgaaggatgaggtggtgtctgtggagaatgagctgtctgagctgcaggaggtggagaagaagcagaagaccctcatcgagatgtacaagacccaggtgcagaagctgcaggaggccgctgagatcgtgaagagccgctgtgagaacctgctgcacaagaacaaccagatcaccaagaccaagaacaagaatgtggagaagatgaggggccagatggagagccacctgaaggagctggagcgggtgtgtgacagcctgacagctgctgagcggcggctgcacgagtgccaggagagcctgcagtgctgcaagggcaaatgtgccgaccaggagcacaccatccgggagctgcagggccaggtggatggcaaccacaacctgctgaccaagctgagcctggaggaggagaactgcctgatccagctgaagtgtgagaacctgcagcagaagctggagcagatggatgctgagaacaaggagctggagaagaagctggccaaccaggaggagtgcctgaagcacagcaacctgaagttcaaggagaagtctgctgagtacacagccctggcccggcagctggaggccgccctggaggagggccggcagaaggtggccgaggagattgagaagatgagcagccgggagagcgccctgcagatcaagatcctggacctggagacagagctgaggaagaagaatgaggagcagaaccagctggtgtgcaagatgaacagcaaggcccagcaccaggaggtgtgcctgaaggaggtgcagaacagcctggagaagtctgagaaccagaatgaaagcatcaagaactacctgcagttcctgaagaccagctatgtgaccatgtttgaatag

SEQ ID NO: 20426 - DNA, 1167 bp, synthetic construct
  source 1..1167: mol_type = other DNA; note = Synthetic coding sequence
atggctgctgctgctgccctggcccggctggagcagaagcagagccgggcctggggccccaccagccaggacaccatccggaaccaggtgaggaaggagctgcaggccgaggccaccgtgtctggcagccctgaggcccctggcaccaacgtggtgtctgagccccgggaggagggcagcgcccacctggccgtgcctggggtgtacttcacctgccccctgactggagccaccctgaggaaggaccagagagatgcctgcatcaaggaggccatcctgctgcacttcagcacagatcctgtggccgccagcatcatgaagatctacaccttcaacaaggaccaggacagagtgaagctgggcgtggacaccatcgccaagtacctggacaacatccacctgcaccctgaggaggagaagtacaggaagatcaagctgcagaacaaggtgttccaggagcgcatcaactgcctggagggcacccatgagttctttgaggccatcggcttccagaaggtgctgctgcctgcccaggaccaggaggaccctgaggagttctacgtgctgtctgagaccaccctggcccagccccagagcctggagcggcacaaggagcagctgctggccgctgagcctgtgcgggccaagctggaccggcagaggagggtcttccagcccagccccctggccagccagtttgagctgcccggggacttcttcaacctgacagctgaggagatcaagcgggagcagaggctgcggtctgaggccgtggagcggctgtctgtgctgcggaccaaggccatgagggagaaggaggagcagaggggcctgaggaagtacaactacaccctgctgcgggtgcggctgcctgatggctgcctgctgcagggcaccttctacgcccgggagcggctgggcgctgtgtatggctttgtgcgggaggccctgcagagcgactggctgccctttgagctgctggccagcggcggccagaagctgtctgaagatgagaacctggccctgaatgaatgtggcctggtgcccagcgccctgctgaccttctcctgggacatggctgtgctggaggacatcaaggccgccggggctgagccagacagcatcctgaagccagagctgctgagcgccatcgagaagctgctgtag

SEQ ID NO: 20427 - DNA, 2691 bp, synthetic construct
  source 1..2691: mol_type = other DNA; note = Synthetic coding sequence
atggatggagctgctggccctggagatggccctgcccgggaggccctgcagagcctgagccagaggctgcgggtgcaggagcaggagatggagctggtgaaggccgccctggccgaggccctgcggctgctgcggctgcaggtgccccccagcagcctgcagggcagcggcaccccagcccctcctggggacagcctggccgcccctcctggcctgccccccacctgcacccccagcctggtgtcccggggcacccagacagaaacagaggtggagctgaagagcagccctggccccccaggcctgagcaatggccccccagccccccagggcgccagcgaggagcccagcggcacccagagcgagggcggcggcagcagcagcagtggagctggcagccctggccccccaggcatcctgcggcccctgcagcccccccagagagctgacaccccaagaagaaacagcagcagcagcagcagccccagcgagcggccccggcagaagctgagcaggaaggccatcagcagcgccaacctgctggtgcgcagcggcagcacagagagcagaggaggcaaggaccccctgagcagccctgggggccctggcagcagaagaagcaactacaacctggagggcatctctgtgaagatgttcctgcggggccggcccatcaccatgtacatccccagcggcatccgcagcctggaggagctgcccagcggccccccacctgagaccctgagcctggactgggtgtatggctaccggggccgggacagccgcagcaacctgtttgtgctgcggagcggggaggtggtgtacttcatcgcctgtgtggtggtgctgtacagacctgggggcggccctgggggccctgggggcggcggccagaggcactaccggggccacacagactgtgtgcgctgcctggccgtgcacccagatggagtgcgggtggccagcggccagacagctggggtggacaaggatggcaagcccctgcagcctgtggtgcacatctgggacagcgagaccctgctgaagctgcaggagatcggcctgggcgcctttgagcggggcgtgggcgccctggccttctctgctgctgaccagggcgccttcctgtgtgtggtggatgacagcaatgagcacatgctgtctgtgtgggactgcagccggggcatgaagctggccgagatcaagagcaccaatgattctgtgctggccgtgggcttcaacccccgggacagcagctgcatcgtgaccagcggcaagagccacgtgcacttctggaactggagcggaggagtgggcgtgcctggaaatggcaccctgaccaggaagcagggcgtgtttgggaagtacaagaagcccaagttcatcccctgctttgtgttcctgcctgatggagacatcctgactggagacagcgagggcaacatcctgacctggggccgcagccccagcgacagcaagaccccaggccggggcggggccaaggagacctacggcatcgtggcccaggcccacgcccacgagggcagcatctttgccctgtgcctgcggagagatggcaccgtgctgagcggcggcggccgggaccggcggctggtgcagtggggccctggcctggtggccctgcaggaggccgagatccctgagcactttggagctgtgcgggccatcgccgagggcctgggcagcgagctgctggtgggcaccaccaagaatgccctgctgcggggggacctggcccagggcttcagccctgtgatccagggccacacagatgagctgtggggcctgtgcacccaccccagccagaaccgcttcctgacctgtggccatgaccggcagctgtgcctgtgggatggagagagccacgccctggcctggagcattgacctgaaggagaccggcctgtgtgccgacttccaccccagcggggctgtggtggccgtgggcctgaacacaggccgctggctggtgctggacacagagacccgggagatcgtgtctgatgtgattgatggaaatgagcagctgtctgtggtgcgctacagcccagatggcctgtacctggccatcggcagccatgacaacgtcatctacatctacagcgtgtccagtgatggagccaagagcagcagatttggccgctgcatgggccacagcagcttcatcacccacctggactggagcaaggatggcaacttcatcatgagcaacagcggggactatgagatcctgtactgggatgtggccggcggctgcaagcagctgaagaacagatatgagagccgggaccgggagtgggccacctacacctgtgtgctgggcttccacgtgtatggagtgtggccagatggcagtgatggaacagacatcaacagcctgtgccgcagccacaatgaaagagtggtggccgtggctgatgacttctgcaaggtgcacctgttccagtacccctgtgcccgggccaaggcccccagcaggatgtatggaggccacggcagccacgtgacctctgtgcgcttcacccatgatgacagccacctggtgtccctgggcggcaaggatgccagcatcttccagtggagggtgctgggcgctgggggcgccggccctgccccagccacccccagcaggacccccagcctgagccctgccagcagcctggatgtgtag

SEQ ID NO: 20428 - DNA, 2934 bp, synthetic construct
  source 1..2934: mol_type = other DNA; note = Synthetic coding sequence
atgggcgctgaggaggaggtgctggtgaccctgagcggcggggccccctggggcttccggctgcacggcggcgctgagcagaggaagcccctgcaggtgtccaagatcagaagaagaagccaggccggccgggccggcctgcgggagcgggaccagctgctggccatcaatggagtgtcctgcaccaacctgagccacgccagcgccatgagcctgattgatgccagcggcaaccagctggtgctgactgtgcagaggctggctgatgagggccctgtgcagagccccagcccccatgagctgcaggtgctgagccccctgagccccctgagccctgagcccccaggggcccctgtgccccagcccctgcagcccggcagcctgcggagccccccagacagcgaggcctactacggggagacagacagtgatgctgatggccctgccacccaggagaagccccggcggcccaggagaagaggccccacccggcccaccccacctggggcccccccagatgaggtgtacctgagtgacagccctgctgagcccgcccccaccatccctggcccccccagccagggcgacagccgggtgagcagccccagctgggaggatggagctgccctgcagcccccacctgctgaggccctgctgctgccccacggccccctgcggcccggcccccacctgatccccatggtgggccctgtgccccaccctgtggccgaggacctgaccaccacctacacccagaaggccaagcaggccaagctgcagagagctgagagcctgcaggagaagagcatcaaggaggccaagaccaagtgcaggaccatcgccagcctgctgacagctgcccccaacccccacagcaaaggagtgctgatgttcaagaagaggcggcagagggccaagaagtacaccctggtgtcctttggagctgctgctggcactggagctgaggaggaggatggagtgccccccaccagcgagagcgagctggatgaggaggccttcagtgatgcccggagcctgaccaaccagagcgactgggacagcccctacctggacatggagctggcccgggccggcagccgggccagcgagggccagggcagcggcctgggcggccagctgtctgaggtgtctggccggggcgtgcagctgtttgagcagcagaggcagagagctgacagcagcacccaggagctggcccgggtggagcctgctgccatgctgaatggagagggcctgcagagccccccccgggcccagagcgcccctcctgaggccgctgtgctgccccccagccccctgcctgcccctgtggccagcccccggcccttccagcccggcggcggggcccccaccccagcccccagcatcttcaacagaagtgcccggcccttcaccccaggcctgcagggccagaggcccaccaccaccagcgtcatcttccggcccctggcccccaagagggccaatgacagcctgggcggcctgagccctgcccccccacccttcctgagcagccagggccccacccccctgcccagcttcaccagcggcgtgcccagccacgcccctgtgtctggcagccccagcacccccaggagcagcggccctgtgacagccaccagcagcctgtacatcccagcccccagcaggcctgtgaccccaggaggagcccctgagcccccagccccacccagcgctgctgccatgaccagcacagccagcatcttcctgagcgcccccctgcggcccagcgcccggcctgaggccccagcccctggccctggggcccctgagccccccagcgcccgggagcagaggatctctgtgcctgctgccaggacaggcatcctgcaggaggccaggagaagaggcaccaggaagcagatgttccggcctgggaaggaggagaccaagaacagccccaaccctgagctgctgagcctggtgcagaacctggatgagaagcccagggctggaggagctgagagcggccctgaggaggatgccctgagcctgggcgctgaggcctgcaacttcatgcagcctgtgggcgcccggagctacaagaccctgccccacgtgacccccaagaccccaccacccatggcccccaagaccccaccacccatgacccccaagaccccacctcctgtggcccccaagccacccagccggggcctgctggatggcctggtgaatggagctgccagcagcgctggcatccctgagcccccccggctgcagggccggggcggggagctgtttgccaagaggcagagcagagctgaccgctacgtggtggagggcaccccaggccctggcctgggcccccggcccaggagccccagccccacccccagcctgccccccagctggaagtacagccccaacatccgggcccccccacccatcgcctacaaccccctgctgagccccttcttcccccaggccgcccggaccctgcccaaggcccagagccagggcccccgggccacccccaagcagggcatcaaggccctggacttcatgaggcaccagccctaccagctgaagacagccatgttctgctttgatgaggtgccccccaccccaggccccatcgccagcggcagccccaagacagcccgggtgcaggagatccgccgcttcagcaccccagccccccagcccacagctgagcccctggcccccaccgtgctggcccccagggctgccaccaccctggatgagcccatctggaggacagagctggccagcgcccctgtgcccagccctgcccctcctcctgaggccccccggggcctgggcgccagccccagcagctgtggcttccaggtggcccggccccgcttcagcgccaccaggacaggcctgcaggcccacgtgtggaggcctggggccggccaccagtag

SEQ ID NO: 20429 - DNA, 2757 bp, synthetic construct
  source 1..2757: mol_type = other DNA; note = Synthetic coding sequence
atgggcaccacagcccctggccccatccacctgctggagctgtgtgaccagaagctgatggagttcctgtgcaacatggacaacaaggacctggtgtggctggaggagatccaggaggaggccgagaggatgttcacccgggagttcagcaaggagcctgagctgatgcccaagacccccagccagaagaacagaaggaagaagaggcgcatctcctatgtgcaggatgaaaatagagaccccatcagaagaaggctgagcaggaggaagagccgcagcagccagctgagcagccggcggctgcggagcaaggacagcgtggagaagctggccaccgtggtgggggagaatggatctgtgctgcggcgggtgaccagggctgctgctgctgctgctgctgccaccatggccctggccgcccccagcagccccaccccagagagccccaccatgctgaccaagaagccagaggacaaccacacccagtgccagctggtgcctgtggtggagatcggcatcagcgagcggcagaatgctgagcagcacgtgacccagctgatgagcacagagcccctgcccaggaccctgagccccaccccagccagcgccacagcccccaccagccagggcatccccaccagtgatgaggagagcacccccaagaagagcaaggcccgcatcctggagagcatcaccgtgagcagcctgatggccaccccccaggaccccaagggccagggcgtgggcaccggccgcagcgccagcaagctgagaattgcccaggtgtccccaggcccccgggacagccctgccttcccagacagcccctggagggagcgggtgctggcccccatcctgcctgacaacttcagcacccccaccggcagcaggacagacagccagagcgtgcgccacagccccatcgcccccagcagccccagcccccaggtgctggcccagaagtacagcctggtggccaagcaggagagcgtggtgagaagagccagccggcggctggccaagaagacagctgaggagcctgctgccagcggccgcatcatctgccacagctacctggagcggctgctgaatgtggaggtgccccagaaggtgggcagcgagcagaaggagcccccagaggaggccgagcctgtggccgctgctgagcctgaggtgcctgagaacaacggcaacaacagctggccccacaatgacacagagatcgccaacagcacccccaaccccaagccagctgccagcagccctgagacccccagcgctggccagcaggaggccaagacagaccaggctgatggcccccgggagcccccccagagcgcccggaggaagaggagctacaagcaggccgtgtctgagctggatgaggagcagcacctggaggatgaggagctgcagcccccaagaagcaagacccccagcagcccctgcccagccagcaaggtggtgcggcccctgcggaccttcctgcacacagtgcagaggaaccagatgctgatgacccccaccagcgcccccaggtctgtgatgaagagcttcatcaagaggaacacccccctgaggatggaccccaagtgcagctttgtggagaaggagcggcagaggctggagaacctgcggaggaaggaggaggccgagcagctgcggcggcagaaggtggaggaggacaagagaagaaggctggaggaggtgaagctgaagcgggaggagcggctgaggaaggtgctgcaggcccgggagcgggtggagcagatgaaggaggagaagaagaagcagatcgagcagaagtttgcccagattgatgagaagacagagaaggccaaggaggagcggctggccgaggagaaggccaagaagaaggccgccgccaagaagatggaggaggtggaggcccggaggaagcaggaggaggaggcccggcggctgcgctggctgcagcaggaggaggaggagcggcggcaccaggagctgctgcagaagaagaaggaggaggagcaggagcggctgaggaaggctgctgaggccaagaggctggccgagcagcgggagcaggagcggcgggagcaggagcggcgggagcaggagcggcgggagcaggagcggcgggagcaggagcggcgggagcaggagcggcagctggccgagcaggagaggagaagagagcaggagcggctgcaggccgagcgggagctgcaggagcgggagaaggccctgcggctgcagaaggagcagctgcagcgggagctggaggagaagaagaagaaggaggagcagcagaggctggccgagcggcagctgcaggaggagcaggagaagaaggccaaggaggccgccggggccagcaaggccctgaatgtgacagtggatgtgcagagccctgcctgcaccagctaccagatgaccccccagggccaccgggccccacccaagatcaacccagacaactacggcatggacctgaacagtgatgacagcacagatgatgaggcccaccccaggaagcccatccccacctgggcccggggcacccccctgagccaggccatcatccaccagtactaccacccccccaacctgctggagctgtttggcaccatcctgcccctggacctggaggacatcttcaagaagagcaagccccgctaccacaagaggaccagcagcgctgtgtggaacagcccccccctgcagggcgcccgggtgcccagcagcctggcctacagcctgaagaagcactag

SEQ ID NO: 20430 - DNA, 1728 bp, synthetic construct
  source 1..1728: mol_type = other DNA; note = Synthetic coding sequence
atgaccagcaagaagctggtgaacagcgtggccggctgtgctgatgatgccctggccggcctggtggcctgcaaccccaacctgcagctgctgcagggccaccgggtggccctgcggagtgacctggacagcctgaagggccgggtggccctgctgagcggcggcggcagcggccacgagcccgcccacgccggcttcatcggcaagggcatgctgactggagtgattgctggagctgtgttcaccagccctgctgtgggcagcatcctggccgccatccgggctgtggcccaggccggcaccgtgggcaccctgctgattgtgaagaactacaccggggaccggctgaactttggcctggcccgggagcaggcccgggcagagggcatccctgtggagatggtggtgattggagatgattctgccttcaccgtgctgaagaaggccggcagaagaggcctgtgtggcaccgtgctgatccacaaggtggccggggccctggccgaggccggcgtgggcctggaggagatcgccaagcaggtgaatgtggtggccaaggccatgggcaccctgggcgtgtccctgagcagctgcagcgtgcccggcagcaagcccacctttgagctgtctgcagatgaggtggagctgggcctgggcatccatggagaggccggcgtgcggcgcatcaagatggccacagcagatgaaattgtgaagctgatgctggaccacatgaccaacaccaccaatgccagccacgtgcctgtgcagcccggcagctctgtggtgatgatggtgaacaacctgggcggcctgtccttcctggagctgggcatcatcgcagatgccaccgtgcgcagcctggagggccggggcgtgaagatcgcccgggccctggtgggcaccttcatgtctgccctggagatgcctggcatcagcctgaccctgctgctggtggatgagcccctgctgaagctgattgatgctgagaccacagctgctgcctggcccaacgtggccgctgtgtccatcactggaaggaagaggagccgggtggccccagctgagccccaggaggccccagacagcacagctgctgggggcagcgccagcaagaggatggccctggtgctggagcgggtgtgcagcaccctgctgggcctggaggagcacctgaatgccctggacagagctgctggagatggagactgtggcaccacccacagcagagctgcccgggccatccaggagtggctgaaggagggccccccaccagccagccctgcccagctgctgagcaagctgtctgtgctgctgctggagaagatgggcggcagcagcggggccctgtatggcctcttcctgacagctgctgcccagcccctgaaggccaagaccagcctgcctgcctggagcgctgccatggatgctggcctggaggccatgcagaagtatggcaaggccgcccctggggacaggaccatgctggacagcctgtgggccgccggccaggagctgcaggcctggaagagccctggagctgacctgctgcaggtgctgaccaaggctgtgaagtctgctgaggccgctgctgaggccaccaagaacatggaggccggggccggccgggccagctacatcagcagcgcccggctggagcagcctgaccctggagctgtggccgctgctgccatcctgcgggccatcctggaggtgctgcagagctag

SEQ ID NO: 20431 - DNA, 1080 bp, synthetic construct
  source 1..1080: mol_type = other DNA; note = Synthetic coding sequence
atggccgccccctgtgccgaggaccccagcctggagcggcacttcaagggccacagagatgctgtgacctgtgtggacttcagcatcaacaccaagcagctggccagcggctccatggacagctgcctgatggtgtggcacatgaagccccagagccgggcctaccgcttcaccggccacaaggatgctgtgacctgtgtgaacttcagccccagcggccacctgctggccagcggcagccgggacaagacagtgcgcatctgggtgcccaacgtgaagggggagagcacagtgttccgggcccacacagccaccgtgcgctctgtgcacttctgcagtgatggccagagctttgtgacagccagtgatgacaagacagtgaaggtgtgggccacccaccggcagaagttcctgttcagcctgagccagcacatcaactgggtgcgctgtgccaagttctccccagatggccgcctcatcgtgtctgccagtgatgacaagacagtgaagctgtgggacaagagcagccgggagtgtgtgcacagctactgtgagcacggcggctttgtgacctacgtggacttccaccccagcggcacctgcatcgctgctgctggcatggacaacacagtgaaggtgtgggatgtgaggacccaccggctgctgcagcactaccagctgcacagcgctgctgtgaatggcctgtccttccaccccagcggcaactacctgatcacagccagcagtgacagcaccctgaagatcctggacctgatggagggccgcctgctgtacaccctgcacggccaccagggccctgccaccaccgtggccttcagcaggactggagagtactttgccagcggcggcagtgatgagcaggtgatggtgtggaagagcaactttgacatcgtggaccatggagaggtgaccaaggtgccccggcccccagccaccctggccagctccatgggcaacctgactgtgtccatcctggagcagaggctgaccctgacagaggacaagctgaagcagtgcctggagaaccagcagctgatcatgcagagggccaccccctag

SEQ ID NO: 20432 - DNA, 633 bp, synthetic construct; identical to SEQ ID NO: 19581
  source 1..633: mol_type = other DNA; note = Synthetic coding sequence

SEQ ID NO: 20433 - DNA, 1491 bp, synthetic construct
  source 1..1491: mol_type = other DNA; note = Synthetic coding sequence
atggaccaggactatgaaagaaggctgctgcggcagatcgtcatccagaatgaaaacaccatgccccgggtgacagagatgaggaggaccctgaccccagccagcagccctgtgagcagccccagcaagcacggggaccgcttcatccccagcagagctggggccaactggagcgtgaacttccaccgcatcaatgaaaatgagaagagccccagccagaacaggaaggccaaggatgccaccagtgacaacgggaaggatggcctggcctacagcgccctgctgaagaatgagctgctgggcgccggcatcgagaaggtgcaggacccccagacagaagatagaaggctgcagcccagcaccccagagaagaagggcctcttcacctacagcctgagcaccaagaggagcagcccagatgatggaaatgatgtgagcccctacagcctgagccctgtgagcaacaagagccagaagctgctgcggagccccaggaagcccaccaggaagatcagcaagatccccttcaaggtgctggatgcccctgagctgcaggatgacttctacctgaacctggtggactggagcagcctgaatgtgctgtctgtgggcctgggcacctgtgtgtacctgtggagcgcctgcaccagccaggtgacccggctgtgtgacctgtctgtggagggggacagcgtgacctctgtgggctggagcgagcggggcaacctggtggccgtgggcacccacaagggctttgtgcagatctgggatgctgctgctgggaagaagctgtccatgctggagggccacacagcccgggtgggcgccctggcctggaatgctgagcagctgagcagcggcagccgggacaggatgatcctgcagagggacatccgcaccccacccctgcagagcgagcggcggctgcagggccaccggcaggaggtgtgtggcctgaagtggagcacagaccaccagctgctggccagcggcggcaatgacaacaagctgctggtgtggaaccacagcagcctgagccctgtgcagcagtacacagagcacctggccgctgtgaaggccatcgcctggagcccccaccagcacggcctgctggccagcggcggcggcacagctgaccgctgcatccgcttctggaacaccctgaccggccagcccctgcagtgcatcgacaccggcagccaggtgtgcaacctggcctggagcaagcacgccaatgagctggtgtccacccacggctacagccagaaccagatcctggtgtggaagtaccccagcctgacccaggtggccaagctgaccggccacagctacagagtgctgtacctggccatgagcccagatggagaggccatcgtgactggagctggagatgagaccctgcgcttctggaatgtgttcagcaagaccaggagcaccaaggtgaagtgggagagcgtgtctgtgctgaacctcttcacccgcatcagatag

SEQ ID NO: 20434 - DNA, 390 bp, synthetic construct; identical to SEQ ID NO: 19988
  source 1..390: mol_type = other DNA; note = Synthetic coding sequence

SEQ ID NO: 20435 - DNA, 888 bp, synthetic construct; identical to SEQ ID NO: 19226
  source 1..888: mol_type = other DNA; note = Synthetic coding sequence

SEQ ID NO: 20436 - DNA, 888 bp, synthetic construct; identical to SEQ ID NO: 19226
  source 1..888: mol_type = other DNA; note = Synthetic coding sequence

SEQ ID NO: 20437 - DNA, 354 bp, synthetic construct
  source 1..354: mol_type = other DNA; note = Synthetic coding sequence
atgctgtgctggggcaatgccagctttggccagctgggcctgggcggcattgatgaggagatcgtgctggagcccaggaagagtgacttcttcatcaacaagagggtgagagatgtgggctgcggcctgcggcacacagtgtttgtgctggatgatggcaccgtgtacacctgtggctgcaatgacctgggccagctgggccacgagaagagcaggaagaagccagagatcctgaaggtgtgccagatcagccggctgtaccgcctgctggtggtgaccatcatccacctgcacttcctgaagcaggtgaagagctctgtgggggaccgcatcaacatggccaactgggtgtag

SEQ ID NO: 20438 - DNA, 3174 bp, synthetic construct
  source 1..3174: mol_type = other DNA; note = Synthetic coding sequence
atgctgtgctggggcaatgccagctttggccagctgggcctgggcggcattgatgaggagatcgtgctggagcccaggaagagtgacttcttcatcaacaagagggtgagagatgtgggctgcggcctgcggcacacagtgtttgtgctggatgatggcaccgtgtacacctgtggctgcaatgacctgggccagctgggccacgagaagagcaggaagaagccagagcaggtggtggccctggatgcccagaacatcgtggccgtgtcctgtggggaggcccacaccctggccctgaatgacaagggccaggtgtatgcctggggcctggacagtgatggccagctgggcctggtgggcagcgaggagtgcatccgggtgcccaggaacatcaagagcctgagtgacatccagatcgtgcaggtggcctgtggctactaccacagcctggccctgagcaaggccagcgaggtgttctgctggggccagaacaagtatggccagctgggcctgggcacagactgcaagaagcagaccagcccccagctgctgaagagcctgctgggcatccccttcatgcaggtggccgccggcggggcccacagctttgtgctgaccctgagcggggccatcttcggctggggcaggaacaagtttggccagctgggcctgaatgatgaaaatgacagatatgtgcccaacctgctgaagagcctgcggagccagaagatcgtgtacatctgctgcggggaggaccacacagctgccctgaccaaggagggcggcgtcttcaccttcggggccggcggctacggccagctgggccacaacagcaccagccatgagatcaaccccaggaaggtgtttgagctgatgggcagcatcgtgacagaaattgcctgtggccggcagcacaccagcgcctttgtgcccagcagcggccgcatctacagctttggcctgggcggcaatggccagctgggcaccggcagcaccagcaacaggaagagccccttcaccgtgaagggcaactggtacccctacaacggccagtgcctgcctgacatcgacagcgaggagtacttctgtgtgaagaggatcttctctggaggagaccagagcttcagccactacagcagcccccagaactgtggccccccagatgacttccgctgccccaaccccaccaagcagatctggacagtgaatgaggccctgatccagaagtggctgagctaccccagcggccgcttccctgtggagatcgccaatgaaattgatggcaccttcagcagcagcggctgcctgaatggcagcttcctggccgtgtccaatgatgaccactacagaacaggcacccgcttcagcggcgtggacatgaatgctgcccggctgctcttccacaagctgatccagcctgaccacccccagatcagccagcaggtggccgccagcctggagaagaacctgatccccaagctgaccagcagcctgcctgatgtggaggccctgcgcttctacctgaccctgcctgagtgccccctgatgtctgacagcaacaacttcaccaccatcgccatcccctttggaacagccctggtgaacctggagaaggcccccctgaaggtgctggagaactggtggagcgtgctggagcccccactcttcctgaagatcgtggagctgttcaaggaggtggtggtgcacctgctgaagctgtacaagattggcatccccccatctgaaagacgcatcttcaacagcttcctgcacacagccctgaaggtgctggagatcctgcaccgggtgaatgagaagatgggccagatcatccagtatgacaagttctacatccacgaggtgcaggagctgattgacatcagaaatgactacatcaactgggtgcagcagcaggcctacggcatggatgtgaaccacggcctgacagagctggccgacatccctgtgaccatctgcacctacccctttgtgtttgatgcccaggccaagaccaccctgctgcagacagatgctgtgctgcagatgcagatggccatcgaccaggcccaccggcagaatgtgagcagcctcttcctgcccgtcatcgagagcgtgaacccctgcctgatcctggtggtgcggcgggagaacatcgtgggagatgccatggaggtgctgaggaagaccaagaacatcgactacaagaagcccctgaaggtgatctttgtgggagaagatgctgtggatgctgggggcgtgaggaaggagttcttcctgctgatcatgagggagctgctggaccccaagtatggcatgttccgctactatgaggacagccgcctcatctggttcagtgacaagacctttgaggacagcgacctcttccacctgattggagtcatctgtggcctggccatctacaactgcaccatcgtggacctgcacttccccctggccctgtacaagaagctgctgaagaagaagcccagcctggatgacctgaaggagctgatgccagatgtgggccgctccatgcagcagctgctggactacccagaagatgacatcgaggagaccttctgcctgaacttcaccatcaccgtggagaactttggagccacagaggtgaaggagctggtgctgaatggagctgacacagctgtgaacaagcagaaccggcaggagtttgtggatgcctacgtggactacatcttcaacaagtctgtggccagcctgtttgatgccttccacgccggcttccacaaggtgtgtggcggcaaggtgctgctgctcttccagcccaatgagctgcaggccatggtgattggcaacaccaactatgactggaaggagctggagaagaacacagagtacaagggggagtactgggccgagcaccccaccatcaagatcttctgggaggtgttccacgagctgcccctggagaagaagaagcagttcctgctcttcctgaccggcagtgaccgcatccccatcctgggcatgaagagcctgaagctggtgatccagagcactggaggaggagaggagtacctgcctgtgagccacacctgcttcaacctgctggacctgcccaagtacacagagaaggagaccctgcggagcaagctgatccaggccatcgaccacaatgaaggcttcagcctcatctag

SEQ ID NO: 20439 - DNA, 1080 bp, synthetic construct; identical to SEQ ID NO: 18418
  source 1..1080: mol_type = other DNA; note = Synthetic coding sequence

SEQ ID NO: 20440 - DNA, 714 bp, synthetic construct
  source 1..714: mol_type = other DNA; note = Synthetic coding sequence
atggaggtgatggagggccccctgaacctggcccaccagcagagccggcgggctgaccggctgctggccgccggcaagtatgaggaggccatcagctgccacaagaaggccgccgcctacctgtctgaggccatgaagctgacccagagcgagcaggcccacctgagcctggagctgcagagggacagccacatgaagcagctgctgctgatccaggagcgctggaagagggcccagcgggaggagcggctgaaggcccagcagaacacagtgctgtacctgctgcagcagaagtctgagcctgctgagccctgcatcggcagcaaggcccccaaggatgacaagaccatcatcgaggagcaggccaccaagattgctgacctgaagagacatgtggagttcctggtggccgagaatgaaaggctgaggaaagaaaacaagcagctgaaggccgagaaggcccggctgctgaagggccccatcgagaaggagctggatgtggatgctgactttgtggagaccagcgagctgtggagcctgccccctcatgctgagacagccacagccagcagcacctggcagaagtttgctgccaacacaggcaaggccaaggacatccccatccccaacctgccccccctggacttccccagccctgagctgcccctgatggagctgtctgaggacatcctgaagggcttcatgaacaactag

SEQ ID NO: 20441 - DNA, 1458 bp, synthetic construct
  source 1..1458: mol_type = other DNA; note = Synthetic coding sequence
atgaatggcaccctggaccacccagaccagcctgacctggatgccatcaagatgtttgtgggccaggtgcccaggacctggagcgagaaggacctgcgggagctgtttgagcagtatggagctgtgtatgagatcaacgtgctgcgggacaggagccagaaccccccccagagcaagggctgctgctttgtgaccttctacaccaggaaggccgccctggaggcccagaatgccctgcacaacatgaaggtgctgcccggcatgcaccaccccatccagatgaagccagctgacagcgagaagaacaacgtggaggacaggaagctgttcatcggcatgatcagcaagaagtgcacagaaaatgacatccgggtgatgttcagcagctttggccagattgaagaatgtcgcatcctgcggggcccagatggcctgagccggggctgtgcctttgtgaccttcaccacccgggccatggcccagacagccatcaaggccatgcaccaggcccagaccatggagggctgcagcagccccatggtggtgaagtttgctgacacccagaaggacaaggagcagaagaggatggcccagcagctgcagcagcagatgcagcagatctctgctgcctctgtgtggggcaacctggccggcctgaacaccctgggcccccagtacctggccctgtacctgcagctgctgcagcagacagccagcagcggcaacctgaacaccctgagcagcctgcaccccatgggcggcctgaatgccatgcagctgcagaacctggccgccctggccgctgctgccagcgctgcccagaacacccccagcggcaccaatgccctgaccaccagcagcagccccctgtctgtgctgaccagcagcggcagcagccccagcagcagcagcagcaacagcgtgaaccccatcgccagcctgggcgccctgcagaccctggccggggccacagctggcctgaatgtgggcagcctggccggcatggccgccctgaatggaggcctgggcagcagcggcctgagcaatggaacaggcagcaccatggaggccctgacccaggcctacagcggcatccagcagtatgctgctgctgccctgcccaccctgtacaaccagaacctgctgacccagcagagcattggagctgctggcagccagaaggagggccctgagggcgccaacctcttcatctaccacctgccccaggagtttggagaccaggacctgctgcagatgttcatgccctttggaaatgtggtgtctgccaaggtgttcatcgacaagcagaccaacctgagcaaatgttttggatttgtgtcctatgacaaccctgtgtctgcccaggccgccatccagagcatgaatggcttccagatcggcatgaagaggctgaaggtgcagctgaagaggagcaagaatgacagcaagccctactag

SEQ ID NO: 20442 - DNA, 1452 bp, synthetic construct
  source 1..1452: mol_type = other DNA; note = Synthetic coding sequence
atgaatggcaccctggaccacccagaccagcctgacctggatgccatcaagatgtttgtgggccaggtgcccaggacctggagcgagaaggacctgcgggagctgtttgagcagtatggagctgtgtatgagatcaacgtgctgcgggacaggagccagaaccccccccagagcaagggctgctgctttgtgaccttctacaccaggaaggccgccctggaggcccagaatgccctgcacaacatgaaggtgctgcccggcatgcaccaccccatccagatgaagccagctgacagcgagaagaacaatgctgtggaggacaggaagctgttcatcggcatgatcagcaagaagtgcacagaaaatgacatccgggtgatgttcagcagctttggccagatcgaggagtgccgcatcctgcggggcccagatggcctgagccggggctgtgcctttgtgaccttcaccacccgggccatggcccagacagccatcaaggccatgcaccaggcccagaccatggagggctgcagcagccccatggtggtgaagtttgctgacacccagaaggacaaggagcagaagaggatggcccagcagctgcagcagcagatgcagcagatctctgctgcctctgtgtggggcaacctggccggcctgaacaccctgggcccccagtacctggccctgctgcagcagacagccagcagcggcaacctgaacaccctgagcagcctgcaccccatgggcggcctgaatgccatgcagctgcagaacctggccgccctggccgccgccgccagcgctgcccagaacaccccatctggcaccaatgccctgaccaccagcagcagccccctgtctgtgctgaccagcagcgctggcagcagccccagcagcagcagcagcaacagcgtgaaccccatcgccagcctgggcgccctgcagaccctggccggggccacagctggcctgaatgtgggcagcctggccggcatggccgccctgaatggaggcctgggcagcagcggcctgagcaatggaacaggcagcaccatggaggccctgacccaggcctacagcggcatccagcagtatgctgctgctgccctgcccaccctgtacaaccagaacctgctgacccagcagagcattggagctgctggcagccagaaggagggccctgagggcgccaacctcttcatctaccacctgccccaggagtttggagaccaggacctgctgcagatgttcatgccctttggaaatgtggtgtctgccaaggtgttcatcgacaagcagaccaacctgagcaaatgttttggatttgtgtcctatgacaaccctgtgtctgcccaggccgccatccagagcatgaatggcttccagatcggcatgaagaggctgaaggtgcagctgaagaggagcaagaatgacagcaagccctactag

SEQ ID NO: 20443 - DNA, 3570 bp, synthetic construct
  source 1..3570: mol_type = other DNA; note = Synthetic coding sequence
atggatgacaagggggaccccagcaatgaggaggcccccaaggccatcaagcccaccagcaaggagttcaggaagacctggggcttccggaggaccaccatcgccaagcgggagggcgctggagatgctgaggccgaccccctggagcccccaccaccccagcagcagctgggcctgagcctgcggcgcagcggccggcagcccaagaggacagagcgggtggagcagttcctgaccatcgccaggagaagaggccgccgctccatgcctgtgtccctggaggacagcggggagcccaccagctgcccagccacagatgctgagacagccagcgagggctctgtggagagcgccagcgagaccaggagcggcccccagagcgccagcacagctgtgaaggagaggcctgccagcagcgagaaggtgaagggaggagatgaccatgatgacaccagtgacagcgacagtgatggcctgaccctgaaggagctgcagaaccggctgcggaggaagcgggagcaggagcccacagagcggcccctgaagggcatccagagccggctgaggaagaagaggcgggaggagggccctgctgagaccgtgggcagcgaggccagtgacacagtggagggcgtgctgcccagcaagcaggagccagaaaatgaccagggcgtggtgtcccaggccggcaaggatgaccgggagagcaagctggagggcaaggccgcccaggacatcaaggatgaggagcccggggacctgggccggcccaagccagaatgtgagggctatgaccccaatgccctgtactgcatctgccggcagccccacaacaaccgcttcatgatctgctgtgacagatgtgaggagtggttccatggagactgtgtgggcatcagcgaggcccggggccgcctgctggagagaaatggagaggactacatctgccccaactgcaccatcctgcaggtgcaggatgagacccacagcgagacagctgaccagcaggaggccaagtggaggcctggagatgctgatggaacagactgcaccagcatcggcaccatcgagcagaagagcagcgaggaccagggcatcaagggccgcatcgagaaggccgccaaccccagcggcaagaagaagctgaagatcttccagcctgtgattgaggcccctggggccagcaagtgcatcggccctggctgctgccacgtggcccagcctgacagcgtgtactgcagcaatgactgcatcctgaagcacgccgccgccaccatgaagttcctgagcagcggcaaggagcagaagcccaagcccaaggagaagatgaagatgaagccagagaagcccagcctgcccaagtgtggggcccaggccggcatcaagatcagctctgtgcacaagaggcctgcccctgagaagaaggagaccaccgtgaagaaggctgtggtggtgcctgcccggtctgaggccctgggcaaggaggccgcctgtgagagcagcacccccagctgggccagtgaccacaactacaatgctgtgaagccagagaagacagctgcccccagccccagcctgctgtacaagagcaccaaggaggacagaagaagtgaggagaaggccgccgccatggccgccagcaagaagacagcccctcctggcagcgctgtgggcaagcagcctgcccccaggaacctggtgcccaagaagagcagctttgccaacgtggccgccgccaccccagccatcaagaagccacccagcggcttcaagggcaccatccccaagaggccctggctgagcgccacccccagcagcggggccagcgctgcccggcaggccggccctgccccagctgctgccacagctgccagcaagaagtttcctggcagcgctgccctggtgggcgctgtgaggaagcctgtggtgcccagcgtgcccatggccagccctgcccctggccgcctgggcgccatgtctgctgcccccagccagcccaacagccagatccggcagaacatcagaagaagcctgaaggagatcctgtggaagagggtgaatgacagtgatgacctgatcatgacagaaaatgaggtgggcaagatcgccctgcacatcgagaaggagatgttcaacctcttccaggtgacagacaaccgctacaagagcaagtaccgcagcatcatgttcaacctgaaggaccccaagaaccagggcctcttccaccgggtgctgcgggaggagatcagcctggccaagctggtgcggctgaagccagaggagctggtgtccaaggagctgagcacctggaaggagaggcctgcccggtctgtgatggagagcaggaccaagctgcacaatgaaagcaagaagacagccccccggcaggaggccatcccagacctggaggacagcccccctgtgtctgattctgaggagcagcaggagagcgcccgggctgtgcctgagaagagcacagcccccctgctggatgtgttcagctccatgctgaaggacaccaccagccagcaccgggcccacctgtttgacctgaactgcaagatctgcaccggccaggtgcccagcgcagaagatgagcccgcccccaagaagcagaagctgagcgcctctgtgaagaaggaggacctgaagagcaagcatgacagcagcgccccagaccctgccccagacagcgcagatgaggtgatgcctgaggccgtgcctgaggtggccagcgagcccggcctggagagcgccagccaccccaacgtggacaggacctacttccctggccccccaggagatggccaccctgagcccagccccctggaggacctgagcccctgcccagccagctgtggcagcggcgtggtgaccaccgtgacagtgtctggccgggaccccaggacagcccccagcagcagctgcacagctgtggccagcgctgccagcaggccagacagcacccacatggtggaggcccggcaggatgtgcccaagcctgtgctgacctctgtgatggtgcccaagagcatcctggccaagcccagcagcagcccagacccccgctacctgtctgtgccccccagccccaacatcagcaccagcgagagccgcagccccccagagggggacaccaccctcttcctgagccggctgagcaccatctggaagggcttcatcaacatgcagagcgtggccaagtttgtgaccaaggcctaccctgtgtctggctgctttgactacctgtctgaggacctgcctgacaccatccacatcggcggcagaattgcccccaagacagtgtgggactatgtgggcaagctgaagagctctgtgtccaaggagctgtgcctgatccgcttccacccagccacagaggaggaggaggtggcctacatcagcctgtacagctacttcagcagccggggccgcttcggcgtggtggccaacaacaacagacatgtgaaggacctgtacctgatccccctgagcgcccaggaccctgtgcccagcaagctgctgccctttgagggccctgggaagaggcggctgagcggctggaggtag

SEQ ID NO: 20444 - DNA, 3570 bp, synthetic construct; identical to SEQ ID NO: 20443
  source 1..3570: mol_type = other DNA; note = Synthetic coding sequence

SEQ ID NO: 20445 - DNA, 6723 bp, synthetic construct; identical to SEQ ID NO: 18530
  source 1..6723: mol_type = other DNA; note = Synthetic coding sequence

SEQ ID NO: 20446 - DNA, 888 bp, synthetic construct; identical to SEQ ID NO: 19226
  source 1..888: mol_type = other DNA; note = Synthetic coding sequence

SEQ ID NO: 20447 - DNA, 834 bp, synthetic construct; identical to SEQ ID NO: 19947
  source 1..834: mol_type = other DNA; note = Synthetic coding sequence

SEQ ID NO: 20448 - DNA, 1245 bp, synthetic construct
  source 1..1245: mol_type = other DNA; note = Synthetic coding sequence
atgggcaccgtgacagaggacctgatcagaagaaatgctgagcacaatgactgtgtgatcttcagcctggaggagctgagcctgcaccagcaggagattgagcggctggagcacatcgacaagtggtgccgggacctgaagatcctgtacctgcagaacaacctgattggcaagattgaaaatgtgtccaagctgaagaagctggagtacctgaacctggccctgaacaacatcgagaagattgagaacctggagggctgtgaggagctggccaagctggacctgactgtgaacttcatcggggagctgagcagcatcaagaacctgcagcacaacatccacctgaaggagctgttcctgatgggcaacccctgtgccagctttgaccactaccgggagtttgtggtggccaccctgccccagctgaagtggctggatggcaaggagattgagcccagcgagcgcatcaaggccctgcaggactacagcgtgattgagccccagatccgggagcaggagaaggaccactgcctgaagagggccaagctgaaggaggaggcccagaggaagcaccaggaggaggacaagaatgaagacaagaggagcaatgccggctttgatggccgctggtacacagacatcaatgccaccctgagcagcctggagagcaaggaccacctgcaggccccagacacagaggagcacaacaccaagaagctggacaacagtgaagatgacctggagttctggaacaagccctgcctcttcaccccagagagccggctggagaccctgcggcacatggagaagcagaggaagaagcaggagaagctgtctgagaagaagaagaaggtgaagccacccaggaccctcatcacagaagatggcaaggccctgaatgtgaatgagcccaagattgacttcagcctgaaggacaatgagaagcagatcatcctggacctggccgtgtaccgctacatggacaccagcctgattgatgtggatgtgcagcccacctacgtgcgggtgatgatcaagggcaagcccttccagctggtgctgcctgctgaggtgaagccagacagcagcagcgccaagaggagccagaccaccggccacctggtgatctgcatgcccaaggtgggggaggtgatcaccggcggccagagggccttcaagtccatgaagaccaccagtgacaggagccgggagcagaccaacaccagctacagcacaggcttctag

SEQ ID NO: 20449 - DNA, 2529 bp, synthetic construct
  source 1..2529: mol_type = other DNA; note = Synthetic coding sequence
atgagcagcagccactttgccagccgccacaggaaggacatcagcacagagatgatccgcaccaagatcgcccacaggaagagcctgagccagaaggaaaatagacacaaggagtatgaaagaaacagacacttcggcctgaaggatgtgaacatccccaccctggagggccgcatcctggtggagctggatgagaccagccagggcctggtgcctgagaagaccaacgtgaagccccgggccatgaagaccatcctgggggaccagaggaagcagatgctgcagaagtacaaggaggagaagcagctgcagaagctgaaggagcagcgggagaaggccaagaggggcatcttcaaggtgggccgctacagaccagacatgccctgcttcctgctgagcaaccagaatgctgtgaaggccgagcccaagaaggccatccccagctctgtgcgcatcaccaggagcaaggccaaggaccagatggagcagaccaagattgacaatgaaagtgatgtgcgggccatccggcccggcccccggcagaccagcgagaagaaggtgtctgacaaggagaagaaggtggtgcagcctgtgatgcccaccagcctgaggatgaccaggtctgccacccaggccgccaagcaggtgcccaggacagtgagcagcaccacagccaggaagcctgtgacccgggccgccaatgaaaatgaacctgagggcaaggtgcccagcaagggccggcctgccaagaatgtggagaccaagccagacaagggcatcagctgcaaggtggacagcgaggagaacaccctgaacagccagaccaatgccaccagcggcatgaacccagatggagtgctgagcaagatggagaacctgcctgagatcaacacagccaagatcaagggcaagaacagctttgcccccaaggacttcatgttccagcccctggatggcctgaagacctaccaggtgacccccatgacccccaggtctgccaatgccttcctgacccccagctacacctggacccccctgaagacagaggtggatgagagccaggccaccaaggagatcctggcccagaagtgcaagacctacagcaccaagaccatccagcaggacagcaacaagctgccctgccccctgggccccctgactgtgtggcatgaggagcacgtgctgaacaagaatgaggccaccaccaagaacctgaatggcctgcccatcaaggaggtgcccagcctggagagaaatgaaggaagaattgcccagccccaccacggcgtgccctacttcaggaacatcctgcagagcgagacagagaagctgaccagccactgctttgagtgggacaggaagctggagctggacatcccagatgatgccaaggacctgatcagaacagctgtgggccagacccggctgctgatgaaggagcgcttcaagcagtttgagggcctggtggatgactgtgagtacaagaggggcatcaaggagaccacctgcacagacctggatggcttctgggacatggtgtccttccagattgaagatgtgatccacaagttcaacaacctgatcaagctggaggagagcggctggcaggtgaacaacaacatgaaccacaacatgaacaagaatgtgttcaggaagaaggtggtgtctggcatcgccagcaagcccaagcaggatgatgctggaagaattgctgccaggaaccggctggccgccatcaagaatgccatgagggagcgcatccggcaggaggagtgtgccgagacagctgtgtctgtcatccccaaggaggtggacaagatcgtgtttgatgctggcttcttccgggtggagagccctgtgaagctgttcagcggcctgtctgtgagcagcgagggccccagccagaggctgggcacccccaagtctgtgaacaaggctgtgtcccagagcagaaatgagatgggcatcccccagcagaccaccagcccagaaaatgccggcccccagaacaccaagtcagaacatgtgaagaagaccctcttcctgagcatccctgagagccgcagcagcattgaagatgcccagtgccccggcctgcctgacctgattgaagaaaatcatgtggtgaacaagacagacctgaaggtggactgcctgagcagcgagaggatgagcctgcccctgctggccggcggcgtggctgatgacatcaacaccaacaagaaggagggcatcagtgatgtggtggagggcatggagctgaacagcagcatcaccagccaggatgtgctgatgagcagccctgagaagaacacagccagccagaacagcatcctggaggagggggagaccaagatcagccagagcgagctgtttgacaacaagagcctgaccacagagtgccacctgctggacagcgtgggcagctgctacgtggcccgggccggcctggaggtgctgggcagcagtgaccccaccaccagcgccagccgggtggccggcaccacagcccggagcaagctgcagtag

SEQ ID NO: 20450 - DNA, 1710 bp, synthetic construct
  source 1..1710: mol_type = other DNA; note = Synthetic coding sequence
atgctgtgcagccccagcttctgcaagctgtgctggaagaggcagagagaaaatggccagaggaaatatggaggccccccacctggctgggatgctgcccctcctgagcggggctgtgagatcttcatcggcaagctgccccgggacctgtttgaagatgagctgatccccctgtgtgagaagattggcaagatctatgagatgaggatgatgatggacttcaatggaaacaacagaggctacgcctttgtgaccttcagcaacaaggtggaggccaagaatgccatcaagcagctgaacaactatgagatcagaaatggccgcctgctgggcgtgtgtgcctctgtggacaactgccgcctgtttgtgggcggcatccccaagaccaagaagcgggaggagatcctgtctgagatgaagaaggtgacagaaggagtggtggatgtgattgtgtaccccagcgctgctgacaagaccaagaacagaggatttgcctttgtggagtatgagagccacagagctgctgccatggcccggaggaagctgctgcccggccgcatccagctgtggggccacggcattgctgtggactgggccgagcctgaggtggaggtggatgaggacaccatgagctctgtgaagatcctgtatgtgaggaacctgatgctgagcaccagcgaggagatgattgagaaggagttcaacaacatcaagccaggagctgtggagcgggtgaagaagatccgggactatgcctttgtgcacttcagcaaccgggaggatgctgtggaggccatgaaggccctgaatggcaaggtgctggatggcagccccatcgaggtgaccctggccaagcctgtggacaaggacagctatgtgcgctacacccggggcactggaggccggggcaccatgctgcagggcgagtacacctacagcctgggccaggtgtatgaccccaccaccacctacctgggcgcccctgtgttctacgccccccagacctatgctgccatccccagcctgcacttccctgccaccaagggccacctgagcaacagagccatcatccgggcccccagcgtgagaggagctgctggggtgcggggcctgggcggccggggctacctggcctacacaggcctgggccggggctaccaggtgaagggggacaagcgggaggacaagctgtatgacatcctgcccggcatggagctgacccccatgaaccctgtgaccctgaagccccagggcatcaagctggccccccagatcctggaggagatctgccagaagaacaactggggccagcctgtgtaccagctgcacagcgccatcggccaggaccagaggcagctgttcctgtacaagatcaccatcccagccctggccagccagaacccagccatccaccccttcaccccacccaagctgagcgcctttgtggatgaggccaagacctatgctgctgagtacaccctgcagaccctgggcatccccacagatggaggagatggcaccatggccacagctgctgctgctgccacagccttccctggctatgctgtgcccaatgccacagcccctgtgtctgctgcccagctgaagcaggccgtgaccctgggccaggacctggccgcctacaccacctatgaggtgtaccccacctttgctgtgacagcccggggagatggctacggcaccttctag

SEQ ID NO: 20451 - DNA, 1764 bp, synthetic construct
  source 1..1764: mol_type = other DNA; note = Synthetic coding sequence
atgagcacagccatccctggcctgaagaagggcaacaatgccctgcagagcatcatcctgcagaccctgctggagaaggaaaatggccagaggaaatatggaggccccccacctggctgggatgctgcccctcctgagcggggctgtgagatcttcatcggcaagctgccccgggacctgtttgaagatgagctgatccccctgtgtgagaagattggcaagatctatgagatgaggatgatgatggacttcaatggaaacaacagaggctacgcctttgtgaccttcagcaacaaggtggaggccaagaatgccatcaagcagctgaacaactatgagatcagaaatggccgcctgctgggcgtgtgtgcctctgtggacaactgccgcctgtttgtgggcggcatccccaagaccaagaagcgggaggagatcctgtctgagatgaagaaggtgacagaaggagtggtggatgtgattgtgtaccccagcgctgctgacaagaccaagaacagaggatttgcctttgtggagtatgagagccacagagctgctgccatggcccggaggaagctgctgcccggccgcatccagctgtggggccacggcattgctgtggactgggccgagcctgaggtggaggtggatgaggacaccatgagctctgtgaagatcctgtatgtgaggaacctgatgctgagcaccagcgaggagatgattgagaaggagttcaacaacatcaagccaggagctgtggagcgggtgaagaagatccgggactatgcctttgtgcacttcagcaaccgggaggatgctgtggaggccatgaaggccctgaatggcaaggtgctggatggcagccccatcgaggtgaccctggccaagcctgtggacaaggacagctatgtgcgctacacccggggcactggaggccggggcaccatgctgcagggcgagtacacctacagcctgggccaggtgtatgaccccaccaccacctacctgggcgcccctgtgttctacgccccccagacctatgctgccatccccagcctgcacttccctgccaccaagggccacctgagcaacagagccatcatccgggcccccagcgtgcgggagatctacatgaatgtgcctgtgggcgccgccggcgtgcggggcctgggcggccggggctacctggcctacacaggcctgggccggggctaccaggtgaagggggacaagcgggaggacaagctgtatgacatcctgcccggcatggagctgacccccatgaaccctgtgaccctgaagccccagggcatcaagctggccccccagatcctggaggagatctgccagaagaacaactggggccagcctgtgtaccagctgcacagcgccatcggccaggaccagaggcagctgttcctgtacaagatcaccatcccagccctggccagccagaacccagccatccaccccttcaccccacccaagctgagcgcctttgtggatgaggccaagacctatgctgctgagtacaccctgcagaccctgggcatccccacagatggaggagatggcaccatggccacagctgctgctgctgccacagccttccctggctatgctgtgcccaatgccacagcccctgtgtctgctgcccagctgaagcaggccgtgaccctgggccaggacctggccgcctacaccacctatgaggtgtaccccacctttgctgtgacagcccggggagatggctacggcaccttctag

SEQ ID NO: 20452 - DNA, 1620 bp, synthetic construct
  source 1..1620: mol_type = other DNA; note = Synthetic coding sequence
atggagagcaaccacaagtctggagatggcctgagcggcacccagaaggaggccgccctgcgggccctggtgcagaggacaggctacagcctggtgcaggagaatggccagaggaaatatggaggccccccacctggctgggatgctgcccctcctgagcggggctgtgagatcttcatcggcaagctgccccgggacctgtttgaagatgagctgatccccctgtgtgagaagattggcaagatctatgagatgaggatgatgatggacttcaacggcaacaacagaggctacgcctttgtgaccttcagcaacaaggtggaggccaagaatgccatcaagcagctgaacaactatgagatcagaaatggccgcctgctgggcgtgtgtgcctctgtggacaactgccgcctgtttgtgggcggcatccccaagaccaagaagcgggaggagatcctgtctgagatgaagaaggtgacagagggcgtggtggatgtgattgtgtaccccagcgctgctgacaagaccaagaacagaggatttgcctttgtggagtatgagagccacagagctgctgccatggcccggaggaagctgctgcctggagctgtggagcgggtgaagaagatccgggactatgcctttgtgcacttcagcaaccgggaggatgctgtggaggccatgaaggccctgaatggcaaggtgctggatggcagccccatcgaggtgaccctggccaagcctgtggacaaggacagctatgtgcgctacacccggggcactggaggccggggcaccatgctgcagggcgagtacacctacagcctgggccaggtgtatgaccccaccaccacctacctgggcgcccctgtgttctacgccccccagacctatgctgccatccccagcctgcacttccctgccaccaagggccacctgagcaacagagccatcatccgggcccccagcgtgcgggagatctacatgaatgtgcctgtgggcgccgccggcgtgcggggcctgggcggccggggctacctggcctacacaggcctgggccggggctaccaggtgaagggggacaagcgggaggacaagctgtatgacatcctgcccggcatggagctgacccccatgaaccctgtgaccctgaagccccagggcatcaagctggccccccagatcctggaggagatctgccagaagaacaactggggccagcctgtgtaccagctgcacagcgccatcggccaggaccagaggcagctgttcctgtacaagatcaccatcccagccctggccagccagaacccagccatccaccccttcaccccacccaagctgagcgcctttgtggatgaggccaagacctatgctgctgagtacaccctgcagaccctgggcatccccacagatggaggagatggcaccatggccacagctgctgctgctgccacagccttccctggctatgctgtgcccaatgccacagcccctgtgtctgctgcccagctgaagcaggccgtgaccctgggccaggacctggccgcctacaccacctatgaggtgtaccccacctttgctgtgacagcccggggagatggctacggcaccttctag

SEQ ID NO: 20453 - DNA, 1044 bp, synthetic construct
  source 1..1044: mol_type = other DNA; note = Synthetic coding sequence
ttcagcctcttccctgctgtggacaatgaggaggccgccctgctgcacgaggaggccaccatgaccatcgaggagctgctgaccaggtatggccagaactgccacaagggccccccccacagcaagagcggggccagtgacaagctgccccgggtggccaagagcaagttctttgaagattctgaagatgaaagtgatgaggccgaggaggaggaggaggacagtgaagaatgttctgaggaggaggatggctacagcagcgaggaggctgaaaatgaggaggatgaagatgacacagaggaggccgaggaggatgatgaggaggaggaggaggagatgatggtgcccggcatggagggcaaggaggagcccggcagtgacagcggcaccacagctgtggtggccctgatccggggcaagcagctgattgtggccaatgctggggacagccgctgtgtggtgtctgaggccggcaaggccctggacatgtcctatgaccacaagccagaagatgaggtggagctggcccgcatcaagaatgccggcggcaaggtgaccatggatggccgggtgaatggaggcctgaacctgagccgggccatcggggaccacttctacaagaggaacaagaacctgcccccagaggagcagatgatcagcgccctgcctgacatcaaggtgctgaccctgacagatgaccacgagttcatggtgattgcctgtgatggcatctggaatgtgatgagcagccaggaggtggtggacttcatccagagcaagatcagccagagagatgaaaatggagagctgcggctgctgagcagcatcgtggaggagctgctggaccagtgcctggccccagacaccagcggagatggcaccggctgtgacaacatgacctgcatcatcatctgcttcaagcccaggaacacagctgagctgcagcctgagagcggcaagaggaagctggaggaggtgctgagcacagaaggagctgaggagaatggaaacagcgacaagaagaagaaggccaagagggactag

SEQ ID NO: 20454 - DNA, 1218 bp, synthetic construct
  source 1..1218: mol_type = other DNA; note = Synthetic coding sequence
atggagacagacctgaacagccaggacaggaaggacctggacaagttcatcaagttctttgccctgaagacagtgcaggtgattgtgcaggcccggctgggggagaagatctgcaccaggagcagcagcagccccaccggcagtgactggttcaacctggccatcaaggacatccctgaggtgacccatgaggccaagaaggccctggccggccagctgcctgctgtgggccgctccatgtgtgtggagatcagcctgaagaccagcgagggggacagcatggagctggagatctggtgcctggagatgaatgagaagtgtgacaaggagatcaaggtgtcctacacagtgtacaaccggctgagcctgctgctgaagagcctgctggccatcaccagggtgaccccagcctaccgcctgagcaggaagcagggccacgagtatgtgatcctgtaccgcatctactttggagaggtgcagctgagcggcctgggggagggcttccagacagtgcgggtgggcaccgtgggcacccctgtgggcaccatcaccctgagctgtgcctaccgcatcaacctggccttcatgagcacccggcagtttgagaggaccccacccatcatgggcatcatcatcgaccactttgtggaccggccctaccccagcagcagccccatgcacccctgcaactacagaacagctggggaggacaccggggtcatctaccccagcgtggaggacagccaggaggtgtgcaccaccagcttcagcaccagcccccccagccagctgatggtgcctgggaaggagggcggcgtgcccctggcccccaaccagcctgtgcacggcacccaggccgaccaggagcggctggccacctgcacccccagcgacaggacccactgtgccgccacccccagcagcagcgaggacacagagaccgtgagcaacagcagcgagggccgggccagcccccatgatgtgctggagaccatctttgtgaggaaggtgggcgcctttgtgaacaagcccatcaaccaggtgaccctgaccagcctggacatcccctttgccatgtttgcccccaagaacctggagctggaggacacagaccccatggtgaaccccccagacagccctgagacagagagccccctgcagggcagcctgccctgctcctggcccctgccctgcctgctgagccccagcacagtgtag

SEQ ID NO: 20455 - DNA, 2025 bp, synthetic construct; identical to SEQ ID NO: 19458
  source 1..2025: mol_type = other DNA; note = Synthetic coding sequence

SEQ ID NO: 20456 - DNA, 2640 bp, synthetic construct
  source 1..2640: mol_type = other DNA; note = Synthetic coding sequence
atgaactacccaggccggggcagccccaggagccctgagcacaacggccggggcggcggcggcggggcctgggagctgggcagtgatgcccggcctgccttcggcggcggcgtgtgctgctttgagcacctgcctggaggagaccctgatgatggagatgtgcccctggccctgctgcggggggagcccggcctgcacctggcccctggaacagatgaccacaaccaccacctggccctggacccctgcctgagtgatgaaaattatgacttcagcagcgctgagagcggcagcagcctgcgctactacagcgagggggagagcggcggcggcggcagcagcctgagcctgcaccccccccagcagccccccctggtgcccaccaacagcggcggcggcggggccaccggcggcagccctggagagaggaagaggacccggctgggcggccctgctgcccggcacagatatgaggtggtgacagagctgggccctgaggaggtgcgctggttctacaaggaggacaagaagacctggaagcccttcatcggctatgacagcctgcgcatcgagctggccttccgcaccctgctgcagaccactggagcccggccccagggcggggacagagatggagaccacgtgtgcagccccactggacctgccagcagcagtggagaagatgatgatgaagatcgggcctgtggcttctgccagagcaccaccggccacgagcctgagatggtggagctggtgaacatcgagcctgtgtgtgtgcggggcggcctgtatgaggtggatgtgacccagggcgagtgctaccctgtgtactggaaccaggccgacaagatccctgtgatgaggggccagtggttcattgatggcacctggcagcccctggaggaggaggagagcaacctgattgagcaggagcacctgaactgcttccggggccagcagatgcaggagaactttgatattgaggtgtccaagagcattgatggcaaggatggcagcggcatcaactacagcgctgtgcacagcttcaagctgagcagaaatcatgtggactggcacagcgtggatgaggtgtacctgtacagtgatgccaccaccagcaagatcgccaggacagtgacccagaagctgggcttcagcaaggccagcagcagcggcacccggctgcaccggggctacgtggaggaggccaccctggaggacaagcccagccagaccacccacatcgtgtttgtggtgcacggcatcggccagaagatggaccagggccgcatcatcaagaacacagccatgatgagggaggccgccaggaagattgaggagcggcacttcagcaaccacgccacccacgtggagttcctgcctgtggagtggaggagcaagctgaccctggatggagacacagtggacagcatcaccccagacaaggtgcggggcctgcgggacatgctgaacagcagcgccatggacatcatgtactacaccagccccctgtacagagatgagctggtgaagggcctgcagcaggagctgaaccggctgtacagcctcttctgcagcagaaatccagactttgaggagaagggcggcaaggtgtccatcgtgagccacagcctgggctgtgtgatcacctatgacatcatgacaggctggaaccctgtgcggctgtatgagcagctgctgcagaaggaggaggagctgcctgatgagcgctggatgtcctatgaggagcggcacctgctggatgagctgtacatcaccaagaggcggctgaaggagattgaggagcggctgcacggcctgaaggccagctccatgacccagaccccagccctgaagttcaaggtggagaacttcttctgcatgggcagccccctggccgtgttcctggccctgcggggcatccggcccggcaacacaggcagccaggaccacatcctgccccgggagatctgcaaccggctgctgaacatcttccaccccacagatcctgtggcctaccgcctggagcccctcatcctgaagcactacagcaacatcagccctgtgcagatccactggtacaacaccagcaaccccctgccctatgagcacatgaagcccagcttcctgaacccagccaaggagcccacctctgtgtctgaaaatgaaggcatcagcaccatccccagccctgtgaccagccctgtgctgagcagaagacactacggggagagcatcaccaacatcggcaaggccagcatcctgggcgccgccagcatcggcaagggcctgggcggcatgctgttcagccgcttcggccgcagcagcaccacccagagcagcgagaccagcaaggacagcatggaggatgagaagaagcctgtggccagccccagcgccaccaccgtgggcacccagaccctgccccacagcagcagcggcttcctggacagcgccctggagctggaccacagaattgactttgagctgcgggagggcctggtggagagccgctactggagcgctgtgaccagccacacagcctactggagcagcctggatgtggccctcttcctgctgaccttcatgtacaagcatgaacatgatgatgatgccaagcccaacctggaccccatctag

SEQ ID NO: 20457 - DNA, 2316 bp, synthetic construct
  source 1..2316: mol_type = other DNA; note = Synthetic coding sequence
atgaactacccaggccggggcagccccaggagccctgagcacaacggccggggcggcggcggcggggcctgggagctgggcagtgatgcccggcctgccttcggcggcggcgtgtgctgctttgagcacctgcctggaggagaccctgatgatggagatgtgcccctggccctgctgcggggggagcccggcctgcacctggcccctggaacagatgaccacaaccaccacctggccctggacccctgcctgagtgatgaaaattatgacttcagcagcgctgagagcggcagcagcctgcgctactacagcgagggggagagcggcggcggcggcagcagcctgagcctgcaccccccccagcagccccccctggtgcccaccaacagcggcggcggcctgtatgaggtggatgtgacccagggcgagtgctaccctgtgtactggaaccaggccgacaagatccctgtgatgaggggccagtggttcattgatggcacctggcagcccctggaggaggaggagagcaacctgattgagcaggagcacctgaactgcttccggggccagcagatgcaggagaactttgacatcgaggtgtccaagagcattgatggcaaggatgctgtgcacagcttcaagctgagcagaaatcatgtggactggcacagcgtggatgaggtgtacctgtacagtgatgccaccaccagcaagatcgccaggacagtgacccagaagctgggcttcagcaaggccagcagcagcggcacccggctgcaccggggctacgtggaggaggccaccctggaggacaagcccagccagaccacccacatcgtgtttgtggtgcacggcatcggccagaagatggaccagggccgcatcatcaagaacacagccatgatgagggaggccgccaggaagattgaggagcggcacttcagcaaccacgccacccacgtggagttcctgcctgtggagtggaggagcaagctgaccctggatggagacacagtggacagcatcaccccagacaaggtgcggggcctgcgggacatgctgaacagcagcgccatggacatcatgtactacaccagccccctgtacagagatgagctggtgaagggcctgcagcaggagctgaaccggctgtacagcctcttctgcagcagaaatccagactttgaggagaagggcggcaaggtgtccatcgtgagccacagcctgggctgtgtgatcacctatgacatcatgacaggctggaaccctgtgcggctgtatgagcagctgctgcagaaggaggaggagctgcctgatgagcgctggatgtcctatgaggagcggcacctgctggatgagctgtacatcaccaagaggcggctgaaggagattgaggagcggctgcacggcctgaaggccagctccatgacccagaccccagccctgaagttcaaggtggagaacttcttctgcatgggcagccccctggccgtgttcctggccctgcggggcatccggcccggcaacacaggcagccaggaccacatcctgccccgggagatctgcaaccggctgctgaacatcttccaccccacagatcctgtggcctaccgcctggagcccctcatcctgaagcactacagcaacatcagccctgtgcagatccactggtacaacaccagcaaccccctgccctatgagcacatgaagcccagcttcctgaacccagccaaggagcccacctctgtgtctgaaaatgaaggcatcagcaccatccccagccctgtgaccagccctgtgctgagcagaagacactacggggagagcatcaccaacatcggcaaggccagcatcctgggcgccgccagcatcggcaagggcctgggcggcatgctgttcagccgcttcggccgcagcagcaccacccagagcagcgagaccagcaaggacagcatggaggatgagaagaagcctgtggccagccccagcgccaccaccgtgggcacccagaccctgccccacagcagcagcggcttcctggacagcgcctacttccggctgcaggagagcttcttcaacctgccccagctgctcttcccagaaaatgtgatgcagaacaaggacaatgccctggtggagctggaccacagaattgactttgagctgcgggagggcctggtggagagccgctactggagcgctgtgaccagccacacagcctactggagcagcctggatgtggccctcttcctgctgaccttcatgtacaagcatgaacatgatgatgatgccaagcccaacctggaccccatctag

SEQ ID NO: 20458 - DNA, 1179 bp, synthetic construct
  source 1..1179: mol_type = other DNA; note = Synthetic coding sequence
atgggcaccacctgcctgcacctgggcaccctggagcagagcctggtgtttgagaacaaggtgaacagcgagaaggtgaagctgagcctgaggaacttcccccacaatgactatgaagatgtgtttgaggagcccagcgagagcggcagtgaccccagcatgtggacagcccggggccccttccggcgggaccgctggagcagtgaagatgaggaggccgccggccccagccaggccctgagccccctgctgagtgacaccaggaagatcgtgtctgagggggagctggaccagctggcccagatccggcccctcatcttcaacttccacgagcagacagccatcaaggactgcctgaagatcctggaggagaagacagctgcctatgacatcatgcaggagttcatggccctggagctgaagaacctgcccggggagttcaacagcggcaaccagcccagcaaccgggagaagaaccgctacagagacatcctgccctatgacagcaccagggtgcccctgggcaagagcaaggactacatcaatgccagctacatccgcatcgtgaactgtggggaggagtacttctacatcgccacccagggccccctgctgagcaccattgatgacttctggcagatggtgctggagaacaacagcaatgtgattgccatgatcacccgggagattgagggcggcatcatcaagtgctaccactactggcccatcagcctgaagaagcccctggagctgaagcacttccgggtcttcctggagaactaccagatcctgcagtacttcatcatccgcatgttccaggtggtggagaagagcacaggcaccagccacagcgtgaagcagctgcagttcaccaagtggccagaccacggcaccccagccagcgctgacagcttcatcaagtacatccgctatgccaggaagagccacctgaccggccccatggtggtgcactgcagcgctggcattggaagaactggagtcttcctgtgtgtggatgtggtgttctgtgccatcgtgaagaactgcagcttcaacatcatggacatcgtggcccagatgagggagcagaggagcggcatggtgcagaccaaggagcagtaccacttctgctatgacatcgtgctggaggtgctgaggaagctgctgaccctggactag

SEQ ID NO: 20459 - DNA, 621 bp, synthetic construct
  source 1..621: mol_type = other DNA; note = Synthetic coding sequence
atgagcagcccccgggacttccgggcagagcctgtgaatgactatgagggcaatgacagcgaggccgaggacctgaacttccgggagaccctgcccagcagcagccaggagaacacccccaggagcaaggtgtttgagaacaaggtgaacagcgagaaggtgaagctgagcctgaggaacttcccccacaatgactatgaagatgtgtttgaggagcccagcgagagcggcagtgaccccagcatgtggacagcccggggccccttccggcgggaccgctggagcagtgaagatgaggaggccgccggccccagccaggccctgagccccctgctgagtgacaccaggaagatcgtgtctgagggggagctggaccagctggcccagatccggcccctcatcttcaacttccacgagcagacagccatcaaggactgcctgaagatcctggaggagaagacagctgcctatgacatcatgcaggagttcatgttcaacatcatggacatcgtggcccagatgagggagcagaggagcggcatggtgcagaccaaggagcagtaccacttctgctatgacatcgtgctggaggtgctgaggaagctgctgaccctggactag

SEQ ID NO: 20460 - DNA, 438 bp, synthetic construct
  source 1..438: mol_type = other DNA; note = Synthetic coding sequence
atgtggacagcccggggccccttcagaagagaccgctggagcagtgaagatgaggaggccgccggccccagccaggccctgagccccctgctgagtgacaccaggaagatcgtgtctgagggggagctggaccagctggcccagatccggcccctcatcttcaacttccacgagcagacagccatcaaggactgcctgaagatcctggaggagaagacagctgcctatgacatcatgcaggagttcatggccctggagctgaagaacctgcctggagagttcaacagcggcaaccagcccagcaaccgggagaagaaccgctacagagacatcctgcccttccagcaccacggctacagcggccccaatgaaagaaccaccttctggcacggcagcaatgaaggagctgtgtccctgctgctgcgctactgtgcctag

SEQ ID NO: 20461 - DNA, 1020 bp, synthetic construct; identical to SEQ ID NO: 19098
  source 1..1020: mol_type = other DNA; note = Synthetic coding sequence

SEQ ID NO: 20462 - DNA, 1047 bp, synthetic construct
  source 1..1047: mol_type = other DNA; note = Synthetic coding sequence
atgcagtttggagagctgctggccgctgtgaggaaggcccaggccaacgtgatgctgttcctggaggagaaggagcaggccgccctgagccaggccaacggcatcaaggcccacctggagtacagatctgctgagatggagaagagcaagcaggagctggagaccatggccgccatcagcaacacagtgcagttcctggaggagtactgcaagttcaagaacacagaggacatcaccttccccagcgtgtacatcggcctgaaggacaagctgagcggcatcaggaaggtgatcacagagagcacagtgcacctgatccagctgctggagaactacaagaagaagctgcaggagttcagcaaggaggaggagtatgacatccgcacccaggtgtctgccatcgtgcagaggaagtactggaccagcaagccagagcccagcacccgggagcagttcctgcagtatgtgcatgacatcacctttgatcctgacacagcccacaagtacctgcggctgcaggaggagaacaggaaggtgaccaacaccaccccctgggagcacccctacccagacctgcccagccgcttcctgcactggaggcaggtgctgagccagcagagcctgtacctgcaccgctactactttgaggtggagatctttggagctggcacctacgtgggcctgacctgcaagggcatcgaccagaagggggaggagaggagcagctgcatcagcggcaacaacttctcctggagcctgcagtggaatggcaaggagttcaccgcctggtacagcgacatggagacccccctgaaggccggccccttctggaggctgggcgtgtacatcgacttccctgggggcatcctgtccttctatggagtggagtatgacagcatgaccctggtgcacaagtttgcctgcaagttcagcgagcctgtgtatgctgccttctggctgagcaagaaggaaaatgccatcagaattgtggacctgggggaggagcctgagaagccagcccccagcctggtgggcacagccccctag

SEQ ID NO: 20463 - DNA, 1047 bp, synthetic construct; identical to SEQ ID NO: 20462
  source 1..1047: mol_type = other DNA; note = Synthetic coding sequence

SEQ ID NO: 20464 - DNA, 687 bp, synthetic construct
  source 1..687: mol_type = other DNA; note = Synthetic coding sequence
atgattgatgacagcaccagggtgcccctgggcaagagcaaggactacatcaatgccagctacatccgcatcgtgaactgtggggaggagtacttctacatcgccacccagggccccctgctgagcaccattgatgacttctggcagatggtgctggagaacaacagcaatgtgattgccatgatcacccgggagattgagggcggcatcatcaagtgctaccactactggcccatcagcctgaagaagcccctggagctgaagcacttccgggtcttcctggagaactaccagatcctgcagtacttcatcatccgcatgttccaggtggtggagaagagcacaggcaccagccacagcgtgaagcagctgcagttcaccaagtggccagaccacggcaccccagccagcgctgacagcttcatcaagtacatccgctatgccaggaagagccacctgaccggccccatggtggtgcactgcagcgctggcattggaagaactggagtcttcctgtgtgtggatgtggtgttctgtgccatcgtgaagaactgcagcttcaacatcatggacatcgtggcccagatgagggagcagaggagcggcatggtgcagaccaaggagcagtaccacttctgctatgacatcgtgctggaggtgctgaggaagctgctgaccctggactag

SEQ ID NO: 20465 - DNA, 1449 bp, synthetic construct; identical to SEQ ID NO: 19534
  source 1..1449: mol_type = other DNA; note = Synthetic coding sequence

SEQ ID NO: 20466 - DNA, 1020 bp, synthetic construct; identical to SEQ ID NO: 19098
  source 1..1020: mol_type = other DNA; note = Synthetic coding sequence

SEQ ID NO: 20467 - DNA, 621 bp, synthetic construct; identical to SEQ ID NO: 20459
  source 1..621: mol_type = other DNA; note = Synthetic coding sequence

SEQ ID NO: 20468 - DNA, 438 bp, synthetic construct; identical to SEQ ID NO: 20460
  source 1..438: mol_type = other DNA; note = Synthetic coding sequence

SEQ ID NO: 20469 - DNA, 687 bp, synthetic construct; identical to SEQ ID NO: 20464
  source 1..687: mol_type = other DNA; note = Synthetic coding sequence

SEQ ID NO: 20470 - DNA, 2802 bp, synthetic construct
  source 1..2802: mol_type = other DNA; note = Synthetic coding sequence
atgttctggaagtttgacctgaacaccaccagccacgtggacaagctgctggacaaggagcacgtgaccctgcaggagctgatggatgaagatgacatcctgcaggagtgcaaggcccagaaccagaagctgctggacttcctgtgccggcagcagtgcatggaggagctggtgtccctcatcacccaggacccccccctggacatggaggagaaggtgcgcttcaagtaccccaacacagcctgtgagctgctgacctgtgatgtgccccagatcagtgaccggctgggcggagatgagagcctgctgagcctgctgtatgacttcctggaccacgagccccccctgaaccccctgctggccagcttcttcagcaagaccatcggcaacctgattgccaggaagacagagcaggtgatcaccttcctgaagaagaaggacaagttcatcagcctggtgctgaagcacatcggcaccagcgccctgatggacctgctgctgcggctggtgtcctgtgtggagcccgccggcctgcggcaggatgtgctgcactggctgaatgaggagaaggtgatccagaggctggtggagctgatccaccccagccaggatgaagatcggcagagcaatgccagccagaccctgtgtgacatcgtgcggctgggccgggaccagggcagccagctgcaggaggccctggagccagaccccctgctgacagccctggagagccggcaggactgtgtggagcagctgctgaagaacatgtttgatggagacagaacagagagctgcctggtgtctggcacccaggtgctgctgaccctgctggagacccggcgggtgggcacagagggcctggtggacagcttcagccagggcctggagaggagctatgctgtgagcagctctgtgctgcatggaattgagccccggctgaaggacttccaccagctgctgctgaacccccccaagaagaaggccatcctgaccaccatcggcgtgctggaggagcccctgggcaatgcccggctgcacggggcccggctgatggccgccctgctgcacaccaacacccccagcatcaaccaggagctgtgccgcctgaacaccatggacctgctgctggacctcttcttcaagtacacctggaacaacttcctgcacttccaggtggagctgtgcatcgccgccatcctgagccatgctgcccgggaggagaggacagaggccagcggcagcgagagccgggtggagccccctcatgaaaatggaaacagaagcctggagaccccccagcctgctgccagcctgcctgacaacaccatggtgacccacctgttccagaagtgctgcctggtgcagaggatcctggaggcctgggaggccaatgaccacacccaggccgccggcggcatgaggcggggcaacatgggccacctgacccgcatcgccaatgctgtggtgcagaacctggagcggggccctgtgcagacccacatcagcgaggtgatccggggcctgcctgctgactgccggggccgctgggagagctttgtggaggagaccctgacagagaccaacagaagaaacacagtggacctggccttcagtgactaccagatccagcagatgacagccaactttgtggaccagtttggcttcaatgatgaggagtttgctgaccaggatgacaacatcaatgccccctttgacagaattgctgagatcaacttcaacattgatgctgatgaggacagccccagcgctgccctgtttgaggcctgctgcagcgaccgcatccagccctttgatgatgatgaagatgaggacatctgggaggacagcgacacccgctgtgccgcccgggtgatggcccggcccaggtttggagccccccacgccagcgagagctgcagcaagaatggacctgagcggggcggccaggacggcaaggccagcctggaggcccacagagatgcccctggggccggggcccccccagcccctgggaagaaggaggcccctcctgtggagggggacagcgagggcgccatgtggacagctgtgtttgatgagcccgccaacagcacccccacagcccctggggtggtgagagatgtgggcagctctgtgtgggccgccggcaccagcgcccctgaggagaagggctgggccaagttcacagacttccagcccttctgctgcagcgagagcggcccccgctgcagcagccctgtggacacagagtgcagccacgccgagggcagccgcagccagggccctgagaaggccttcagccctgccagcccctgtgcctggaatgtgtgtgtgaccaggaaggcccccctgctggccagtgacagcagcagcagcggcggcagccacagtgaagatggagaccagaaggccgccagcgccatggatgctgtgtcccggggccctggccgggaggccccacccctgcccaccgtggccaggacagaggaggccgtgggccgggtgggctgtgccgacagccggctgctgagccctgcctgcccagcccccaaggaggtgacagctgccccagctgtggccgtgcccccagaggccaccgtggccatcaccacagccctgagcaaggccggccctgccatccccaccccagctgtgtcctctgccctggccgtggccgtgcccctgggccccatcatggctgtgacagctgccccagccatggtggccaccctgggcaccgtgaccaaggatggcaagacagatgcccctcctgagggcgccgccctgaatggacctgtgtag

SEQ ID NO: 20471 - DNA, 2799 bp, synthetic construct
  source 1..2799: mol_type = other DNA; note = Synthetic coding sequence
atgttctggaagtttgacctgaacaccaccagccacgtggacaagctgctggacaaggagcacgtgaccctgcaggagctgatggatgaagatgacatcctgcaggagtgcaaggcccagaaccagaagctgctggacttcctgtgccggcagcagtgcatggaggagctggtgtccctcatcacccaggacccccccctggacatggaggagaaggtgcgcttcaagtaccccaacacagcctgtgagctgctgacctgtgatgtgccccagatcagtgaccggctgggcggagatgagagcctgctgagcctgctgtatgacttcctggaccacgagccccccctgaaccccctgctggccagcttcttcagcaagaccatcggcaacctgattgccaggaagacagagcaggtgatcaccttcctgaagaagaaggacaagttcatcagcctggtgctgaagcacatcggcaccagcgccctgatggacctgctgctgcggctggtgtcctgtgtggagcccgccggcctgcggcaggatgtgctgcactggctgaatgaggagaaggtgatccagaggctggtggagctgatccaccccagccaggatgaagatcggcagagcaatgccagccagaccctgtgtgacatcgtgcggctgggccgggaccagggcagccagctgcaggaggccctggagccagaccccctgctgacagccctggagagccaggactgtgtggagcagctgctgaagaacatgtttgatggagacagaacagagagctgcctggtgtctggcacccaggtgctgctgaccctgctggagaccaggagagtgggcacagagggcctggtggacagcttcagccagggcctggagaggagctatgctgtgagcagctctgtgctgcacggcatcgagccccggctgaaggacttccaccagctgctgctgaacccccccaagaagaaggccatcctgaccaccatcggcgtgctggaggagcccctgggcaatgcccggctgcatggagcccggctgatggccgccctgctgcacaccaacacccccagcatcaaccaggagctgtgccgcctgaacaccatggacctgctgctggacctcttcttcaagtacacctggaacaacttcctgcacttccaggtggagctgtgcatcgccgccatcctgagccacgccgcccgggaggagaggacagaggccagcggcagcgagagccgggtggagccccctcatgaaaatggaaacagaagcctggagaccccccagcctgctgccagcctgcctgacaacaccatggtgacccacctgttccagaagtgctgcctggtgcagaggatcctggaggcctgggaggccaatgaccacacccaggccgccggcggcatgagaagaggcaacatgggccacctgaccagaattgccaatgctgtggtgcagaacctggagcggggccctgtgcagacccacatcagcgaggtgatccggggcctgcctgctgactgccggggccgctgggagagctttgtggaggagaccctgacagagaccaacagaagaaacacagtggacctggccttcagtgactaccagatccagcagatgacagccaactttgtggaccagtttggcttcaatgatgaggagtttgctgaccaggatgacaacatcaatgccccctttgacagaattgctgagatcaacttcaacattgatgctgatgaggacagccccagcgctgccctgtttgaggcctgctgcagcgaccgcatccagccctttgatgatgatgaagatgaggacatctgggaggacagcgacacccgctgtgccgcccgggtgatggcccggcccaggtttggagcccctcatgccagcgagagctgcagcaagaatggacctgagcggggcggccaggacggcaaggccagcctggaggcccacagagatgcccctggagctggggcccccccagcccctgggaagaaggaggcccctcctgtggagggggacagcgagggcgccatgtggacagctgtgtttgatgagcccgccaacagcacccccacagcccctggggtggtgagagatgtgggcagctctgtgtgggccgccggcaccagcgcccctgaggagaagggctgggccaagttcacagacttccagcccttctgctgcagcgagagcggcccccgctgcagcagccctgtggacacagaatgttctcatgctgagggcagccgcagccagggccctgagaaggccttctccccagccagcccctgtgcctggaatgtgtgtgtgaccaggaaggcccccctgctggccagtgacagcagcagcagcggcggcagccacagtgaagatggagaccagaaggccgccagcgccatggatgctgtgtcccggggccctggccgggaggccccacccctgcccaccgtggccaggacagaggaggccgtgggccgggtgggctgtgccgacagccggctgctgagccctgcctgcccagcccccaaggaggtgacagctgccccagctgtggccgtgcccccagaggccaccgtggccatcaccacagccctgagcaaggccggccctgccatccccaccccagctgtgagcagcgccctggccgtggccgtgcccctgggccccatcatggctgtgacagctgccccagccatggtggccaccctgggcaccgtgaccaaggatggcaagacagatgcccctcctgagggcgccgccctgaatggacctgtgtag

SEQ ID NO: 20472 - DNA, 789 bp, synthetic construct; identical to SEQ ID NO: 19488
  source 1..789: mol_type = other DNA; note = Synthetic coding sequence

SEQ ID NO: 20473 - DNA, 2718 bp, synthetic construct
  source 1..2718: mol_type = other DNA; note = Synthetic coding sequence
atggaggtgcaggtgtcccaggccagcctgggctttgagctgacctctgtggagaagagcctgcgggagtggagccggctgagccgggaggtgattgcctggctgtgccccagcagccccaacttcatcctgaacttccccccacctccttctgccagctctgtgtccatggtgcagctgttcagcagccccttcggctaccagagccccagcggccacagcgaggaggagcgggagggcaacatgaagagcgccaagccccaggtgaaccacagccagcacggggagagccagagggccctgagccccctgcagagcaccctgagcagcgctgccagccccagccaggcctatgagacctacattgaaaatggcctcatctgcctgaagcacaagatccggaacatcgagaagaagaagctgaagctggaggactacaaggaccggctgaagagcggggagcacctgaacccagaccagctggaggccgtggagaagtatgaggaggtgctgcacaacctggagtttgccaaggagctgcagaagaccttcagcggcctgagcctggacctgctgaaggcccagaagaaggcccagaggcgggagcacatgctgaagctggaggccgagaagaagaagctgcggaccatcctgcaggtgcagtatgtgctgcagaacctgacccaggagcacgtgcagaaggacttcaagggcggcctgaatggagctgtgtacctgcccagcaaggagctggactacctgatcaagttcagcaagctgacctgcccagagagaaatgaaagcctgtctgtggaggaccagatggagcagagcagcctgtacttctgggacctgctggagggcagcgagaaggctgtggtgggcaccacctacaagcacctgaaggacctgctgagcaagctgctgaacagcggctactttgagagcatccctgtgcccaagaatgccaaggagaaggaggtgcccctggaggaggagatgctgatccagagcgagaagaagacccagctgagcaagacagaatctgtgaaggagagcgagagcctgatggagtttgcccagcctgagatccagccccaggagttcctgaacagacgctacatgacagaggtggactacagcaacaagcagggcgaggagcagccctgggaggccgactatgccaggaagcccaacctgcccaagcgctgggacatgctgacagagccagatggccaggagaagaagcaggagagcttcaagtcctgggaggccagcggcaagcaccaggaggtgtccaagccagctgtgtccctggagcagaggaagcaggacaccagcaagctgcggagcaccctgcctgaggagcagaagaagcaggagatcagcaagagcaagcccagccccagccagtggaagcaggacacccccaagagcaaggccggctacgtgcaggaggagcagaagaagcaggagacccccaagctgtggcctgtgcagctgcagaaggagcaggaccccaagaagcagacccccaagtcctggacccccagcatgcagagcgagcagaacaccaccaagtcctggaccacccccatgtgtgaggagcaggacagcaagcagcctgagacccccaagtcctgggagaacaacgtggagagccagaagcacagcctgaccagccagagccagatcagccccaagtcctggggcgtggccacagccagcctcatccccaatgaccagctgctgcccaggaagctgaacacagagcccaaggatgtgcccaagcctgtgcaccagcctgtgggcagcagcagcaccctgcccaaggaccctgtgctgaggaaggagaagctgcaggacctgatgacccagatccagggcacctgcaacttcatgcaggagagcgtgctggactttgacaagcccagcagcgccatccccaccagccagcccccatctgccaccccaggcagccctgtggccagcaaggagcagaacctgagcagccagagcgacttcctgcaggagcccctgcaggccgccatccccccaggcaagcagcccagcagcctggccagccccaacccccccatggccaagggcagcgagcagggcttccagagccccccagccagcagcagctctgtgaccatcaacacagcccccttccaggccatgcagaccgtcttcaacgtgaatgcccccctgccccccaggaaggagcaggagatcaaggagagcccctacagccctggctacaaccagagcttcaccacagccagcacccagaccccaccccagtgccagctgcccagcatccacgtggagcagacagtgcacagccaggagacagcccagaccaacgtgttcccccggcccacccagccctttgtgaacagccggggctctgtgcggggctgcacccggggcggccgcctcatcaccaacagctaccgcagccctgggggctacaagggctttgacacctaccggggcctgcccagcatcagcaatggaaactacagccagctgcagttccaggcccgggagtacagcggggccccctacagccagagggacaacttccagcagtgctacaagagaggaggcaccagcggcggcccccgggccaacagccgggccaactgcttcatcatgaggaacagcctgctgctgatcaagcagcagggcggcgtcatcctgctgaggtag

SEQ ID NO: 20474 - DNA, 1107 bp, synthetic construct; identical to SEQ ID NO: 19823
  source 1..1107: mol_type = other DNA; note = Synthetic coding sequence

SEQ ID NO: 20475 - DNA, 1107 bp, synthetic construct; identical to SEQ ID NO: 19823
  source 1..1107: mol_type = other DNA; note = Synthetic coding sequence

SEQ ID NO: 20476 - DNA, 2745 bp, synthetic construct
  source 1..2745: mol_type = other DNA; note = Synthetic coding sequence
atgagcagcagcggctacccacccaaccagggcgccttcagcacagagcagagccgctacccaccccacagcgtgcagtacaccttccccaacaccaggcaccagcaggaccctgccttcggcggcaagcatgaggcccccagcagccccatcagcggccagccctgtggagatgaccagaatgccagccccagcaagctgagcaaggaggagctgatccagagcatggacagagtggaccgggagatcgccaaggtggagcagcagatcctgaagctgaagaagaagcagcagcagctggaggaggaggccgccaagcccccagagcctgagaagcctgtgagccccccacctgtggagcagaagcacaggagcatcgtgcagatcatctatgatgaaaataggaagaaggccgaggaggcccacaagatctttgagggcctgggccccaaggtggagctgcccctgtacaaccagcccagcgacaccaaggtgtaccacgagaacatcaagaccaaccaggtgatgaggaagaagctgatcctcttcttcaagagaagaaatcatgccaggaagcagcgggagcagaagatctgccagagatatgaccagctgatggaggcctgggagaagaaggtggacagaattgagaacaaccccaggaggaaggccaaggagagcaagacccgggagtactatgagaagcagtttcctgagatcaggaagcagcgggagcagcaggagcgcttccagagggtgggccagagaggagctggcctgagcgccaccatcgcccggagtgaacatgagatcagcgagatcattgatggcctgtctgagcaggagaacaatgagaagcagatgaggcagctgagcgtcatcccccccatgatgtttgatgctgagcagaggagagtgaagttcatcaacatgaatggcctgatggaggaccccatgaaggtgtacaaggaccggcagttcatgaatgtgtggacagaccacgagaaggagatcttcaaggacaagttcatccagcaccccaagaactttggcctgattgccagctacctggagaggaagtctgtgcctgactgtgtgctgtactactacctgaccaagaagaatgaaaactacaaggccctggtgagaagaaactacggcaagagaagaggaagaaaccagcagatcgcccggcccagccaggaggagaaggtggaggagaaggaggaggacaaggccgagaagacagagaagaaggaggaggagaagaaggatgaggaggagaaggatgagaaggaggacagcaaagaaaacaccaaggagaaggacaagattgatggaacagctgaggagacagaggagcgggagcaggccaccccccggggcaggaagacagccaacagccagggccgcaggaagggccgcatcaccaggtccatgaccaatgaggccgccgccgccagcgctgctgctgctgctgccacagaggagcccccaccacccctgcccccacctcctgagcccatcagcacagagcctgtggagaccagccgctggacagaggaggagatggaggtggccaagaagggcctggtggagcacggcaggaactgggccgccatcgccaagatggtgggcaccaagtctgaggcccagtgcaagaacttctacttcaactacaagaggaggcacaacctggacaacctgctgcagcagcacaagcagaagaccagcaggaagccccgggaggagagagatgtgtcccagtgtgagagcgtggccagcacagtgtctgcccaggaggatgaagatattgaggccagcaatgaggaggagaacccagaagattctgagggcgctgagaacagcagtgacacagagagcgcccccagccccagccctgtggaggccgtgaagcccagcgaggacagcccagaaaatgccaccagccggggcaacacagagcctgctgtggagctggagcccaccacagaaacagcccccagcaccagccccagcctggccgtgcccagcaccaagccagcagaagatgagagcgtggagacccaggtgaatgacagcatctctgctgagacagctgagcagatggatgtggaccagcaggagcacagcgctgaggagggctctgtgtgtgaccccccaccagccaccaaggctgacagcgtggatgtggaggtgcgggtgcctgaaaatcatgccagcaaggtggagggggacaacaccaaggagcgggacctggaccgggccagcgagaaggtggagcccagagatgaggacctggtggtggcccagcagatcaatgcccagaggcctgagccccagagcgacaatgacagcagcgccacctgcagcgcagatgaagatgtggatggagagcctgagcggcagaggatgttccccatggacagcaagcccagcctgctgaaccccaccggcagcatcctggtgagcagccccctgaagcccaaccccctggacctgccccagctgcagcacagagctgctgtgattcctcccatggtgtcctgcaccccctgcaacatccccatcggcacccctgtgtctggctacgccctgtaccagaggcacatcaaggccatgcatgaaagtgccctgctggaggagcagaggcagaggcaggagcagattgacctggagtgccgcagcagcaccagcccctgtggcaccagcaagagccccaaccgggagtgggagggccgctag

SEQ ID NO: 20477 - DNA, 7032 bp, synthetic construct
  source 1..7032: mol_type = other DNA; note = Synthetic coding sequence
atgagcagcagcggctacccacccaaccagggcgccttcagcacagagcagagccgctacccaccccacagcgtgcagtacaccttccccaacaccaggcaccagcaggaccctgccttcggcggcaagcatgaggcccccagcagccccatcagcggccagccctgtggagatgaccagaatgccagccccagcaagctgagcaaggaggagctgatccagagcatggacagagtggaccgggagatcgccaaggtggagcagcagatcctgaagctgaagaagaagcagcagcagctggaggaggaggccgccaagcccccagagcctgagaagcctgtgagccccccacctgtggagcagaagcacaggagcatcgtgcagatcatctatgatgaaaataggaagaaggccgaggaggcccacaagatctttgagggcctgggccccaaggtggagctgcccctgtacaaccagcccagcgacaccaaggtgtaccacgagaacatcaagaccaaccaggtgatgaggaagaagctgatcctcttcttcaagagaagaaatcatgccaggaagcagcgggagcagaagatctgccagagatatgaccagctgatggaggcctgggagaagaaggtggacagaattgagaacaaccccaggaggaaggccaaggagagcaagacccgggagtactatgagaagcagtttcctgagatcaggaagcagcgggagcagcaggagcgcttccagagggtgggccagagaggagctggcctgagcgccaccatcgcccggagtgaacatgagatcagcgagatcattgatggcctgtctgagcaggagaacaatgagaagcagatgaggcagctgagcgtcatcccccccatgatgtttgatgctgagcagaggagagtgaagttcatcaacatgaatggcctgatggaggaccccatgaaggtgtacaaggaccggcagttcatgaatgtgtggacagaccacgagaaggagatcttcaaggacaagttcatccagcaccccaagaactttggcctgattgccagctacctggagaggaagtctgtgcctgactgtgtgctgtactactacctgaccaagaagaatgaaaactacaaggccctggtgagaagaaactacggcaagagaagaggaagaaaccagcagatcgcccggcccagccaggaggagaaggtggaggagaaggaggaggacaaggccgagaagacagagaagaaggaggaggagaagaaggatgaggaggagaaggatgagaaggaggacagcaaagaaaacaccaaggagaaggacaagattgatggaacagctgaggagacagaggagcgggagcaggccaccccccggggcaggaagacagccaacagccagggccgcaggaagggccgcatcaccaggtccatgaccaatgaggccgccgccgccagcgctgctgctgctgctgccacagaggagcccccaccacccctgcccccacctcctgagcccatcagcacagagcctgtggagaccagccgctggacagaggaggagatggaggtggccaagaagggcctggtggagcacggcaggaactgggccgccatcgccaagatggtgggcaccaagtctgaggcccagtgcaagaacttctacttcaactacaagaggaggcacaacctggacaacctgctgcagcagcacaagcagaagaccagcaggaagccccgggaggagagagatgtgtcccagtgtgagagcgtggccagcacagtgtctgcccaggaggatgaagatattgaggccagcaatgaggaggagaacccagaagattctgagggcgctgagaacagcagtgacacagagagcgcccccagccccagccctgtggaggccgtgaagcccagcgaggacagcccagaaaatgccaccagccggggcaacacagagcctgctgtggagctggagcccaccacagaaacagcccccagcaccagccccagcctggccgtgcccagcaccaagccagcagaagatgagagcgtggagacccaggtgaatgacagcatctctgctgagacagctgagcagatggatgtggaccagcaggagcacagcgctgaggagggctctgtgtgtgaccccccaccagccaccaaggctgacagcgtggatgtggaggtgcgggtgcctgaaaatcatgccagcaaggtggagggggacaacaccaaggagcgggacctggaccgggccagcgagaaggtggagcccagagatgaggacctggtggtggcccagcagatcaatgcccagaggcctgagccccagagcgacaatgacagcagcgccacctgcagcgcagatgaagatgtggatggagagcctgagcggcagaggatgttccccatggacagcaagcccagcctgctgaaccccaccggcagcatcctggtgagcagccccctgaagcccaaccccctggacctgccccagctgcagcacagagctgctgtgattcctcccatggtgtcctgcaccccctgcaacatccccatcggcacccctgtgtctggctacgccctgtaccagaggcacatcaaggccatgcatgaaagtgccctgctggaggagcagaggcagaggcaggagcagattgacctggagtgccgcagcagcaccagcccctgtggcaccagcaagagccccaaccgggagtgggaggtgctgcagcctgccccccaccaggtgatcaccaacctgcctgagggcgtgcggctgcccaccacccggcccaccaggcctcctcctcctctcatccccagcagcaagaccaccgtggccagcgagaagcccagcttcatcatgggcggcagcatcagccagggcaccccaggcacctacctgaccagccacaaccaggccagctacacccaggagacccccaagcccagcgtgggcagcatcagcctgggcctgccccggcagcaggagagcgccaagagcgccaccctgccctacatcaagcaggaggagttcagccccaggagccagaacagccagcctgagggcctgctggtgcgggcccagcatgaaggagtggtgcggggcacagctggggccatccaggagggcagcatcacccggggcacccccaccagcaagatctctgtggagagcatccccagcctgcggggcagcatcacccagggcaccccagccctgccccagacaggcatccccacagaggccctggtgaagggcagcatcagcaggatgcccatcgaggacagcagccctgagaagggccgggaggaggccgccagcaagggccacgtgatctatgagggcaagagcggccacatcctgtcctatgacaacatcaagaatgcccgggagggcaccaggagccccaggacagcccacgagatcagcctgaagaggagctatgagagcgtggagggcaacatcaagcagggcatgtccatgagggagagccctgtgtctgcccccctggagggcctcatctgccgggccctgccccggggcagcccccacagcgacctgaaggagaggacagtgctgagcggcagcatcatgcagggcaccccccgggccaccacagagagctttgaagatggcctgaagtaccccaagcagatcaagcgggagagcccccccatccgggcctttgaaggagccatcaccaagggcaagccctatgatggcatcaccaccatcaaggagatgggccgcagcatccacgagatcccccggcaggacatcctgacccaggagagcaggaagaccccagaggtggtgcagagcacccggcccatcatcgagggcagcatcagccagggcacccccatcaagtttgacaacaacagcggccagagcgccatcaagcacaacgtgaagagcctcatcaccggccccagcaagctgagccggggcatgccacccctggagatcgtgcctgagaacatcaaggtggtggagcggggcaagtatgaagatgtgaaggccggggagaccgtgcgcagccgccacacctctgtggtgagcagcggccccagcgtgctgcggagcaccctgcacgaggcccccaaggcccagctgagccctggcatctatgatgacaccagcgcccggaggacccctgtgtcctaccagaacaccatgagccggggcagccccatgatgaacagaacatctgatgtgagcagcaacaagagcaccaaccacgagaggaagagcaccctgacccccacccagcgggagagcatcccagccaagagccctgtgcctggggtggaccctgtggtgagccacagcccctttgacccccaccaccggggcagcacagctggggaggtgtaccgcagccacctgcccacccacctggaccctgccatgcccttccaccgggccctggaccctgctgctgcctacctgttccagaggcagctgagccccaccccaggctaccccagccagtaccagctgtatgccatggagaacacccggcagaccatcctgaatgactacatcaccagccagcagatgcaggtgaacctgcggccagatgtggcccggggcctgagcccccgggagcagcccctgggcctgccctacccagccacccggggcatcatcgacctgaccaacatgccacccaccatcctggtgccccaccctgggggcaccagcaccccacccatggaccgcatcacctacatccctggcacccagatcaccttccccccccggccctacaacagcgcctccatgagccctggccaccccacccacctggccgctgctgccagcgctgagcgggagcgggagcgggagcgggagaaggagcgggagcgggagagaattgctgctgccagcagtgacctgtacctgcggcccggcagcgagcagcccggccggcccggcagccacggctacgtgcgcagccccagccccagcgtgaggacccaggagaccatgctgcagcagaggccttctgtgttccagggcaccaacggcaccagcgtcatcacccccctggaccccacagcccagctgcgcatcatgcccctgcctgctgggggccccagcatcagccagggcctgcctgccagccgctacaacacagctgctgatgccctggccgccctggtggatgctgctgccagcgccccccagatggatgtgtccaagaccaaggagagcaagcatgaggccgcccggctggaggagaacctgcggagccgctctgctgctgtgtctgagcagcagcagctggagcagaagaccctggaggtggagaagaggtctgtgcagtgcctgtacaccagcagcgccttccccagcggcaagccccagccccacagctctgtggtgtacagcgaggccggcaaggacaagggccccccacccaagagccgctatgaggaggagctgcggacccggggcaagaccaccatcacagctgccaacttcattgatgtgatcatcacccggcagatcgccagtgacaaggatgcccgggagcggggcagccagagcagtgacagcagcagcagcctgagcagccacagatatgagacccccagtgatgccattgaagtcatcagccctgccagcagccctgccccaccccaggagaagctgcagacctaccagcctgaggtggtgaaggccaaccaggctgaaaatgaccccacccggcagtatgagggccccctgcaccactaccggccccagcaggagagccccagcccccagcagcagctgccccccagcagccaggccgagggcatgggccaggtgcccaggacccacaggctcatcaccctggccgaccacatctgccagatcatcacccaggactttgccaggaaccaggtgagcagccagaccccccagcagccccccaccagcaccttccagaacagccccagcgccctggtgtccacccctgtgaggaccaagaccagcaaccgctacagccctgagagccaggcccagagcgtgcaccaccagaggcctggcagccgggtgtccccagagaacctggtggacaagagccggggcagcaggcctgggaagagccctgagaggagccacgtgagcagcgagccctatgagcccatcagccccccccaggtgcctgtggtgcatgagaagcaggacagcctgctgctgctgagccagagaggagctgagcctgctgagcagagaaatgatgcccggagccctggcagcatctcctacctgcccagcttcttcaccaagctggagaacaccagccccatggtgaagagcaagaagcaggagatcttcaggaagctgaacagcagcggcggcggggacagcgacatggccgccgcccagcctggaacagagatcttcaacctgcctgctgtgaccaccagcggctctgtgagcagccggggccacagctttgctgaccctgccagcaacctgggcctggaggacatcatcaggaaggccctgatgggcagctttgatgacaaggtggaggaccacggcgtggtgatgagccagcccatgggcgtggtgcccggcacagccaacacctctgtggtgaccagcggggagacccggcgggaggagggggaccccagcccccacagcggcgtgtgcaagcccaagctgatcagcaagagcaacagcaggaagagcaagagccccatccctggccagggctacctgggcacagagcggcccagctctgtgtcctctgtgcacagcgagggggactaccaccggcagaccccaggctgggcctgggaggaccggcccagcagcacaggcagcacccagttcccctacaaccccctgaccatgaggatgctgagcagcaccccacccacccccatcgcctgtgcccccagcgctgtgaaccaggccgccccccaccagcagaaccgcatctgggagcgggagcccgcccccctgctgagcgcccagtatgagaccctgagtgacagtgatgactag

SEQ ID NO: 20478 - DNA, 7014 bp, synthetic construct
  source 1..7014: mol_type = other DNA; note = Synthetic coding sequence
atgagcagcagcggctacccacccaaccagggcgccttcagcacagagcagagccgctacccaccccacagcgtgcagtacaccttccccaacaccaggcaccagcaggagtttgctgtgcctgactaccgcagcagccacctggaggtgtcccaggccagccagctgctgcagcagcagcagcagcagcagctgcggcggcggcccagcctgctgtctgagttccaccctggcagtgaccggccccaggagaggaggaccagctatgagcccttccaccctggccccagccctgtggaccatgacagcctggagagcaagaggccccggctggagcaggtgtctgacagccacttccagagggtgtctgctgctgtgctgcccctggtgcaccccctgcctgagggcctgcgggccagcgcagatgccaagaaggaccctgcctttggaggcaagcatgaggcccccagcagccccatcagcggccagccctgtggagatgaccagaatgccagccccagcaagctgagcaaggaggagctgatccagagcatggacagagtggaccgggagatcgccaaggtggagcagcagatcctgaagctgaagaagaagcagcagcagctggaggaggaggccgccaagcccccagagcctgagaagcctgtgtccccacctcctgtggagcagaagcacaggagcatcgtgcagatcatctatgatgagaacaggaagaaggccgaggaggcccacaagatctttgagggcctgggccccaaggtggagctgcccctgtacaaccagcccagcgacaccaaggtgtaccacgagaacatcaagaccaaccaggtgatgaggaagaagctgatcctcttcttcaagagaagaaaccacgccaggaagcagcgggagcagaagatctgccagagatatgaccagctgatggaggcctgggagaagaaggtggacagaattgagaacaaccccaggaggaaggccaaggagagcaagacccgggagtactatgagaagcagtttcctgagatcaggaagcagcgggagcagcaggagcgcttccagagggtgggccagagaggagctggcctgagcgccaccatcgcccggtctgagcacgagatcagcgagatcattgatggcctgtctgagcaggagaacaatgagaagcagatgaggcagctgagcgtcatcccccccatgatgtttgatgctgagcagaggagagtgaagttcatcaacatgaatggcctgatggaggaccccatgaaggtgtacaaggaccggcagttcatgaatgtgtggacagaccacgagaaggagatcttcaaggacaagttcatccagcaccccaagaactttggcctcatcgccagctacctggagaggaagtctgtgcctgactgtgtgctgtactactacctgaccaagaagaatgaaaactacaaggccctggtgagaagaaattatggcaagaggcggggcaggaaccagcagatcgcccggcccagccaggaggagaaggtggaggagaaggaggaggacaaggccgagaagacagagaagaaggaggaggagaagaaggatgaggaggagaaggatgagaaggaggacagcaaggagaacaccaaggagaaggacaagattgatggaacagctgaggagacagaggagcgggagcaggccaccccccggggcaggaagacagccaacagccagggccgcaggaagggccgcatcaccaggtccatgaccaatgaagctgctgctgccagcgctgctgctgctgctgccacagaggagcccccaccacccctgcccccacctcctgagcccatcagcacagagcctgtggagaccagccgctggacagaggaggagatggaggtggccaagaagggcctggtggagcacggcaggaactgggccgccatcgccaagatggtgggcaccaagtctgaggcccagtgcaagaacttctacttcaactacaagagaagacacaacctggacaacctgctgcagcagcacaagcagaagaccagcaggaagccccgggaggagagagatgtgtcccagtgtgagagcgtggccagcacagtgtctgcccaggaggatgaggacatcgaggccagcaatgaggaggagaaccctgaggacagcgagggcgctgagaacagcagtgacacagaaagtgcccccagccccagccctgtggaggccgtgaagcccagcgaggacagcccagaaaatgccaccagccggggcaacacagagcctgctgtggagctggagcccaccacagaaacagcccccagcaccagccccagcctggccgtgcccagcaccaagccagcagaagatgaatctgtggagacccaggtgaatgacagcatctctgctgagacagctgagcagatggatgtggaccagcaggagcacagcgctgaggagggctctgtgtgtgaccccccaccagccaccaaggctgacagcgtggatgtggaggtgcgggtgcctgagaaccacgccagcaaggtggagggggacaacaccaaggagcgggacctggaccgggccagcgagaaggtggagcccagagatgaggacctggtggtggcccagcagatcaatgcccagaggcctgagccccagagcgacaatgacagcagcgccacctgcagcgcagatgaagatgtggatggagagcctgagcggcagaggatgttccccatggacagcaagcccagcctgctgaaccccaccggcagcatcctggtgagcagccccctgaagcccaaccccctggacctgccccagctgcagcacagagctgctgtgatcccccccatggtgtcctgcaccccctgcaacatccccatcggcacccctgtgtctggctacgccctgtaccagaggcacatcaaggccatgcatgagagcgccctgctggaggagcagaggcagaggcaggagcagattgacctggagtgccgcagcagcaccagcccctgtggcaccagcaagagccccaaccgggagtgggaggtgctgcagcctgccccccaccaggtgatcaccaacctgcctgagggcgtgcggctgcccaccacccggcccacccggcccccaccacccctcatccccagcagcaagaccaccgtggccagcgagaagcccagcttcatcatgggcggcagcatcagccagggcaccccaggcacctacctgaccagccacaaccaggccagctacacccaggagacccccaagcccagcgtgggcagcatcagcctgggcctgccccggcagcaggagagcgccaagagcgccaccctgccctacatcaagcaggaggagttcagccccaggagccagaacagccagcctgagggcctgctggtgcgggcccagcacgagggcgtggtgcggggcacagctggggccatccaggagggcagcatcacccggggcacccccaccagcaagatctctgtggagagcatccccagcctgcggggcagcatcacccagggcaccccagccctgccccagacaggcatccccacagaggccctggtgaagggcagcatcagcaggatgcccatcgaggacagcagccctgagaagggccgggaggaggccgccagcaaaggacatgtgatctatgagggcaagagcggccacatcctgtcctatgacaacatcaagaatgcccgggagggcaccaggagccccaggacagcccacgagatcagcctgaagaggagctatgaatctgtggagggcaacatcaagcagggcatgtccatgagggagagccctgtgtctgcccccctggagggcctcatctgccgggccctgccccggggcagcccccacagcgacctgaaggagaggacagtgctgagcggcagcatcatgcagggcaccccccgggccaccacagagagctttgaagatggcctgaagtaccccaagcagatcaagcgggagagcccccccatccgggcctttgagggcgccatcaccaagggcaagccctatgatggcatcaccaccatcaaggagatgggccgcagcatccacgagatcccccggcaggacatcctgacccaggagagcaggaagaccccagaggtggtgcagagcacccggcccatcatcgagggcagcatcagccagggcacccccatcaagtttgacaacaacagcggccagagcgccatcaagcacaacgtgaagagcctcatcaccggccccagcaagctgagccggggcatgccacccctggagatcgtgcctgagaacatcaaggtggtggagcggggcaagtatgaagatgtgaaggccggggagaccgtgcgcagccgccacacctctgtggtgagcagcggccccagcgtgctgcggagcaccctgcacgaggcccccaaggcccagctgagccctggcatctatgatgacaccagcgcccggaggacccctgtgtcctaccagaacaccatgagccggggcagccccatgatgaacagaacatctgatgtgaccatcagcagcaacaagagcaccaaccacgagaggaagagcaccctgacccccacccagcgggagagcatcccagccaagagccctgtgcctggggtggaccctgtggtgagccacagcccctttgacccccaccaccggggcagcacagctggggaggtgtaccgcagccacctgcccacccacctggaccctgccatgcccttccaccgggccctggaccctgctgctgctgcctacctgttccagaggcagctgagccccaccccaggctaccccagccagtaccagctgtatgccatggagaacacccggcagaccatcctgaatgactacatcaccagccagcagatgcaggtgaacctgcggccagatgtggcccggggcctgagcccccgggagcagcccctgggcctgccctacccagccacccggggcatcatcgacctgaccaacatgccacccaccatcctggtgccccaccctgggggcaccagcaccccacccatggaccgcatcacctacatccctggcacccagatcaccttccccccccggccctacaacagcgcctccatgagccctggccaccccacccacctggccgctgctgccagcgctgagcgggagcgggagcgggagcgggagaaggagcgggagcgggagagaattgctgctgccagcagtgacctgtacctgcggcccggcagcgagcagcccggccggcccggcagccacggctacgtgcgcagccccagccccagcgtgaggacccaggagaccatgctgcagcagaggccttctgtgttccagggcaccaacggcaccagcgtcatcacccccctggaccccacagcccagctgcgcatcatgcccctgcctgctgggggccccagcatcagccagggcctgcctgccagccgctacaacacagctgctgatgccctggccgccctggtggatgctgctgccagcgccccccagatggatgtgtccaagaccaaggagatcagcagccacagatatgagacccccagtgatgccatcgaggtgatcagccctgccagcagccctgccccaccccaggagaagctgcagacctaccagcctgaggtggtgaaggccaaccaggccgagaatgaccccacccggcagtatgagggccccctgcaccactaccggccccagcaggagagccccagcccccagcagcagctgccccccagcagccaggccgagggcatgggccaggtgcccaggacccacaggctcatcaccctggccgaccacatctgccagatcatcacccaggactttgccaggaaccaggtgagcagccagaccccccagcagccccccaccagcaccttccagaacagccccagcgccctggtgtccacccctgtgaggaccaagaccagcaaccgctacagccctgagagccaggcccagagcgtgcaccaccagaggcctggcagccgggtgtccccagagaacctggtggacaagagccggggcagcaggcctgggaagagccctgagaggagccacgtgtcctctgagccctatgagcccatcagccccccccaggtgcctgtggtgcatgagaagcaggacagcctgctgctgctgagccagagaggagctgagcctgctgagcagagaaatgatgcccggagccctggcagcatctcctacctgcccagcttcttcaccaagctggagaacaccagccccatggtgaagagcaagaagcaggagatcttcaggaagctgaacagcagcggcggcggggacagcgacatggctgctgcccagcccggcacagagatcttcaacctgcctgctgtgaccaccagcggctctgtgagcagccggggccacagctttgctgaccctgccagcaacctgggcctggaggacatcatcaggaaggccctgatgggcagctttgatgacaaggtggaggaccatggagtggtgatgagccagcccatgggcgtggtgcctggaacagccaacacctctgtggtgaccagcggggagacccggcgggaggagggggaccccagcccccacagcggaggagtgtgcaagcccaagctgatcagcaagagcaacagcaggaagagcaagagccccatccctggccagggctacctgggcacagagcggcccagctctgtgtcctctgtgcacagcgagggggactaccaccggcagaccccaggctgggcctgggaggaccggcccagcagcacaggcagcacccagttcccctacaaccccctgaccatgaggatgctgagcagcaccccacccacccccatcgcctgtgcccccagcgctgtgaaccaggccgccccccaccagcagaaccgcatctgggagcgggagcccgcccccctgctgagcgcccagtatgagaccctgagtgacagtgatgactag

SEQ ID NO: 20479 - DNA, 3075 bp, synthetic construct
  source 1..3075: mol_type = other DNA; note = Synthetic coding sequence
atgccacccctggagatcgtgcctgagaacatcaaggtggtggagcggggcaagtatgaagatgtgaaggccggggagaccgtgcgcagccgccacacctctgtggtgagcagcggccccagcgtgctgcggagcaccctgcacgaggcccccaaggcccagctgagccctggcatctatgatgacaccagcgcccggaggacccctgtgtcctaccagaacaccatgagccggggcagccccatgatgaacagaacatctgatgtgaccatcagcagcaacaagagcaccaaccacgagaggaagagcaccctgacccccacccagcgggagagcatcccagccaagagccctgtgcctggggtggaccctgtggtgagccacagcccctttgacccccaccaccggggcagcacagctggggaggtgtaccgcagccacctgcccacccacctggaccctgccatgcccttccaccgggccctggaccctgctgctgctgcctacctgttccagaggcagctgagccccaccccaggctaccccagccagtaccagctgtatgccatggagaacacccggcagaccatcctgaatgactacatcaccagccagcagatgcaggtgaacctgcggccagatgtggcccggggcctgagcccccgggagcagcccctgggcctgccctacccagccacccggggcatcatcgacctgaccaacatgccacccaccatcctggtgccccaccctgggggcaccagcaccccacccatggaccgcatcacctacatccctggcacccagatcaccttccccccccggccctacaacagcgcctccatgagccctggccaccccacccacctggccgctgctgccagcgctgagcgggagcgggagcgggagcgggagaaggagcgggagcgggagagaattgctgctgccagcagtgacctgtacctgcggcccggcagcgagcagcccggccggcccggcagccacggctacgtgcgcagccccagccccagcgtgaggacccaggagaccatgctgcagcagaggccttctgtgttccagggcaccaacggcaccagcgtcatcacccccctggaccccacagcccagctgcgcatcatgcccctgcctgctgggggccccagcatcagccagggcctgcctgccagccgctacaacacagctgctgatgccctggccgccctggtggatgctgctgccagcgccccccagatggatgtgtccaagaccaaggagagcaagcatgaggccgcccggctggaggagaacctgcggagccgctctgctgctgtgtctgagcagcagcagctggagcagaagaccctggaggtggagaagaggtctgtgcagtgcctgtacaccagcagcgccttccccagcggcaagccccagccccacagctctgtggtgtacagcgaggccggcaaggacaagggccccccacccaagagccgctatgaggaggagctgcggacccggggcaagaccaccatcacagctgccaacttcattgatgtgatcatcacccggcagatcgccagtgacaaggatgcccgggagcggggcagccagagcagtgacagcagcagcagcctgagcagccacagatatgagacccccagtgatgccattgaagtcatcagccctgccagcagccctgccccaccccaggagaagctgcagacctaccagcctgaggtggtgaaggccaaccaggctgaaaatgaccccacccggcagtatgagggccccctgcaccactaccggccccagcaggagagccccagcccccagcagcagctgccccccagcagccaggccgagggcatgggccaggtgcccaggacccacaggctcatcaccctggccgaccacatctgccagatcatcacccaggactttgccaggaaccaggtgagcagccagaccccccagcagccccccaccagcaccttccagaacagccccagcgccctggtgtccacccctgtgaggaccaagaccagcaaccgctacagccctgagagccaggcccagagcgtgcaccaccagaggcctggcagccgggtgtccccagagaacctggtggacaagagccggggcagcaggcctgggaagagccctgagaggagccacgtgagcagcgagccctatgagcccatcagccccccccaggtgcctgtggtgcatgagaagcaggacagcctgctgctgctgagccagagaggagctgagcctgctgagcagagaaatgatgcccggagccctggcagcatctcctacctgcccagcttcttcaccaagctggagaacaccagccccatggtgaagagcaagaagcaggagatcttcaggaagctgaacagcagcggcggcggggacagcgacatggccgccgcccagcctggaacagagatcttcaacctgcctgctgtgaccaccagcggctctgtgagcagccggggccacagctttgctgaccctgccagcaacctgggcctggaggacatcatcaggaaggccctgatgggcagctttgatgacaaggtggaggaccacggcgtggtgatgagccagcccatgggcgtggtgcccggcacagccaacacctctgtggtgaccagcggggagacccggcgggaggagggggaccccagcccccacagcggcggcgtgtgcaagcccaagctgatcagcaagagcaacagcaggaagagcaagagccccatccctggccagggctacctgggcacagagcggcccagctctgtgtcctctgtgcacagcgagggggactaccaccggcagaccccaggctgggcctgggaggaccggcccagcagcacaggcagcacccagttcccctacaaccccctgaccatgaggatgctgagcagcaccccacccacccccatcgcctgtgcccccagcgctgtgaaccaggccgccccccaccagcagaaccgcatctgggagcgggagcccgcccccctgctgagcgcccagtatgagaccctgagtgacagtgatgactag

SEQ ID NO: 20480 - DNA, 4821 bp, synthetic construct
  source 1..4821: mol_type = other DNA; note = Synthetic coding sequence
atgctgctgcacctgtgcagcgtgaagaacctgtaccagaaccgcttcctgggcctggccgccatggccagccccagcaggaacagccagagcagaagacgctgcaaggagcccctgcgctacagctacaacccagaccagttccacaacatggacctgcggggcggcccccatgatggagtgaccatccccaggagcaccagtgacacagacctggtgaccagtgacagccgcagcaccctgatggtgagcagcagctactacagcatcggccacagccaggacctggtgatccactgggacatcaaggaggaggtggatgctggggactggattggcatgtacctgattgatgaggtgctgtctgagaacttcctggactacaagaacagaggagtgaatggcagccaccggggccagatcatctggaagattgatgccagcagctactttgtggagcctgagaccaagatctgcttcaagtactaccacggcgtgtctggggccctgcgggccaccacccccagcgtgacagtgaagaacagcgctgcccccatcttcaagagcatcggggctgatgaaacagtgcagggccagggcagccggcggctcatctccttcagcctgagtgacttccaggccatgggcctgaagaagggcatgttcttcaacccagacccctacctgaagatcagcatccagcccgggaagcacagcatcttccctgccctgccccaccacggccaggagaggaggagcaagatcatcggcaacacagtgaaccccatctggcaggccgagcagttctcctttgtgtccctgcccacagatgtgctggagattgaggtgaaggacaagtttgccaagagccggcccatcatcaagcgcttcctgggcaagctgtccatgcctgtgcagaggctgctggagagacatgccatcggggacagagtggtgtcctacaccctgggccgccgcctgcccacagaccacgtgtctggccagctgcagttccgctttgagatcaccagcagcatccacccagatgatgaggagatcagcctgagcacagagcctgagagcgcccagatccaggacagccccatgaacaacctgatggagagcggcagcggggagcccaggtctgaggcccctgagagcagcgagagctggaagccagagcagctgggggagggctctgtgcctgatggccctggcaaccagagcattgagctgagcaggcctgctgaggaggccgccgtcatcacagaagctggggaccagggcatggtgtctgtgggccctgagggcgctggggagctgctggcccaggtgcagaaggacatccagcctgcccccagcgctgaggagctggccgagcagctggacctgggggaggaggccagcgccctgctgctggaggatggagaggccccagccagcaccaaggaggagcccctggaggaggaggccaccacccagagcagagctggccgggaggaggaggagaaggagcaggaggaggagggagatgtgtccaccctggagcagggcgagggccgcctgcagctgcgggcctctgtgaagaggaagagccggccctgcagcctgcctgtgtctgagctggagaccgtcatcgccagcgcctgtggggaccctgagacccccaggacccactacatccgcatccacaccctgctgcacagcatgcccagcgcccagggcggcagcgctgctgaggaggaggatggagctgaggaggagagcaccctgaaggacagcagcgagaaggatggcctgtctgaggtggacacagtggccgctgaccccagcgccctggaggaggaccgggaggagcctgagggcgccaccccaggcacagcccaccctggccacagcggcggccacttccccagcctggccaacggggccgcccaggatggagacacccaccccagcacaggcagcgagagtgacagcagcccccggcagggcggggaccacagctgtgagggctgtgatgccagctgctgcagccccagctgctacagcagcagctgctacagcaccagctgctacagcagcagctgctacagcgccagctgctacagccccagctgctacaatggaaacagatttgccagccacacccgcttcagctctgtggacagcgccaagatcagcgagagcacagtgttcagcagccaggatgatgaggaggaggagaacagcgcctttgagagcgtgcctgacagcatgcagagccctgagctggaccctgagagcaccaacggggccggcccctggcaggatgagctggccgcccccagcggccacgtggagaggagccctgagggcctggagagccctgtggccggccccagcaacagaagagaaggagaatgtcccatcctgcacaacagccagcctgtgtcccagctgcccagcctgcggcctgagcaccaccactaccccaccattgatgagcccctgccccccaactgggaggccagaattgacagccacggccgggtcttctacgtggaccacgtgaacagaaccaccacctggcagaggcccacagctgctgccaccccagatggcatgaggaggagcggcagcatccagcagatggagcagctgaacagacgctaccagaacatccagaggaccatcgccacagagaggagtgaagaagattctggcagccagagctgtgagcaggccccagctgggggcggcggcggcggcggcagtgacagcgaggccgagagcagccagagcagcctggacctgcggcgggagggcagcctgagccctgtgaacagccagaagatcaccctgctgctgcagagccctgctgtgaagttcatcaccaaccctgagttcttcaccgtgctgcacgccaactacagcgcctacagagtcttcaccagcagcacctgcctgaagcacatgatcctgaaggtgagaagagatgccaggaactttgagcgctaccagcacaacagagacctggtgaacttcatcaacatgtttgctgacacccggctggagctgccccggggctgggagatcaagacagaccagcagggcaagagcttctttgtggaccacaacagccgggccaccaccttcatcgacccccgcatccccctgcagaatggccgcctgcccaaccacctgacccaccggcagcacctgcagaggctgcggagctacagcgctggggaggccagcgaggtgtccaggaacagaggagccagcctgctggcccggcccggccacagcctggtggccgccatccgcagccagcaccagcacgagagcctgcccctggcctacaatgacaagatcgtggccttcctgcggcagcccaacatctttgagatgctgcaggagcggcagcccagcctggccaggaaccacaccctgcgggagaagatccactacatcagaacagagggcaaccacggcctggagaagctgagctgtgatgctgacctggtgatcctgctgagcctgtttgaggaggagatcatgtcctatgtgcccctgcaggccgccttccaccctggctacagcttcagcccccgctgcagcccctgcagcagcccccagaacagccctggcctgcagagggccagcgcccgggcccccagcccctaccgccgggactttgaggccaagctgaggaacttctacaggaagctggaggccaagggcttcggccagggccctgggaagatcaagctgatcatcagaagagaccacctgctggagggcaccttcaaccaggtgatggcctacagcaggaaggagctgcagaggaacaagctgtatgtgacctttgtgggggaggagggcctggactacagcggccccagccgggagttcttcttcctgctgagccaggagctgttcaacccctactacggcctgtttgagtacagcgccaatgacacctacacagtgcagatcagccccatgtctgcctttgtggagaaccacctggagtggttccgcttcagcggccgcatcctgggcctggccctgatccaccagtacctgctggatgccttcttcacccggcccttctacaaggccctgctgcggctgccctgtgacctgagtgacctggagtacctggatgaggagttccaccagagcctgcagtggatgaaggacaacaacatcacagacatcctggacctgaccttcaccgtgaatgaggaggtgtttggccaggtgacagagcgggagctgaagagcggcggggccaacacccaggtgacagagaagaacaagaaggagtacatcgagaggatggtgaagtggagggtggagcggggcgtggtgcagcagacagaggccctggtgcggggcttctatgaggtggtggacagccggctggtgtctgtgtttgatgcccgggagctggagctggtgattgctggaacagctgagattgacctgaatgactggaggaacaacacagagtacagaggaggctaccatgatggccacctggtgatccgctggttctgggccgctgtggagcgcttcaacaatgagcagaggctgcggctgctgcagtttgtgacaggcaccagctctgtgccctatgagggctttgctgccctgcggggcagcaatggcctgcggcgcttctgcatcgagaagtggggcaagatcaccagcctgccccgggcccacacctgcttcaaccggctggacctgcccccctaccccagctacagcatgctgtatgagaagctgctgacagctgtggaggagaccagcaccttcggcctggagtag

SEQ ID NO: 20481 - DNA, 1209 bp, synthetic construct
  source 1..1209: mol_type = other DNA; note = Synthetic coding sequence
atggccgccctgtgcaggacagctgagagccaggccgagctgcagtgcacccagctggacctggagaggaagctgaagctgaatgaaaatgccatcagccggctgcaggccaaccagaagtctgtgctggtgtctgtgtctgaggtgaaggctgtggccgagatgcagtttggagagctgctggccgctgtgaggaaggcccaggccaacgtgatgctgttcctggaggagaaggagcaggccgccctgagccaggccaacggcatcaaggcccacctggagtacagatctgctgagatggagaagagcaagcaggagctggagaccatggccgccatcagcaacacagtgcagttcctggaggagtactgcaagttcaagaacacagaggacatcaccttccccagcgtgtacatcggcctgaaggacaagctgagcggcatcaggaaggtgatcacagagagcacagtgcacctgatccagctgctggagaactacaagaagaagctgcaggagttcagcaaggaggaggagtatgacatccgcacccaggtgtctgccatcgtgcagaggaagtactggaccagcaagccagagcccagcacccgggagcagttcctgcagtatgtgcatgacatcacctttgatcctgacacagcccacaagtacctgcggctgcaggaggagaacaggaaggtgaccaacaccaccccctgggagcacccctacccagacctgcccagccgcttcctgcactggaggcaggtgctgagccagcagagcctgtacctgcaccgctactactttgaggtggagatctttggagctggcacctacgtgggcctgacctgcaagggcatcgaccagaagggggaggagaggagcagctgcatcagcggcaacaacttctcctggagcctgcagtggaatggcaaggagttcaccgcctggtacagcgacatggagacccccctgaaggccggccccttctggaggctgggcgtgtacatcgacttccctgggggcatcctgtccttctatggagtggagtatgacagcatgaccctggtgcacaagtttgcctgcaagttcagcgagcctgtgtatgctgccttctggctgagcaagaaggaaaatgccatcagaattgtggacctgggggaggagcctgagaagccagcccccagcctggtgggcacagccccctag

SEQ ID NO: 20482 - DNA, 1677 bp, synthetic construct
  source 1..1677: mol_type = other DNA; note = Synthetic coding sequence
atgcacaggtctgcccccagccagaccaccaagaggagccgcagccccttcagcaccaccaggaggtcctgggatgattctgagagcagcggcaccaacctgaacatcgacaatgaagactacagccgctacccaccccgggagtaccgggccagcggcagcagaagaggcatggcctacggccacatcgacagctatggagcagatgattctgaggaggagggcgccggccctgtggagcggccccctgtgcggggcaagacaggcaagttcaaggatgacaagctgctggaccctgtgcctgctgcccgctgcagcgccagcagagctgacttcctgccccagagctctgtggccagccagagcagcagcgagggcaagctggccaccaagggggacagcagcgagcgggagcggcgggagcagaacctgcctgcccggcccagccgggcccctgtgtccatctgtggcggcggggagaacaccagcaagtctgctgaggagcctgtggtgcggcccaagatccggaacctggccagccccaactgtgtgaagcccaagatcttctttgacacagatgatgatgatgacatgccccacagcaccagccgctggagggacacagccaatgacaatgaaggccacagtgatggcctggcccggcggggccgcggggagagcagcagcggctacccagagcccaagtacccagaggacaagcgggaggcccggagtgaccaggtgaagccagagaaggtgcccaggagaagaaggaccatggctgaccctgacttctggacccacagtgatgactactacaagtactgtgatgaggacagcgacagcgacaaggagtggattgctgccctgcggaggaagtaccgcagccgggagcagaccctgagcagcagcggggagagctgggagaccctgcccgggaaggaggagcgggagcccccccaggccaaggtgtctgccagcacaggcaccagccctggccctggggccagcgccagcgctggggccggggccggggccagcgctggcagcaatggcagcaactacctggaggaggtgcgggagcccagcctgcaggaggagcaggccagcctggaggagggggagatcccctggctgcagtaccatgaaaatgacagcagcagcgagggggacaatgacagcggccacgagctgatgcagcccggggtcttcatgctggatggcaacaacaacctggaggatgacagctctgtgtctgaggacctggaggtggactggagcctgtttgatggctttgctgatggcctgggcgtggccgaggccatctcctatgtggacccccagttcctgacctacatggccctggaggagcggctggcccaggccatggagacagccctggcccacctggagagcctggccgtggatgtggaggtggccaaccccccagccagcaaggagagcattgatgccctgcctgagatcctggtgacagaagatcatggagctgtgggccaggagatgtgctgccccatctgctgcagtgaatatgtgaagggggaggtggccacagagctgccctgccaccactacttccacaagccctgtgtgtccatctggctgcagaagagcggcacctgccctgtgtgccgctgcatgtttcctccacccctgtag

SEQ ID NO: 20483 - DNA, 3591 bp, synthetic construct
  source 1..3591: mol_type = other DNA; note = Synthetic coding sequence
gtgcccccctgcccagctgagctgcggtctgtgaccaacggccagagcaaccagcccagcaatgaaggagatgccatcaaggtgtttgtgcgcatccggcccccagctgagaggagcggcagcgcagatggagagcagaacctgtgcctgtctgtgctgagcagcaccagcctgcggctgcacagcaaccctgagcccaagaccttcacctttgaccacgtggctgatgtggacaccacccaggagagcgtgtttgccaccgtggccaagagcatcgtggagagctgcatgagcggctacaacggcaccatctttgcctacggccagacaggcagcggcaagaccttcaccatgatgggccccagcgagagtgacaacttcagccacaacctgcggggcgtcatccccaggagctttgagtacctgttcagcctgattgaccgggagaaggagaaggccggggccggcaagagcttcctgtgcaagtgcagcttcatcgagatctacaatgagcagatctatgacctgctggacagcgccagcgctggcctgtacctgcgggagcacatcaagaagggcgtgtttgtggtgggcgctgtggagcaggtggtgaccagcgctgctgaggcctaccaggtgctgagcggcggctggaggaacagaagagtggccagcacctccatgaaccgggagagcagccgcagccatgctgtgttcaccatcaccattgaatccatggagaagagcaatgagatcgtgaacatccgcaccagcctgctgaacctggtggacctggccggcagcgagcggcagaaggacacccacgccgagggcatgaggctgaaggaggccggcaacatcaacagaagcctgagctgcctgggccaggtgatcacagccctggtggatgtgggcaatggcaagcagagacatgtgtgctacagagacagcaagctgaccttcctgctgcgggacagcctgggcggcaatgccaagacagccatcatcgccaacgtgcaccctggcagccgctgcttcggggagaccctgagcaccctgaactttgcccagagggccaagctgatcaagaacaaggctgtggtgaatgaagacacccagggcaatgtgtcccagctgcaggccgaggtgaagaggctgaaggagcagctggccgagctggccagcggccagaccccacctgagagcttcctgacccgggacaagaagaagaccaactacatggagtacttccaggaggccatgctgttcttcaagaagtctgagcaggagaagaagagcctgattgagaaggtgacccagctggaggacctgaccctgaagaaggagaagttcatccagagcaacaagatgattgtgaagttccgggaggaccagatcatccggctggagaagctgcacaaggagagccggggcggcttcctgcctgaggagcaggaccggctgctgtctgagctgagaaatgagatccagaccctgcgggagcagatcgagcaccacccccgggtggccaagtatgccatggagaaccacagcctgcgggaggagaacagaaggctgcggctgctggagcctgtgaagagggcccaggagatggatgcccagaccatcgccaagctggagaaggccttcagcgagatcagcggcatggagaagagtgacaagaaccagcagggcttcagccccaaggcccagaaggagccctgcctgtttgccaacacagagaagctgaaggcccagctgctgcagatccagacagagctgaacaacagcaagcaggagtatgaggagttcaaggagctgaccaggaagaggcagctggagctggagagcgagctgcagagcctgcagaaggccaacctgaacctggagaacctgctggaggccaccaaggcctgcaagaggcaggaggtgtcccagctgaacaagatccacgccgagaccctgaagatcatcaccacccccaccaaggcctaccagctgcacagcaggcctgtgcccaagctgagccctgagatgggcagctttggcagcctgtacacccagaacagcagcatcctggacaatgacatcctgaatgaacctgtgcccccagagatgaatgagcaggcctttgaggccatcagcgaggagctgaggacagtgcaggagcagatgtctgccctgcaggccaagctggatgaggaggagcacaagaacctgaagctgcagcagcacgtggacaagctggagcaccacagcacccagatgcaggagctgttcagcagcgagagaattgactggaccaagcagcaggaggagctgctgagccagctgaatgtgctggagaagcagctgcaggagacccagaccaagaatgacttcctgaagtctgaggtgcatgacctgcgggtggtgctgcacagcgctgacaaggagctgagctctgtgaagctggagtacagcagcttcaagaccaaccaggagaaggagttcaacaagctgtctgagcggcacatgcacgtgcagctgcagctggacaacctgcggctggagaatgagaagctgctggagagcaaggcctgcctgcaggacagctatgacaacctgcaggagatcatgaagtttgaaattgaccagctgagcaggaacctgcagaacttcaagaaggaaaatgagaccctgaagagtgacctgaacaacctgatggagctgctggaggccgagaaggagaggaacaacaagctgagcctgcagtttgaggaggacaaggagaacagcagcaaggagatcctgaaggtgctggaggccgtgcggcaggagaagcagaaggagacagccaagtgtgagcagcagatggccaaggtgcagaagctggaggagagcctgctggccacagagaaggtgatcagcagcctggagaagagccgggacagcgacaagaaggtggtggccgacctgatgaaccagatccaggagctgcggacctctgtgtgtgagaagacagagaccatcgacaccctgaagcaggagctgaaggacatcaactgcaagtacaacagcgccctggtggaccgggaggagagccgggtgctgatcaagaagcaggaggtggacatcctggacctgaaggagaccctgcggctgcgcatcctgtctgaagatattgagcgggacatgctgtgtgaggacctggcccacgccacagagcagctgaacatgctgacagaggccagcaagaagcacagcggcctgctgcagagcgcccagaggacagaccaggagggcagcccagattctggcaccagcgcccaggccaagcccaaggagcggggcagcaggacagaggaggagtacaacttcaagatgaggcagctggagcacgtgatggattctgctgctgaggacccccagagccccaagaccccaccccacttccagacccacctggccaagctgctggagacccaggagcaggagattgaagatggccgggccagcaagaccagcctggagcacctggtgaccaagctgaatgaagatcgggaggtgaagaatgctgagatcctgaggatgaaggagcagctgaggtag

SEQ ID NO: 20484 - DNA, 3264 bp, synthetic construct
  source 1..3264: mol_type = other DNA; note = Synthetic coding sequence
atggaccccttcacagagaagctgctggagaggacccgggcccggcgggagaacctgcagaggaagatggccgagcggcccacagctgcccccaggtccatgacccacgccaagagggcccggcagcccctgtctgaggccagcaaccagcagcccctgagcggcggggaggagaagagctgcaccaagcccagccccagcaagaagcgctgcagcgacaacacagaggtggaggtgagcaacctggagaacaagcagcctgtggagagcaccagcgccaagagctgcagccccagccctgtgagcccccaggtgcagccccaggccgctgacaccatcagtgacagcgtggccgtgcctgccagcctgctgggcatgagaagaggcctgaacagccggctggaggccacagctgccagctctgtgaagaccaggatgcagaagctggccgagcagaggcggcgctgggacaatgatgacatgacagatgacatccctgagagcagcctcttcagccccatgcccagcgaggagaaggccgccagccccccccggcccctgctgagcaatgccagcgccacccctgtgggccggcggggccgcctggccaacctggccgccaccatctgctcctgggaggatgatgtgaaccacagctttgccaagcagaacagcgtgcaggagcagcccggcacagcctgcctgagcaagttcagcagcgccagcggggccagcgcccgcatcaacagcagctctgtgaagcaggaggccaccttctgcagccagagagatggagatgccagcctgaacaaggccctgagcagcagcgcagatgatgccagcctggtgaatgccagcatcagcagctctgtgaaggccaccagccctgtgaagagcaccaccagcatcacagatgccaagagctgtgagggccagaaccctgagctgctgcccaagacccccatcagccccctgaagacaggagtgtccaagcccatcgtgaagagcaccctgagccagacagtgcccagcaaaggagagctgagccgggagatctgcctgcagagccagagcaaggacaagagcaccaccccaggcggcaccggcatcaagcccttcctggagagatttggagagcgctgccaggagcacagcaaggagagccctgcccggagcaccccccacaggacccccatcatcacccccaacaccaaggccatccaggagcggctcttcaagcaggacaccagcagcagcaccacccacctggcccagcagctgaagcaggagcggcagaaggagctggcctgcctgcggggccgctttgacaagggcaacatctggagcgctgagaagggcggcaacagcaagagcaagcagctggagaccaagcaggagacccactgccagagcacccccctgaagaagcaccagggcgtgtccaagacccagagcctgcctgtgacagagaaggtgacagagaaccagatcccagccaagaacagcagcacagagcccaaggaggtgatccgggagattgagatgtctgtggatgatgatgacatcaacagcagcaaggtgatcaatgacctcttcagtgatgtgctggaggagggggagctggacatggagaagagccaggaggagatggaccaggccctggccgagagcagcgaggagcaggaggatgccctgaacatcagctccatgagcctgctggcccccctggcccagacagtgggcgtggtgtccccagagagcctggtgtccaccccccggctggagctgaaggacaccagcagaagtgatgagagccccaagccaggcaagttccagaggaccagggtgcccagggctgagagcggggacagcctgggcagcgaggaccgggacctgctgtacagcattgatgcctaccgcagccagcgcttcaaggagacagagcggcccagcatcaagcaggtgattgtgaggaaggaggatgtgaccagcaagctggatgagaagaacaatgccttcccctgccaggtgaacatcaagcagaagatgcaggagctgaacaatgagatcaacatgcagcagaccgtcatctaccaggccagccaggccctgaactgctgcgtggatgaggagcacggcaagggcagcctggaggaggccgaggccgagcggctgctgctgattgccaccgggaagaggaccctgctgattgatgagctgaacaagctgaagaatgaaggcccccagaggaagaacaaggccagcccccagagcgagttcatgcccagcaagggctctgtgaccctgtctgagatccggctgcccctgaaggctgactttgtgtgcagcacagtgcagaagccagatgctgccaactactactacctgatcatcctgaaggccggggctgagaacatggtggccacccccctggccagcaccagcaacagcctgaatggagatgccctgaccttcaccaccaccttcaccctgcaggatgtgtccaatgactttgagatcaacatcgaggtgtacagcctggtgcagaagaaggaccccagcggcctggacaagaagaagaagaccagcaagagcaaggccatcacccccaagaggctgctgaccagcatcaccaccaagagcaacatccacagctctgtgatggccagccctgggggcctgtctgctgtgaggaccagcaactttgccctggtgggcagctacaccctgagcctgagctctgtgggcaacaccaagtttgtgctggacaaggtgcccttcctgagcagcctggagggccacatctacctgaagatcaagtgccaggtgaacagctctgtggaggagcggggcttcctgaccatctttgaagatgtgtctggctttggagcctggcaccggcgctggtgtgtgctgagcggcaactgcatctcctactggacctacccagatgatgagaagaggaagaaccccatcggccgcatcaacctggccaactgcaccagccggcagattgaaccagccaaccgggagttctgtgcccggaggaacacctttgagctgatcaccgtgcggccccagagagaagatgaccgggagaccctggtgtcccagtgccgggacaccctgtgtgtgaccaagaactggctgtctgctgacaccaaggaggagcgggacctgtggatgcagaagctgaaccaggtgctggtggacatccggctgtggcagccagatgcctgctacaagcccatcggcaagccctag

SEQ ID NO: 20485 - DNA, 648 bp, synthetic construct; identical to SEQ ID NO: 19225
  source 1..648: mol_type = other DNA; note = Synthetic coding sequence

SEQ ID NO: 20486 - DNA, 2976 bp, synthetic construct
  source 1..2976: mol_type = other DNA; note = Synthetic coding sequence
atggaggagtatgagaagttctgtgagaagagcctggcccgcatccaggaggccagcctgagcacagagagcttcctgcctgcccagagcgagagcatcagcctcatccgcttccatggagtggccatcctgagccccctgctgaacatcgagaagaggaaggagatgcagcaggagaagcagaaggccctggatgtggaggccaggaagcaggtgaacaggaagaaggccctgctgaccagggtgcaggagatcctggacaacgtgcaggtgaggaaggccccaaatgccagtgactttgaccagtgggagatggagaccgtgtacagcaacagcgaggtgaggaacctgaatgtgcctgccaccttccccaacagcttccccagccacacagagcacagcacagctgccaagctggacaagattgctggcatcctgcccctggacaatgaagaccagtgcaagacagatggcatcgacctggcccgggacagcgagggcttcaacagccccaagcagtgtgacagcagcaacatcagccacgtggagaatgaggccttccccaagaccagcagcgccaccccccaggagaccctcatcagtgatggccccttctctgtgaatgagcagcaggacctgcccctgctggccgaggtgatcccagacccctacgtgatgagcctgcagaacctgatgaagaagagcaaggagtacatcgagcgggagcagagcagaagaagcctgcggggcagcatcaacagaattgtgaatgaaagccacctggacaaggagcatgatgctgtggaggtggccgactgtgtgaaggagaagggccagctgaccgggaagcactgtgtgtctgtcatcccagacaagcccagcctgaacaagagcaatgtgctgctgcagggcgccagcacccaggccagctccatgtccatgcctgtgctggccagcttcagcaaggtggacatccccatcagaacaggccaccccaccgtgctggagagcaacagcgacttcaaggtgatccccacctttgtgacagagaacaacgtcatcaagagcctgaccggcagctatgccaagctgcccagccctgagcccagcatgagccccaagatgcacagaagaagaagcaggaccagcagcgcctgccacatcctgatcaacaaccccatcaatgcctgtgagctgagccccaagggcaaggagcaggccatggacctgatcatccaggacacagatgagaacaccaacgtgcctgagatcatgcccaagctgcccacagacctggccggcgtgtgcagcagcaaggtgtatgtgggcaagaacaccagcgaggtgaaggaggatgtggtgctgggcaagagcaaccaggtgtgccagagcagcggcaaccacctggagaacaaggtgacccacggcctggtgacagtggagggccagctgaccagtgatgagcggggggcccacatcatgaacagcacctgtgccgccatgcccaagctgcacgagccctatgccagcagccagtgcatcgccagccccaactttggaacagtgtctggcctgaagccagcctccatgctggagaagaactgcagcctgcagacagagctgaacaagagctatgatgtgaagaaccccagccccctgctgatgcagaaccagaacacccggcagcagatggacacccccatggtgtcctgtggaaatgagcagttcctggacaacagctttgagaaggtgaagaggcggctggacctggacattgatggcctgcagaaggagaactgcccctacgtgatcaccagcggcatcacagagcaggagcggcagcacctgcctgagaagcgctaccccaagggcagcggctttgtgaacaagaacaagatgctgggcaccagcagcaaggagagcgaggagctgctgaagagcaagatgctggcctttgaggagatgaggaagaggctggaggagcagcacgcccagcagctgagcctgctgattgctgagcaggagcgggagcaggagcggctgcagaaggagattgaggagcaggagaagatgctgaaggagaagaaggccatgacagctgaggccagcgagctggacatcaacaatgctgtggagctggagtggaggaagatcagtgacagcagcctgctggagaccatgctgagccaggccgacagcctgcacaccagcaacagcaacagcagcggcttcaccaacagcgccatgcagtacagctttgtgtctgccaatgaggcccccttctacctgtggggcagcagcaccagcggcctgaccaagctgtctgtgacccggcccttcggccgggccaagacccgctggagccaggtgttcagcctggagatccaggccaagttcaacaagatcacagctgtggccaagggcttcctgacccggcggctgatgcagacagacaagctgaagcagctgcggcagacagtgaaggacaccatggagttcatccgctccttccagagcgaggcccccctgaagaggggcatcgtgtctgcccaggatgccagcctgcaggagcgggtgctggcccagctgcgggccgccctgtatggcatccatgacatcttctttgtgatggatgctgctgagaggatgagcatcctgcaccacgaccgggaggtgaggaaggagaagatgctgcggcagatggacaagatgaagagcccccgggtggccctgtctgctgccacccagaagagcctggacaggaagaagtacatgaaggctgctgagatgggcatgcccaacaagaagttcctggtgaagcagaaccccagcgagaccagggtgctgcagcccaaccagggccagaatgcccctgtgcaccggctgctgagccggcagggcagcatctgcaggaagaaccccaagaaggccgccaagtgctgtgacaacctgcggcggcagcacagcctgggctag

SEQ ID NO: 20487 - DNA, 2976 bp, synthetic construct; identical to SEQ ID NO: 20486
  source 1..2976: mol_type = other DNA; note = Synthetic coding sequence

SEQ ID NO: 20488 - DNA, 999 bp, synthetic construct; identical to SEQ ID NO: 18607
  source 1..999: mol_type = other DNA; note = Synthetic coding sequence

SEQ ID NO: 20489 - DNA, 888 bp, synthetic construct; identical to SEQ ID NO: 18520
  source 1..888: mol_type = other DNA; note = Synthetic coding sequence

SEQ ID NO: 20490 - DNA, 1368 bp, synthetic construct
  source 1..1368: mol_type = other DNA; note = Synthetic coding sequence
atggagggcgtgctgtacaagtggaccaactacctgagcggctggcagccccgctggttcctgctgtgtggcggcatcctgagctactatgacagcccagaagatgcctggaagggctgcaagggcagcatccagatggctgtgtgtgagatccaggtgcacagcgtggacaacaccaggatggacctgatcatccctggagagcagtacttctacctgaaggcccggtctgtggccgagcggcagcgctggctggtggccctgggcagcgccaaggcctgcctgacagacagcaggacccagaaggagaaggagtttgctgagaacacagagaacctgaagaccaagatgtctgagctgcggctgtactgtgacctgctggtgcagcaggtggacaagaccaaggaggtgaccaccaccggggtgagcaacagcgaggagggcattgatgtgggcaccctgctgaagagcacctgcaacaccttcctgaagaccctggaggagtgcatgcagatcgccaatgctgccttcaccagcgagctgctgtaccgcaccccacctggcagcccccagctggccatgctgaagagcagcaagatgaagcaccccatcatccccatccacaacagcctggagcggcagatggagctgagcacctgtgaaaatggcagcctgaacatggagatcaacggggaggaggagatcctgatgaagaacaagaacagcctgtacctgaagtctgctgagattgactgcagcatcagcagcgaggagaacacagatgacaacatcaccgtgcagggcgagatcagaaaagaagatggcatggagaacctgaagaaccacgacaacaacctgacccagagcggcagtgacagcagctgcagccctgagtgcctgtgggaggagggcaaggaggtgatccccaccttcttcagcaccatgaacaccagcttcagtgacatcgagctgctggaggacagcggcatccccacagaggccttcctggccagctgctatgctgtggtgcctgtgctggacaagctgggccccaccgtgtttgcccctgtgaagatggacctggtgggcaacatcaagaaggtgaaccagaagtacatcaccaacaaggaggagttcaccaccctgcagaagatcgtgctgcacgaggtggaggctgatgtggcccaggtgaggaacagcgccacagaggccctgctgtggctgaagaggggcctgaagttcctgaagggcttcctgacagaggtgaagaatggagagaaggacatccagacagccctgaacaatgcctacggcaagaccctgcggcagcaccacggctgggtggtgcggggcgtgtttgctgtgtag

SEQ ID NO: 20491 - DNA, 1320 bp, synthetic construct
  source 1..1320: mol_type = other DNA; note = Synthetic coding sequence
atggagggcgtgctgtacaagtggaccaactacctgagcggctggcagccccgctggttcctgctgtgtggcggcatcctgagctactatgacagcccagaagatgcctggaagggctgcaagggcagcatccagatggctgtgtgtgagatccaggtgcacagcgtggacaacaccaggatggacctgatcatccctggagagcagtacttctacctgaaggcccggtctgtggccgagcggcagcgctggctggtggccctgggcagcgccaaggcctgcctgacagacagcaggacccagaaggagaaggagtttgctgagaacacagagaacctgaagaccaagatgtctgagctgcggctgtactgtgacctgctggtgcagcaggtggacaagaccaaggaggtgaccaccaccggggtgagcaacagcgaggagggcattgatgtgggcaccctgctgaagagcacctgcaacaccttcctgaagaccctggaggagtgcatgcagatcgccaatgctgccttcaccagcgagctgctgtaccgcaccccacctggcagcccccagctggccatgctgaagagcagcaagatgaagcaccccatcatccccatccacaacagcctggagcggcagatggagctgagcacctgtgaaaatggcagcctgaacatggagatcaacggggaggaggagatcctgatgaagaacaagaacagcctgtacctgaagtctgctgagattgactgcagcatcagcagcgaggagaacacagatgacaacatcaccgtgcagggcgagatcagaaaagaagatggcatggagaacctgaagaaccacgacaacaacctgacccagagcggcagtgacagcagctgcagccctgagtgcctgtgggaggagggcaaggaggtgatccccaccttcttcagcaccatgaacaccagcttcagtgacatcgagctgctggaggacagcggcatccccacagaggccttcctggccagctgctatgctgtggtgcctgtgctggacaagctgggccccaccgtgtttgcccctgtgaagatggacctggtgggcaacatcaagaaggtgaaccagaagtacatcaccaacaaggaggagttcaccaccctgcagaagatcgtgctgcacgaggtggaggctgatgtggcccaggtgaggaacagcgccacagaggccctgctgtggctgaagaggggcctgaagttcctgaagggcttcctgacagaggtgaagaatggagagaaggacatccagacagccctgtctgtgggcatgtgggtgtag

SEQ ID NO: 20492 - DNA, 984 bp, synthetic construct; identical to SEQ ID NO: 18841
  source 1..984: mol_type = other DNA; note = Synthetic coding sequence

SEQ ID NO: 20493 - DNA, 5229 bp, synthetic construct
  source 1..5229: mol_type = other DNA; note = Synthetic coding sequence
atgatggagggcaatggaacagagaacagctgcagcaggacccggggctggctgcagcaggacaatgatgccaagccctggctgtggaagttcagcaactgcttcagcaggcctgagcagaccctgccccacagcccccagaccaaggagtacatggagaacaagaaggtggccgtggagctgaaggatgtgcccagccccctgcacgccggcagcaagctgtttcctgctgtgcccctgcctgacatccgcagcctgcagcagcccaagatccagctgagctctgtgcccaaggtgtcctgctgtgcccactgccccaatgagcccagcaccagccccatgagatttggaggcggcggcggcggcagcggcggcaccagcagcctcatccaccctggggccctgctggacagccagagcaccaggaccatcacctgccaggtgggcagcggctttgccttccagagcgccagcagcctgcagaatgccagcgccaggaacaacctggccggcatcgccagtgacttccccagcatgtgcctggagagcaacctgagcagctgcaagcacctgccctgctgcggcaagctgcacttccagagctgccacggcaatgtgcacaagctgcaccagttccccagcctgcagggctgcaccagcgctggctacttcccctgcagcgacttcaccagcggggcccctggccacctggaggagcacatcagccagagcgagctgaccccccacctgtgcaccaacagcctgcacctgaatgtggtgccccctgtgtgcctgaagggcagcctgtactgtgaggactgcctgaacaagccagccaggaacagcatcattgatgctgccaaggtgtggcccaacatccccccacccaacacccagcctgcccccctggccgtgcccctgtgcaatggctgcggcaccaagggcaccgggaaggagaccaccctgctgctggccaccagcctgggcaaggccgccagcaagtttggcagccctgaggtggccgtggccggccaggtgctggagaacctgccccccatcggggtcttctgggacatcgagaactgcagcgtgcccagcggccgcagcgccacagctgtggtgcagaggatccgggagaagttcttcaagggccaccgggaggccgagttcatctgtgtgtgtgacatcagcaaagaaaacaaggaggtgatccaggagctgaacaactgccaggtgacagtggcccacatcaatgccacagccaagaatgctgctgatgacaagctgcggcagagcctgcggagatttgccaacacccacacagccccagccaccgtggtgctggtgtccacagatgtgaactttgccctggagctgagtgacctgcggcaccgccacggcttccacatcatcctggtgcacaagaaccaggccagcgaggccctgctgcaccacgccaatgaactcatccgctttgaggagttcatcagtgacctgcccccccggctgcccctgaagatgccccagtgccacaccctgctgtatgtgtacaacctgcctgccaacaaggatggcaagtctgtgagcaaccggctgcggcggctgagtgacaactgtggcggcaaggtgctgagcatcaccggctgcagcgccatcctgcgcttcatcaaccaggacagcgctgagcgggcccagaagaggatggagaatgaagatgtgtttggaaaccgcatcatcgtgtccttcacccccaagaaccgggagctgtgtgagaccaagagcagcaatgccatcgctgacaaggtgaagagccccaagaagctgaagaaccccaagctgtgcctgatcaaggatgccagcgagcagagcagcagcgccaaggccacccctgggaagggcagccaggccaacagcggcagcgccaccaagaacaccaacgtgaagagcctgcaggagctgtgcaggatggagagcaagacaggccacagaaattctgagcaccagcagggccacctgcggctggtggtgcccacccacggcaacagcagcgctgctgtgtccacccccaagaacagcggcgtggccgagcctgtgtacaagaccagccagaagaaggagaacctgagcgcccggtctgtgaccagcagccctgtggagaagaaggacaaggaggagaccgtcttccaggtgtcctaccccagcgccttcagcaagctggtggccagccggcaggtgagccccctgctggccagccagagctggagcagccgctccatgagccccaacctgctgaacagagccagccccctggccttcaacatcgccaacagcagcagcgaggccgactgcccagacccctttgccaatggagcagatgtgcaggtgagcaacatcgactaccgcctgagcaggaaggagctgcagcagctgctgcaggaggcctttgcccggcacggcaaggtgaagtctgtggagctgagcccccacacagactaccagctgaaggctgtggtgcagatggagaacctgcaggatgccatcggggctgtgaacagcctgcaccgctacaagattggcagcaagaagatcctggtgtccctggccactggagctgccagcaagagcctgagcctgctgtctgctgagaccatgtctgtgctgcaggatgccccagcctgctgcctgcccctcttcaagttcacagacatctatgagaagaagtttggccacaagctgaatgtgtctgacctgtacaagctgacagacacagtggccatccgggagcagggcaatggccgcctggtgtgcctgctgcccagcagccaggcccggcagagccccctgggcagcagccagagccatgatggcagcagcaccaactgcagccccatcatctttgaggagctggagtaccacgagcctgtgtgccggcagcactgcagcaacaaggacttcagcgagcacgagtttgatcctgacagctacaagatcccctttgtgatcctgagcctgaagacctttgccccccaggtgcacagcctgctgcagacccatgagggcaccgtgcccctgctgtccttcccagactgctacatcgccgagtttggagacctggaggtggtgcaggagaaccagggcggcgtgcccctggagcacttcatcacctgtgtgcctggggtgaacatcgccacagcccagaatggcatcaaggtggtgaagtggatccacaacaagcccccaccacccaacacagacccctggctgctgcggagcaagagccctgtgggcaacccccagctgatccagttcagccgggaggtgattgacctgctgaagagccagcccagctgtgtgatccccatcagccacttcatccccagctaccaccaccactttgccaagcagtgccgggtgtctgactatggctacagcaagctgattgagctgctggaggccgtgccccacgtgctgcagatcctgggcatgggcagcaagaggctgctgaccctgacccaccgggcccaggtgaagcgcttcacccaggacctgctgaagctgctgaagagccaggccagcaagcaggtgattgtgcgggagttcagccaggcctaccactggtgcttcagcaaggactgggatgtgacagaatatggagtgtgtgagctgattgatattgtgtctgagatcccagacaccaccatctgcctgagccagcaggacaatgagatggtgatctgcatccccaagcgggagaggacccaggatgaaattgaaagaaccaagcagttcagcaaggatgtggtggacctgctgcggcaccagccccacttcaggatgcccttcaacaagttcatccccagctaccaccaccacttcggccggcagtgcaagctggcctactacggcttcaccaagctgctggagctgtttgaggccatcccagacaccctgcaggtgctggagtgtggggaggagaagatcctgaccctgacagaggtggagcgcttcaaggccctggccgcccagtttgtgaagctgctgcggagccagaaggacaactgcctgatgatgacagacctgctgacagaatatgccaagaccttcggctacaccttccggctgcaggactatgatgtgagcagcatcagcgccctgacccagaagctgtgccacgtggtgaaggtggccgacatcgagagcggccggcagatccagctgatcaacaggaagagcctgcggagcctgacagcccagctgctggtgctgctgatgtcctgggagggcaccacccacctgtctgtggaggagctgaagaggcactatgagagcacccacaacacccccctgaacccctgtgaatatggcttcatgaccctgacagagctgctgaagagcctgccctacctggtggaggtgttcaccaatgacaagatggaggagtgtgtgaagctgaccagcctgtacctgtttgccaagaatgtgcgcagcctgctgcacacctaccactaccagcagatcttcctgcacgagttctccatggcctacaccaagtatgtgggggagaccctgcagcccaagacctacggccacagctctgtggaggagctgctgggcgccatcccccaggtggtgtggatcaagggccacggccacaagagaattgtggtgctgaagaatgacatgaagagccggctgagcagcctgagcctgagccctgccaaccacgagaaccagcccagcgagggggagcgcatcctggaggtgcctgagagccacacagccagcgagctgaagctgggcgcagatggcagcggccccagccacacagagcaggagctgctgcggctgacagatgacagccctgtggacctgctgtgtgcccctgtgcccagctgcctgcccagcccccagctgcggccagaccccgtcatcctgcagagcgctgacctgatccagtttgaggagcggccccaggagcccagcgagatcatgatcctgaaccaggaggagaagatggagatccccatccctgggaagagcaagaccctgaccagtgacagcagcagcagctgcatctctgctgctgtgcctgtgcccccctgccccagcagcgagaccagcgagagcctgctgagcaaggaccctgtggagagccctgccaagaagcagcccaagaacagagtgaagctggccgccaacttcagcctggcccccatcaccaagctgtag

SEQ ID NO: 20494 - DNA, 831 bp, synthetic construct
  source 1..831: mol_type = other DNA; note = Synthetic coding sequence
atgtgcagcaccagcggctgtgacctggaggagatccccctggatgatgatgacctgaacaccatcgagttcaagatcctggcctactacaccaggcaccacgtgttcaagagcaccccagccctcttcagccccaagctgctgcggaccaggagcctgagccagaggggcctgggcaactgcagcgccaatgaatcctggacagaggtgtcctggccctgcaggaacagccagagcagcgagaaggccatcaacctgggcaagaagaagagctcctggaaggccttctttggagtggtggagaaggaggacagccagagcaccccagccaaggtgtctgcccagggccagaggaccctggagtaccaggacagccacagccagcagtggagccgctgcctgagcaatgtggagcagtgcctggagcatgaagctgtggaccccaaggtgatcagcatcgccaacagagtggccgagatcgtgtacagctggcccccaccccaggccacccaggccggcggcttcaagagcaaggagatctttgtgacagagggcctgtccttccagctgcagggccacgtgcctgtggccagcagcagcaagaaggatgaggaggagcagatcctggccaagatcgtggagctgctgaagtacagcggggaccagctggagaggaaggagaaggagtgggaggagagcgccaagaccaagatcaagatggccctgctgtggaggagcagcggcggcggcccccgggtgctgagcatccctgaggccttcatgaagaacagcttcaccctgaccccacctggcttcagcgagcacaactag

SEQ ID NO: 20495 - DNA, 552 bp, synthetic construct; identical to SEQ ID NO: 19212
  source 1..552: mol_type = other DNA; note = Synthetic coding sequence

SEQ ID NO: 20496 - DNA, 960 bp, synthetic construct
  source 1..960: mol_type = other DNA; note = Synthetic coding sequence
atgctgcgctgtggccagatgatctttgcccaggccctggtgtgccgccacctgggccgggactggcgctggacccagaggaagaggcagcctgacagctacttctctgtgctgaatgccttcatcgacaggaaggacagctactacagcatccaccagatcgcccagatgggcgtgggggagggcaagagcatcggccagtggtacggccccaacacagtggcccaggtgctgaagaagctggccgtgtttgacacctggagcagcctggccgtgcacatcgccatggacaacacagtggtgatggaggagatccggcggctgtgcaggacctctgtgccctgtgccggggccacagccttccctgctgacagcgacagacactgcaatggcttccctgctggagctgaggtgaccaaccggcccagcccctggaggcccctggtgctgctgatccccctgcggctgggcctgacagacatcaatgaggcctacgtggagaccctgaagcactgcttcatgatgccccagagcctgggcgtcatcggcggcaagcccaacagcgcccactacttcatcggctacgtgggggaggagctgatctacctggacccccacaccacccagcctgctgtggagcccacagatggctgcttcatcccagatgagagcttccactgccagcaccccccctgcaggatgagcattgctgagctggaccccagcattgctgtgggcttcttctgcaagacagaagatgacttcaatgactggtgccagcaggtgaagaagctgagcctgctgggcggggccctgcccatgtttgagctggtggagctgcagcccagccacctggcctgcccagatgtgctgaacctgagcctggacagcagtgatgtggagcggctggagcgcttctttgattctgaagatgaggactttgagatcctgagcctgtag

SEQ ID NO: 20497 - DNA, 564 bp, synthetic construct
  source 1..564: mol_type = other DNA; note = Synthetic coding sequence
atgaatggccgggctgacttccgggagcccaatgctgaggtgccccggcccatcccccacatcggccctgactacatccccacagaggaggagcggcgggtgtttgctgaatgtaatgatgagagcttctggttccgctctgtgcccctggccgccacctccatgctgatcacccagggcctcatcagcaagggcatcctgagcagccaccccaagtatggcagcatccccaagctgatcctggcctgcatcatgggctactttgctgggaagctgtcctatgtgaagacctgccaggagaagttcaagaagctggagaacagccccctgggggaggccctgcggagcggccaggcccggcgcagcagccccccaggccactactaccagaagagcaaatatgacagctctgtgtctggccagagcagctttgtgaccagccctgctgctgacaacatcgagatgctgccccactatgagcccatccccttcagcagctccatgaatgaaagtgcccccaccggcatcacagaccacatcgtgcagggcaggaacttctcctag

SEQ ID NO: 20498 - DNA, 270 bp, synthetic construct
  source 1..270: mol_type = other DNA; note = Synthetic coding sequence
atgtctgagcagggcgacctgaaccaggccatcgccgaggagggcggcacagagcaggagacagccaccccagaaaatggcatcgtgaagtctgagagcctggatgaggaggagaagctggagctgcagaggcggctggaggcccagaaccaggagaggaggaagagcaagagcggggccggcaagggcaagctgaccaggagcctggccgtgtgtgaggagagcagcgcccggcctggaggagagagcctgcaggaccagaccctgtag

SEQ ID NO: 20499 - DNA, 270 bp, synthetic construct; identical to SEQ ID NO: 20498
  source 1..270: mol_type = other DNA; note = Synthetic coding sequence

SEQ ID NO: 20500 - DNA, 1473 bp, synthetic construct
  source 1..1473: mol_type = other DNA; note = Synthetic coding sequence
atggaggacagcgccagcgccagcctgagcagcgctgctgccaccggcaccagcaccagcaccccagctgcccccacagccaggaagcagctggacaaggagcaggtgaggaaggctgtggatgccctgctgacccactgcaagagcaggaagaacaactacggcctgctgctgaatgaaaatgaaagcctcttcctgatggtggtgctgtggaagatccccagcaaggagctgcgggtgcggctgaccctgccccacagcatccgcagtgacagcgaggacatctgcctcttcaccaaggatgagcccaacagcaccccagagaagacagagcagttctacaggaagctgctgaacaagcacggcatcaagacagtgtcccagatcatcagcctgcagaccctgaagaaggagtacaagagctatgaggccaagctgcggctgctgagcagctttgacttcttcctgacagatgcccgcatccggcggctgctgcccagcctgattggccgccacttctaccagaggaagaaggtgcctgtgtctgtgaacctgctgagcaagaacctgagccgggagatcaatgactgcatcggcggcaccgtgctgaacatcagcaagagcggcagctgcagcgccatccgcatcggccacgtgggcatgcagatcgagcacatcatcgagaacatcgtggccgtgaccaagggcctgtctgagaagctgcctgagaagtgggagagcgtgaagctgctgtttgtgaagacagagaagtctgctgccctgcccatcttcagcagctttgtgagcaactgggatgaggccaccaagaggagcctgctgaacaagaagaagaaggaggcccggaggaagagaagagagaggaactttgagaagcagaaggagaggaagaagaagaggcagcaggccaggaagacagcctctgtgctgagcaaggatgatgtggcccctgagagcggggacaccaccgtgaagaagccagagagcaagaaggagcagaccccagagcacggcaagaagaagaggggccggggcaaggcccaggtgaaggccaccaatgaaagtgaagatgagatcccccagctggtgcccatcggcaagaagaccccagccaatgagaaggtggagatccagaagcacgccaccgggaagaagagccctgccaagagccccaaccccagcaccccccggggcaagaagaggaaggccctgcctgccagcgagacccccaaggctgctgagagcgagacccctgggaagagccctgagaagaagcccaagatcaaggaggaggccgtgaaggagaagagccccagcctgggcaagaaggatgcccggcagacccccaagaagccagaggccaagttcttcaccacccccagcaagtctgtgaggaaggccagccacacccccaagaagtggcccaagaagcccaaggtgccccagagcacctag

SEQ ID NO: 20501 - DNA, 495 bp, synthetic construct
  source 1..495: mol_type = other DNA; note = Synthetic coding sequence
atggccgagcccgcctctgtggccgctgagagcctggccggcagccgggcccgggccgccaggacagtgctgggccaggtggtgctgcccggggaggagctgctgctgcctgagcaggaggatgctgagggccctggaggagctgtggagcggcccctgagcctgaatgcccgggcctgcagccgggtgcgggtggtgtgtggccctggcctgcggcgctgtggggaccggctgctggtgaccaagtgtggccgcctgcggcacaaggagcccggcagcggcagcggcggcggcgtgtactgggtggacagccagcagaagagatatgtgcctgtgaagggggaccacgtgattggcatcgtgacagccaagagcggggacatcttcaaggtggatgtgggcggcagcgagcccgccagcctgagctacctgagctttgagggcgccaccaagaggaaccggcccaacgtgcaggccatcagcagccggctgtag

SEQ ID NO: 20502 - DNA, 2508 bp, synthetic construct
  source 1..2508: mol_type = other DNA; note = Synthetic coding sequence
atgacctgcaacaagcacggctgccggcaggccttccacgtgacctgtgcccagtttgctggcctgctgtgtgaggaggagggcaatggagctgacaacgtgcagtactgcggctactgcaagtaccacttcagcaagctgaagaagagcaagaggggcagcaacagaagctatgaccagagcctgagtgacagcagcagccacagccaggacaagcaccacgagaaggagaagaagaagtacaaggagaaggacaagcacaagcagaagcacaagaagcagcctgagcccagccctgccctggtgcccagcctgactgtgaccacagagaagacctacaccagcaccagcaacaacagcatcagcggcagcctgaagaggctggaggacaccacagcccgcttcaccaatgccaacttccaggaggtgtctgcccacaccagcagcggcaaggatgtgtctgagacccggggcagcgagggcaagggcaagaagagcagcgcccacagcagcggccagaggggcaggaagccaggcggcggcaggaaccctggcaccaccgtgtctgctgccagccccttcccccagggcagcttcagcggcaccccaggctctgtgaagagcagcagcggcagctctgtgcagagcccccaggacttcctgtccttcacagacagcgacctgagaaatgacagctacagccacagccagcagagcagcgccaccaaggatgtgcacaagggggagagcggcagccaggagggcggcgtgaacagcttcagcaccctcatcggcctgcccagcaccagcgctgtgaccagccagcccaagagctttgagaacagccctggggacctgggcaacagcagcctgcccacagctggctacaagagggcccagaccagcggcatcgaggaggagaccgtgaaggagaagaagaggaaaggaaacaagcagagcaagcacggccctggccggcccaagggcaacaagaaccaggagaatgtgagccacctgtctgtgtcctctgccagccccaccagctctgtggccagcgctgctggcagcatcaccagcagcagcctgcagaagagccccaccctgctgagaaatggcagcctgcagagcctgtctgtgggcagcagccctgtgggcagcgagatctccatgcagtacagacatgatggagcctgccccaccaccagcatctacaacagcaatgatgtggccgtgtccttccccaacgtggtgtctggcagcggcagcagcacccctgtgagcagcagccacctgccccagcagagcagcggccacctgcagcaggtgggcgccctgagccccagcgctgtgagcagcgctgccccagctgtggccaccacccaggccaacaccctgagcggcagcagcctgagccaggcccccagccacatgtatggcaacagaagcaacagctccatggccgccctgattgcccagagcgagaacaaccagacagaccaggacctgggggacaacagcaggaacctggtgggccggggcagcagcccccggggcagcctgagccccaggagccctgtgagcagcctgcagatccgctatgaccagcccggcaacagcagcctggagaacctgccccctgtggccgccagcattgagcagctgctggagcggcagtggagcgagggccagcagttcctgctggagcagggcacccccagcgacatcctgggcatgctgaagagcctgcaccagctgcaggtggagaacagaaggctggaggagcagatcaagaacctgacagccaagaaggagcggctgcagctgctgaatgcccagctgtctgtgcccttccccaccatcacagccaaccccagccccagccaccagatccacaccttcagcgcccagacagcccccaccacagacagcctgaacagcagcaagagcccccacatcggcaacagcttcctgcctgacaacagcctgcctgtgctgaaccaggacctgaccagcagcggccagagcaccagcagcagcagcgccctgagcaccccacctcctgctggccagagccctgcccagcagggcagcggcgtgtctggagtgcagcaggtgaatggagtgacagtgggcgccctggccagcggcatgcagcctgtgaccagcaccatcccagctgtgtctgctgtgggcggcatcatcggggccctgcccggcaaccagctggccatcaatggaattgtgggcgccctgaatggagtgatgcagacccctgtgaccatgagccagaaccccacccccctgacccacaccaccgtgcccccaaatgccacccaccccatgcctgccaccctgaccaacagcgccagcggcctgggcctgctgagtgaccagcagaggcagatcctgatccaccagcagcagttccagcagctgctgaacagccagcagctgacccccaacatggtgaaggagttcagcgcccagatcatcgcctggaggccctag

SEQ ID NO: 20503 - DNA, 1620 bp, synthetic construct; identical to SEQ ID NO: 19050
  source 1..1620: mol_type = other DNA; note = Synthetic coding sequence

SEQ ID NO: 20504 - DNA, 444 bp, synthetic construct; identical to SEQ ID NO: 18869
  source 1..444: mol_type = other DNA; note = Synthetic coding sequence

SEQ ID NO: 20505 - DNA, 951 bp, synthetic construct; identical to SEQ ID NO: 19398
  source 1..951: mol_type = other DNA; note = Synthetic coding sequence

SEQ ID NO: 20506 - DNA, 951 bp, synthetic construct; identical to SEQ ID NO: 19398
  source 1..951: mol_type = other DNA; note = Synthetic coding sequence

SEQ ID NO: 20507 - DNA, 810 bp, synthetic construct; identical to SEQ ID NO: 18331
  source 1..810: mol_type = other DNA; note = Synthetic coding sequence

SEQ ID NO: 20508 - DNA, 1173 bp, synthetic construct; identical to SEQ ID NO: 18714
  source 1..1173: mol_type = other DNA; note = Synthetic coding sequence

SEQ ID NO: 20509 - DNA, 381 bp, synthetic construct
  source 1..381: mol_type = other DNA; note = Synthetic coding sequence
atgcccttcttcggcaacaccttcagccccaagaagaccccacccaggaagagcgccagcctgagcaacctgcacagcctggacaggagcacccgggaggtggagctgggcctggagtatggcagccccaccatgaacctggccggccagagcctgaagtttgaaaatggccagtggattgctgagactggagtgtctgggggcgtggacagaagagaggtgcagaggctgcggcggaggaaccagcagctggaggaggagaacaacctgctgcggctgaaggtggacatcctgctggacatgctgtctgagagcacagctgagagccacctgatggagaaggagctggatgagctgcgcatcagcaggaagaggaagtag

SEQ ID NO: 20510 - DNA, 711 bp, synthetic construct
  source 1..711: mol_type = other DNA; note = Synthetic coding sequence
atgcaggtgcaggatgatggagtgaacctgatcccctttgccaagtgcagccgggtggtgagccgcagccccccaccccggctgcccagccagagcctgcggcccatgccccagagatatggagatgtgttctggaagaacctgaaccagaggcccacccccacctggctggaggagcagcacatcccccccatgctgcgggccaccggctgcagccagctgggcctgtacccacctgagcagctgcccccacctgagatgctgtggaggaggaagaagaggcggccctgcctggagggcatgcagcagcagggcctgggcggcgtgcctgcccgggtgcgggctgtgacctaccacctggaggacctgcggcggcggcagagcatcatcaatgagctgaagaaggcccagtggggcagcagtggagctgccagcgagcctgtggtgctgggggaggagggctgcggcttccccagcaccaatgagtacccagacctggaggaggagcgggccacctacccccaggaggaggaccgcttcctgaccccaggccgggcccagctgctgtggagcccctggagccccctggaccaggaggaggcctgtgccagccggcagctgcacagcctggccagcttcagcacagtgacagcccggaggaaccccctgcacaacccctggggcatggagctggccgccagcgaggagtag

SEQ ID NO: 20511 - DNA, 1680 bp, synthetic construct
  source 1..1680: mol_type = other DNA; note = Synthetic coding sequence
atgaaccccctgtttggccccaacctcttcctgctgcagcaggagcagcagggcctggccggccccctgggggacagcctgggcggggaccactttgctgggggcggggacctgcccccagcccccctgagccctgctggccctgctgcctacagccccccaggccctggccctgcccccccagctgccatggccctgagaaatgacctgggcagcaacatcaacgtgctgaagaccctgaacctgcgcttccgctgcttcctggccaaggtgcatgagctggagaggaggaaccggctgctggagaagcagctgcagcaggccctggaggagggcaagcagggccggcggggcctgggcagaagagaccaggccgtgcagacaggctttgtgagccccatccggcccctgggcctgcagctgggcgcccggcctgctgctgtgtgcagccccagcgcccgggtgctgggcagccctgcccggagccctgctggccccctggcccccagcgctgccagcctgagcagcagcagcaccagcaccagcaccacctacagcagcagcgcccgcttcatgcctggcaccatctggagcttcagccacgcccggcggctgggccctggcctggagcccaccctggtgcagggccctggcctgtcctgggtgcacccagatggagtgggcgtgcagattgacaccatcaccccagagatccgggccctgtacaacgtgctggccaaggtgaagcgggagagagatgagtacaagaggcgctgggaggaggagtacacagtgcgcatccagctgcaggacagagtgaatgagctgcaggaggaggcccaggaggctgatgcctgccaggaggagctggccctgaaggtggagcagctgaaggccgagctggtggtgttcaagggcctgatgagcaacaacctgtctgagctggacaccaagatccaggagaaggccatgaaggtggacatggacatctgcagaagaattgacatcacagccaagctgtgtgatgtggcccagcagaggaactgtgaggacatgatccagatgttccaggtgcccagcatgggcggcaggaagcgggagaggaaggctgctgtggaggaggacaccagcctgtctgagagcgagggcccccggcagccagatggagatgaggaggagagcacagccctgagcatcaatgaggagatgcagaggatgctgaaccagctgcgggagtatgactttgaagatgactgtgacagcctgacctgggaggagacagaggagaccctgctgctgtgggaggacttcagcggctacgccatggctgctgctgaggcccagggcgagcaggaggacagcctggagaaggtgatcaaggacacagagagcctcttcaagacccgggagaaggagtaccaggagaccatcgaccagatcgagctggagctggccacagccaagaatgacatgaacagacacctgcacgagtacatggagatgtgcagcatgaagaggggcctggatgtgcagatggagacctgccggcggctcatcacccagagcggggacaggaagagccctgccttcaccgctgtgcccctgagtgaccccccacctcctccttctgaggccgaggacagcgacagagatgtgtccagtgacagctccatgaggtag

SEQ ID NO: 20512 - DNA, 1182 bp, synthetic construct
  source 1..1182: mol_type = other DNA; note = Synthetic coding sequence
atggccagcggccgggcccgctgcaccaggaagctgaggaactgggtggtggagcaggtggagagcggccagtttcctggggtgtgctgggatgacacagccaagaccatgttccgcatcccctggaagcatgctgggaagcaggacttccgggaggaccaggatgctgccttcttcaaggcctgggccatcttcaagggcaagtacaaggagggggacaccggcggccctgctgtgtggaagacccggctgcgctgtgccctgaacaagagcagcgagttcaaggaggtgcctgagcggggccgcatggatgtggccgagccctacaaggtgtaccagctgctgcccccaggcatcgtgtctggccagcccggcacccagaaggtgcccagcaagaggcagcacagctctgtgagcagcgagaggaaggaggaggaggatgccatgcagaactgcaccctgagccccagcgtgctgcaggacagcctgaacaatgaggaggagggcgccagcggcggcgctgtgcacagcgacatcggcagcagcagcagcagcagcagccctgagccccaggaggtgacagacaccacagaggcccccttccagggcgaccagaggagcctggagttcctgctgcccccagagccagactacagcctgctgctgaccttcatctacaacggccgggtggtgggggaggcccaggtgcagagcctggactgccgcctggtggccgagcccagcggcagcgagagctccatggagcaggtgctcttccccaagccaggccccctggagcccacccagaggctgctgagccagctggagcggggcatcctggtggccagcaacccccggggcctgtttgtgcagaggctgtgccccatccccatctcctggaatgccccccaggcccctcctggccctggcccccacctgctgcccagcaatgaatgtgtggagctgttcagaacagcctacttctgccgggacctggtgcgctacttccagggcctgggccccccacccaagttccaggtgaccctgaacttctgggaggagagccacggcagcagccacaccccccagaacctgatcaccgtgaagatggagcaggcctttgcccgctacctgctggagcagaccccagagcagcaggccgccatcctgagcctggtgtag

SEQ ID NO: 20513 - DNA, 2454 bp, synthetic construct
  source 1..2454: mol_type = other DNA; note = Synthetic coding sequence
atgtggagcctgacagccagcgagggggagagcaccacagcccacttcttcctgggcgctggagatgagggcctgggcacccggggcatcggcatgaggcctgaggagagtgacagcgagctgctggaggatgaggaggatgaggtgcccccagagccccagatcatcgtgggcatctgtgccatgaccaagaagagcaagagcaagcccatgacccagatcctggagcggctgtgccgctttgactacctgactgtggtgatcctgggagaagatgtgatcctgaatgaacctgtggagaactggcccagctgccactgcctgatctccttccacagcaagggcttccccctggacaaggctgtggcctacagcaagctgaggaaccccttcctgatcaatgacctggccatgcagtactacatccaggacagaagagaggtgtaccgcatcctgcaggaggagggcatcgacctgcccaggtatgctgtgctgaacagagatcctgcccggcctgaggagtgcaacctgattgaaggagaggaccaggtggaggtgaatggagctgtgttccccaagccctttgtggagaagcctgtgtctgctgaggaccacaacgtgtacatctactaccccagcagcgctgggggcggcagccagaggctcttcaggaagattggcagccgcagctctgtgtacagccctgagagctctgtgaggaagacaggcagctacatctatgaggagttcatgcccacagatggaacagatgtgaaggtgtacacagtgggccctgactatgcccacgccgaggccaggaagagccctgccctggatggcaaggtggagcgggacagcgagggcaaggagatccagtaccctgtgatgctgacagccatggagaagctggtggccaggaaggtgtgtgtggccttcaagcagacagtgtgtggctttgacctgctgcgggccaacggccacagctttgtgtgtgatgtgaatggcttctcctttgtgaagaacagcatgaagtactatgatgactgtgccaagatcctgggcaacaccatcatgagggagctggccccccagttccagatcccctggagcatccccacagaagctgaggacatccccatcgtgcccaccaccagcggcaccatgatggagctgcgctgtgtgattgccatcatccgccacggggacaggacccccaagcagaagatgaagatggaggtgaagcacccccgcttctttgccctgtttgagaagcatggaggctacaagacaggcaagctgaagctgaagaggcctgagcagctgcaggaggtgctggacatcacccggctgctgctggccgagctggagaaggagcctggaggagaaattgaggagaagacaggcaagctggagcagctgaagtctgtgctggagatgtatggccacttcagcggcatcaacaggaaggtgcagctgacctactacccccatggagtgaaggccagcaatgaaggccaggacccccagcgggagaccctggcccccagcctgctgctggtgctgaagtggggcggggagctgaccccagctggccgggtgcaggccgaggagctgggccgggccttccgctgcatgtacccaggcggccagggcgactatgccggcttccctggctgcggcctgctgcggctgcacagcaccttcagacatgacctgaagatctatgccagtgatgagggccgggtgcagatgacagctgctgcctttgccaagggcctgctggccctggagggggagctgacccccatcctggtgcagatggtgaagagcgccaacatgaatggcctgctggacagtgatggagacagcctgagcagctgccagcaccgggtgaaggcccggctgcaccacatcctgcagcaggatgccccctttggacctgaggactatgaccagctggcccccaccaggagcaccagcctgctgaacagcatgaccatcatccagaaccctgtgaaggtgtgtgaccaggtgtttgccctgattgagaacctgacccaccagatccgggagaggatgcaggaccccaggtctgtggacctgcagctgtaccacagcgagaccctggagctgatgctgcagcgctggagcaagctggagcgggacttccggcagaagagcggccgctatgacatcagcaagatcccagacatctatgactgtgtgaagtatgatgtgcagcacaacggcagcctgggcctgcagggcacagctgagctgctgcggctgagcaaggccctggctgatgtggtgatcccccaggagtatggcatcagccgggaggagaagctggagattgctgtgggcttctgcctgcccctgctgaggaagatcctgctggacctgcagaggacccatgaagatgagagcgtgaacaagctgcaccccctgtag

SEQ ID NO: 20514 - DNA, 417 bp, synthetic construct; identical to SEQ ID NO: 18355
  source 1..417: mol_type = other DNA; note = Synthetic coding sequence

SEQ ID NO: 20515 - DNA, 4302 bp, synthetic construct; identical to SEQ ID NO: 18796
  source 1..4302: mol_type = other DNA; note = Synthetic coding sequence

SEQ ID NO: 20516 - DNA, 435 bp, synthetic construct
  source 1..435: mol_type = other DNA; note = Synthetic coding sequence
atggccgaggtgcaggtgctggtgctggatggccggggccacctgctgggccgcctggccgccatcgtggccaagcaggtgctgctgggcaggaaggtggtggtggtgcgctgtgagggcatcaacatcagcggcaacttctacagaaacaagctgaagtacctggccttcctgaggaagaggatgaacaccaaccccagccggggcccctaccacttccgggcccccagccgcatcttctggaggacagtgcggggcatgctgccccacaagaccaagaggggccaggccgccctggaccggctgaaggtgtttgatggcatccccccaccctacggcaaccggcccaggaggacctggaggaggaagctgaccaacacccagaggagcagccggcccacagacagctggagcgagcccaacaaggactgctag

SEQ ID NO: 20517 - DNA, 408 bp, synthetic construct
  source 1..408: mol_type = other DNA; note = Synthetic coding sequence
atggccgccctgcggcccctggtgaagcccaagatcgtgaagaagaggaccaagaagttcatccgccaccagagcgaccgctacgtgaagatcaagaggaactggaggaagccccggggcatcgacaacagagtgagaagacgcttcaagggccagatcctgatgcccaacatcggctacggcagcaacaagaagaccaagcacatgctgcccagcggcttcaggaagttcctggtgcacaacgtgaaggagctggaggtgctgctgatgtgcaacaagagctactgtgccgagatcgcccacaacgtgagcagcaagaacaggaaggccatcgtggagagagctgcccagctggccatccgggtgaccaaccccaatgcccggctgcggagtgaagaaaatgaatag

SEQ ID NO: 20518 - DNA, 408 bp, synthetic construct; identical to SEQ ID NO: 20517
  source 1..408: mol_type = other DNA; note = Synthetic coding sequence

SEQ ID NO: 20519 - DNA, 684 bp, synthetic construct
  source 1..684: mol_type = other DNA; note = Synthetic coding sequence
atggagccccagggctacccagccttcggctgggaccacagcctgcacaagaggaagaggctgccccctgtgaagaggagcctggtgtactacctgaagaaccgggaggtgcggctgcagaatgagaccagctacagccgggtgctgcacggctatgctgcccagcagctgcccagcctgctgaaggagcgggagttccacctgggcaccctgaacaaggtgtttgccagccagtggctgaaccaccggcaggtggtgtgtggcaccaagtgcaacaccctgtttgtggtggatgtgcagaccagccagatcaccaagatccccatcctgaaggaccgggagcctggaggagtgacccagcagggctgcggcatccacgccatcgagctgaaccccagcaggaccctgctggccactggaggagacaaccccaacagcctggccatctaccgcctgcccaccctggaccctgtgtgtgtgggagatgatggccacaaggactggatcttcagcatcgcctggatcagtgacaccatggctgtgtctggcagcagagatggctccatgggcctgtgggaggtgacagatgatgtgctgaccaagagtgatgcccggcacaacgtgtcccgggtgcctgtgtatgcccacatcacccacaaggccctgaaggacatccccaagtag

SEQ ID NO: 20520 - DNA, 1554 bp, synthetic construct
  source 1..1554: mol_type = other DNA; note = Synthetic coding sequence
atgacccggctgggcaccgtgcccaggaaggccctggagatgagctgtgccatccagaaccagctggcccgcatcctggccgagtttgagatgaccctggagagagatgtgctgcagcccctgagccggctgtctgaggaggagctgcctgccatcctgaagcacaagaagagcctgcagaagctggtgtctgactggaacaccctgaagagccggctgagccaggccaccaagaacagcggcagcagccagggcctgggcggcagccctggcagccacagccacaccaccatggccaacaaggtggagaccctgaaggaggaggaggaggagctgaagaggaaggtggagcagtgcagagatgagtacctggccgacctgtaccactttgtgaccaaggaggacagctatgccaactacttcatccggctgctggagatccaggccgactaccacagaagaagcctgagcagcctggacacagccctggccgagctgcgggagaaccacggccaggccgaccacagccccagcatgacagccacccacttcccccgggtgtatggagtgtccctggccacccacctgcaggagctgggccgggagatcgccctgcccatcgaggcctgtgtgatgatgctgctgtctgagggcatgaaggaggagggcctcttccggctggccgccggggcctctgtgctgaagaggctgaagcagaccatggccagtgacccccacagcctggaggagttctgcagcgacccccatgctgtggccggggccctgaagagctacctgcgggagctgcctgagcccctgatgacctttgacctgtatgatgactggatgagagctgccagcctgaaggagcccggggcccggctgcaggccctgcaggaggtgtgcagccggctgcccccagagaacctgagcaacctgcgctacctgatgaagttcctggcccggctggccgaggagcaggaggtgaacaagatgacccccagcaacatcgccatcgtgctgggccccaacctgctgtggcccccagagaaggagggggaccaggcccagctggatgctgcctctgtgagcagcatccaggtggtgggcgtggtggaggccctgatccagagcgctgacaccctcttccctggggacatcaacttcaacgtgtctggcctcttctctgctgtgaccctgcaggacacagtgtctgaccggctggccagcgaggagctgcccagcacagctgtgcccaccccagccaccaccccagccccagccccagccccagccccagccccagccccagccctggccagcgctgccaccaaggagaggacagagagcgaggtgccccccaggcctgccagccccaaggtgaccaggagccccccagagacagctgcccctgtggaggacatggcccggcgcagccccaggggggccaccggcaggaaggagagatttgcctgcagctatggaacagacagcagcctggccgacatgttctttgtgcggctggtgaacaagctgttctggaccaagctgtag

SEQ ID NO: 20521 - DNA, 918 bp, synthetic construct; identical to SEQ ID NO: 18761
  source 1..918: mol_type = other DNA; note = Synthetic coding sequence

SEQ ID NO: 20522 - DNA, 927 bp, synthetic construct
  source 1..927: mol_type = other DNA; note = Synthetic coding sequence
atgattcatgatgcccagatggactactacggcacccggctggccacctgcagcagtgacagatctgtgaagatctttgatgtgagaaatggaggccagatcctgattgctgacctgcggggccacgagggccctgtgtggcaggtggcctgggcccaccccatgtatggcaacatcctggccagctgcagctatgacaggaaggtgatcatctggagagaagaaaatggcacctgggagaagagccatgaacatgctggccatgacagctctgtgaacagcgtgtgctgggcccctcatgactatggcctcatcctggcctgtggcagcagtgatggagccatcagcctgctgacctacacaggagagggccagtgggaggtgaagaagatcaacaatgcccacaccatcggctgcaatgctgtgtcctgggccccagctgtggtgcccggcagcctgattgaccaccccagcggccagaagcccaactacatcaagagatttgccagcggcggctgtgacaacctgatcaagctgtggaaggaggaggaggatggccagtggaaggaggagcagaagctggaggcccacagcgactgggtgagagatgtggcctgggcccccagcatcggcctgcccaccagcaccatcgccagctgcagccaggacggccgggtcttcatctggacctgtgatgatgccagcagcaacacctggagccccaagctgctgcacaagttcaatgatgtggtgtggcacgtgtcctggagcatcacagccaacatcctggccgtgtctggaggagacaacaaggtgaccctgtggaaggagagcgtggatggccagtgggtgtgcatcagtgatgtgaacaagggccagggctctgtgtctgcctctgtgacagagggccagcagaatgagcagtag

SEQ ID NO: 20523 - DNA, 1542 bp, synthetic construct
  source 1..1542: mol_type = other DNA; note = Synthetic coding sequence
atgagcattgaaattgagagcagtgatgtgatccgcctcatcatgcagtacctgaaggagaacagcctgcaccgggccctggccaccctgcaggaggagaccaccgtgtccctgaacacagtggacagcattgagagctttgtggccgacatcaacagcggccactgggacacagtgctgcaggccatccagagcctgaagctgcctgacaagaccctgattgacctgtatgagcaggtggtgctggagctgattgagctgcgggagctgggcgccgcccggagcctgctgcggcagacagaccccatgatcatgctgaagcagacccagcctgagcgctacatccacctggagaacctgctggcccggagctactttgacccccgggaggcctacccagatggcagcagcaaggagaagagaagagctgccatcgcccaggccctggccggggaggtgtctgtggtgccccccagccggctgatggccctgctgggccaggccctgaagtggcagcagcaccagggcctgctgcccccaggcatgaccatcgacctcttccggggcaaggctgctgtgaaggatgtggaggaggagaagttccccacccagctgagccgccacatcaagtttggccagaagagccacgtggagtgtgcccgcttctccccagatggccagtacctggtgactggatctgtggatggcttcatcgaggtgtggaacttcaccaccgggaagatcaggaaggacctgaagtaccaggcccaggacaacttcatgatgatggatgatgctgtgctgtgcatgtgcttcagccgggacacagagatgctggccactggagcccaggacggcaagatcaaggtgtggaagatccagagcggccagtgcctgcggagatttgagcgggcccacagcaagggcgtgacctgcctgtccttcagcaaggacagcagccagatcctgagcgccagctttgaccagaccatccgcatccacggcctgaagagcggcaagaccctgaaggagttccggggccacagcagctttgtgaatgaggccaccttcacccaggacggccactacatcatcagcgccagcagtgatggcaccgtgaagatctggaacatgaagaccacagagtgcagcaacaccttcaagagcctgggcagcacagctggaacagacatcaccgtgaacagcgtcatcctgctgcccaagaaccctgagcactttgtggtgtgcaacagaagcaacacagtggtgatcatgaacatgcagggccagatcgtgcgctccttcagcagcggcaagcgggagggcggggactttgtgtgctgtgccctgagccccagaggagagtggatctactgtgtgggggaggactttgtgctgtactgcttcagcacagtgacaggcaagctggagaggaccctgactgtgcatgagaaggatgtgattggcatcgcccaccacccccaccagaacctgattgccacctacagtgaagatggcctgctgaagctgtggaagccctag

SEQ ID NO: 20524 - DNA, 2136 bp, synthetic construct
  source 1..2136: mol_type = other DNA; note = Synthetic coding sequence
atgagctctgtgcagagccagcaggagcagctgagccagagcgaccccagccccagccccaacagctgcagcagctttgagctgattgacatggatgctggcagcctgtatgagcctgtgagcccccactggttctactgcaagatcatcgacagcaaggagacctggatccccttcaacagcgaggacagccagcagctggaggaggcctacagcagcggcaagggctgcaatggccgggtggtgcccacagatggcggccgctatgatgtgcacctgggggagaggatgagatatgctgtgtactgggatgagctggccagcgaggtgcggcgctgcacctggttctacaagggggacaaggacaacaagtatgtgccctacagcgagagcttcagccaggtgctggaggagacctacatgctggccgtgaccctggatgagtggaagaagaagctggagagccccaaccgggagatcatcatcctgcacaaccccaagctgatggtgcactaccagcctgtggccggcagtgatgactggggcagcacccccacagagcagggccggcccaggacagtgaagaggggcgtggagaacatctctgtggacatccactgtggggagcccctgcagattgaccacctggtgtttgtggtgcatggaattggccctgcctgtgacctgcgcttccgcagcatcgtgcagtgtgtgaatgacttccgctctgtgtccctgaacctgctgcagacccacttcaagaaggcccaggagaaccagcagatcggccgggtggagttcctgcctgtgaactggcacagccccctgcacagcactggagtggatgtggacctgcagaggatcaccctgcccagcatcaaccggctgcggcacttcaccaatgacaccatcctggatgtgttcttctacaacagccccacctactgccagaccatcgtggacacagtggccagcgagatgaaccgcatctacaccctcttcctgcagagaaatccagacttcaagggcggcgtgtccattgctggccacagcctgggcagcctcatcctgtttgacatcctgaccaaccagaaggacagcctgggggacattgattctgagaaggacagcctgaacatcgtgatggaccagggcgacacccccaccctggaggaggacctgaagaagctgcagctgtctgagttctttgacatctttgagaaggagaaggtggacaaggaggccctggccctgtgcacagaccgggacctgcaggagatcggcatccccctgggccccaggaagaagatcctgaactacttcagcaccaggaagaacagcatgggcatcaagaggcctgccccccagcctgccagcggggccaacatccccaaggagagcgagttctgcagcagcagcaacaccagaaatggagactacctggatgtgggcatcggccaggtgtctgtgaagtaccccaggctcatctacaagccagagatcttctttgccttcggcagccccatcggcatgttcctgactgtgcggggcctgaagagaattgaccccaactaccgcttccccacctgcaagggcttcttcaacatctaccacccctttgatcctgtggcctacagaattgagcccatggtggtgcctggggtggagtttgagcccatgctgatcccccaccacaagggcaggaagaggatgcacctggagctgcgggagggcctgaccaggatgtccatggacctgaagaacaacctgctgggcagcctgaggatggcctggaagagcttcacccgggccccctacccagccctgcaggccagcgagaccccagaggagacagaggccgagcctgagagcaccagcgagaagcccagtgatgtgaacacagaggagacctctgtggccgtgaaggaggaggtgctgcccatcaacgtgggcatgctgaatggaggccagagaattgattatgtgctgcaggagaagcccatcgagagcttcaatgagtacctgtttgccctgcagagccacctgtgctactgggagagcgaggacacagtgctgctggtgctgaaggagatctaccagacccagggcatcttcctggaccagcccctgcagtag

SEQ ID NO: 20525 - DNA, 3351 bp, synthetic construct; identical to SEQ ID NO: 19573
  source 1..3351: mol_type = other DNA; note = Synthetic coding sequence

SEQ ID NO: 20526 - DNA, 1233 bp, synthetic construct
  source 1..1233: mol_type = other DNA; note = Synthetic coding sequence
atgcagaacatccacggcaaggagattgacctgctgcggaccaccgtgaaggtgcctgggaagaggctgccccgggccaccccagccacagcccctggcaccagcccccgggccaacggcctgtctgtggagaggagcaacacccagctgggcggcggcacagccagcggccctgctgaggtgctgagcagcagccccaagctggaccccccacccagcccccacagcaacaggaagaagcacaggaggaagaagagcacaggcacccccaggccagatggccccagcagcgccacagaggaggccgaggagagctttgaatttgtggtggtgtccctgaccggccagacctggcactttgaggccagcacagctgaggagcgggagctgtgggtgcagagcgtgcaggcccagatcctggccagcctgcagggctgccgcagcgccaaggacaagacccggctgggcaaccagaatgctgccctggccgtgcaggccgtgaggacagtgcggggcaacagcttctgcatcgactgtgatgcccccaacccagactgggccagcctgaacctgggcgccctgatgtgcatcgagtgcagcggcatccaccgccacctgggcgcccacctgagccgggtgcgcagcctggacctggatgactggcccccagagctgctggccgtgatgacagccatgggaaatgccctggccaacagcgtgtgggagggcgccctgggcggctacagcaagccaggcccagatgcctgccgggaggagaaggagcgctggatccgggccaagtatgagcagaagctgttcctggcccccctgcccagcagtgatgtgcccctgggccagcagctgctgcgggctgtggtggaggatgacctgcggctgctggtgatgctgctggcccacggcagcaaggaggaggtgaatgagacctatggagatggagatggccgcacagccctgcacctgagcagcgccatggccaacgtggtgttcacccagctgctgatctggtatggagtggatgtgcgcagcagagatgcccggggcctgacccccctggcctatgcccggcgggccggcagccaggagtgtgccgacatcctgatccagcacggctgccctggagagggctgcggcctggcccccacccccaaccgggagcccgccaacggcaccaaccccagcgctgagctgcacaggagccccagcctgctgtag

SEQ ID NO: 20527 - DNA, 492 bp, synthetic construct
  source 1..492: mol_type = other DNA; note = Synthetic coding sequence
atgtctgacagccctgctggcagcaaccccaggaccccagagagcagcggcagcggcagcggcggcggcggcaagaggcctgctgtgcctgctgctgtgtccctgctgcccccagctgaccccctgcggcaggccaaccggctgcccatccgggtgctgaagatgctgagcgcccacacaggccacctgctgcaccctgagtacctgcagcccctgagcagcacccctgtgagccccatcgagctggatgccaagaagagccccctggccctgctggcccagacctgcagccagatcggcagccctggcagcctgagcctgaggaacccccacaccctgggcctgagccgctaccacccctacggcaagagccacctgagcacagctgggggcctggccgtgcccagcctgcccacagctggcccctactacagcccctatgccctgtatggccagaggctggccagcgccagcgccctgggctaccagtag

SEQ ID NO: 20528 - DNA, 2736 bp, synthetic construct
  source 1..2736: mol_type = other DNA; note = Synthetic coding sequence
atgaacttccaggccggcggcggccagagcccccagcagcagcagagcctggccgcccctgggggcggcggggccgccgcccagcagctggtgtgtggcggccagtttggaggagctggccctggagctgggggcggcggcggccccagccagcagctggccggcggccccccccagcagtttgccctgagcaacagcgctgccatccgggcagagatccagagatttgagagcgtgcaccccaacatctatgccatctatgacctgattgaaagaattgaggacctggccctgcagaaccagatccgggagcacgtgatcagcattgaggacagctttgtgaacagccaggagtggaccctgagccgctctgtgcctgagctgaaggtgggcatcgtgggcaacctgagcagcggcaagagcgccctggtgcaccgctacctgaccggcacctacgtgcaggaggagagccctgagggcggccgcttcaagaaggagatcgtggtggatggccagagctacctgctgctgatcagagatgagggcggccccccagagctgcagtttgctgcctgggtggatgctgtggtgtttgtgttcagcctggaggatgagatctccttccagacagtgtacaactacttcctgcggctgtgcagcttcagaaatgccagcgaggtgcccatggtgctggtgggcacccaggatgccatctctgctgccaacccccgggtgattgatgacagccgggccaggaagctgagcacagacctgaagcgctgcacctactatgagacctgtgccacctacggcctgaatgtggagagggtcttccaggatgtggcccagaaggtggtggccctgaggaagaagcagcagctggccatcggcccctgcaagagcctgcccaacagccccagccacagcgctgtgtctgctgccagcatcccagctgtgcacatcaaccaggccaccaacggcggcggcagcgccttcagtgactacagcagctctgtgcccagcacccccagcatcagccagcgggagctgcgcatcgagaccatcgccgccagcagcacccccacccccatcaggaagcagagcaagaggaggagcaacatcttcaccagcaggaaaggagctgacctggaccgggagaagaaggctgctgagtgcaaggtggacagcatcggcagcggccgggccatccccatcaagcagggcatcctgctgaagaggtctgggaagagcctgaacaaggagtggaagaagaagtatgtgaccctgtgtgacaatggcctgctgacctaccaccccagcctgcatgactacatgcagaacatccacggcaaggagattgacctgctgcggaccaccgtgaaggtgcctgggaagaggctgccccgggccaccccagccacagcccctggcaccagcccccgggccaacggcctgtctgtggagaggagcaacacccagctgggcggcggcaccggggccccccacagcgccagcagcgccagcctgcacagcgagcggcccctgagcagcagcgcctgggccggccccaggcctgagggcctgcaccagaggagctgcagcgtgtcctctgctgaccagtggagcgaggccaccaccagcctgcccccaggcatgcagcacccagccagcggccctgctgaggtgctgagcagcagccccaagctggaccccccacccagcccccacagcaacaggaagaagcacaggaggaagaagagcacaggcacccccaggccagatggccccagcagcgccacagaggaggccgaggagagctttgaatttgtggtggtgtccctgaccggccagacctggcactttgaggccagcacagctgaggagcgggagctgtgggtgcagagcgtgcaggcccagatcctggccagcctgcagggctgccgcagcgccaaggacaagacccggctgggcaaccagaatgctgccctggccgtgcaggccgtgaggacagtgcggggcaacagcttctgcatcgactgtgatgcccccaacccagactgggccagcctgaacctgggcgccctgatgtgcattgaatgttctggcatccaccgccacctgggcgcccacctgagccgggtgcgcagcctggacctggatgactggcccccagagctgctggccgtgatgacagccatgggaaatgccctggccaacagcgtgtgggagggcgccctgggcggctacagcaagccaggcccagatgcctgccgggaggagaaggagcgctggatccgggccaagtatgagcagaagctgttcctggcccccctgcccagcagtgatgtgcccctgggccagcagctgctgcgggctgtggtggaggatgacctgcggctgctggtgatgctgctggcccacggcagcaaggaggaggtgaatgagacctatggagatggagatggccgcacagccctgcacctgagcagcgccatggccaacgtggtgttcacccagctgctgatctggtacggcgtggatgtgcgcagcagagatgcccggggcctgacccccctggcctatgccaggagagctggcagccaggagtgtgccgacatcctgatccagcacggctgccctggagagggctgcggcctggcccccacccccaaccgggagcccgccaacggcaccaaccccagcgctgagctgcacaggagccccagcctgctgtag

SEQ ID NO: 20529 - DNA, 1059 bp, synthetic construct; identical to SEQ ID NO: 20256
  source 1..1059: mol_type = other DNA; note = Synthetic coding sequence

SEQ ID NO: 20530 - DNA, 507 bp, synthetic construct
  source 1..507: mol_type = other DNA; note = Synthetic coding sequence
atgacagccaccctgcggccctacctgtctgctgtgcgggccaccctgcaggccgccctgtgcctggagaacttcagcagccaggtggtggagcggcacaacaagccagaggtggaggtgcgcagcagcaaggagctgctgctgcagcctgtgaccatcagcagaaatgagaaggagaaggtgctgattgagggcagcatcaacagcgtgcgggtgtccattgctgtgaagcaggctgatgaaattgagaagatcctgtgccacaagttcatgaggttcatgatgatgagagctgagaacttcttcatcctgcggaggaagcctgtggagggctatgacatctccttcctgatcaccaacttccacacagagcagatgtacaagcacaagctggtggactttgtgatccacttcatggaggagattgacaaggagatcagcgagatgaagctgtctgtgaatgcccgggccagaattgtggccgaggagttcctgaagaacttctag

SEQ ID NO: 20531 - DNA, 993 bp, synthetic construct
  source 1..993: mol_type = other DNA; note = Synthetic coding sequence
atggagcgcttcatggagcaggtggtgttcaagtacctgcgggcagagcctgaggaccactacttcctgatgacagagccccccctgaacaccccagaaaatcgggagtacctggccgagatcatgtttgagagcttcaacgtgcccggcctgtacatcgctgtgcaggccgtgctggccctggccgcctcctggaccagccggcaggtgggggagaggaccctgaccggcatcgtcatcgacagcggagatggagtgacccacgtgattcctgtggccgagggctacgtgattggcagctgcatcaagcacatccccatcgccggccgggacatcacctacttcatccagcagctgctgcgggagcgggaggtgggcatccccccagagcagagcctggagacagccaaggccatcaaggagaagtactgctacatctgcccagacatcgtgaaggagtttgccaagtatgatgtggaccccaggaagtggatcaagcagtacacaggcatcaatgccatcaaccagaagaagtttgtgattgatgtgggctatgagcgcttcctgggccctgagatcttcttccaccctgagtttgccaacccagacttcatggagagcatcagtgatgtggtggatgaagtcatccagaactgccccattgatgtgcggcggcccctgtacaagaatgtggtgctgagcggcggcagcaccatgttccgggactttggaagaaggctgcagagggacctgaagagggtggtggatgcccggctgcggctgtctgaggagctgagcggcggccgcatcaagcccaagcctgtggaggtgcaggtggtgacccaccacatgcagagatatgctgtgtggtttggaggctccatgctggccagcaccccagagttcttccaggtgtgccacaccaagaaggactatgaggagtatggccccagcatctgccgccacaaccctgtgtttggagtgatgtcctag

SEQ ID NO: 20532 - DNA, 894 bp, synthetic construct
  source 1..894: mol_type = other DNA; note = Synthetic coding sequence
atgaagaccctgagcccagaccgcatccagccccacatcatgacagatgtgcctgccaccttcacccaggctgaatgtaatggagacaagcccccagaaaatggccagcagaccatcaccaagatcagcgaggagctgacagatgtggacagccccctgccccactacagagtggagcccagcctggagggcgccctgaccaagggcagccaggaggagaggaggaagctgcagggcaacatgctgctgaacagctccatggaggacaagatgctgaaggagaaccctgaggagaagctgttcatcgtgcacaaggccatcacagacctgagcctgcaggagaccagcgcagatgagatgaccttccgggagggccaccagtgggagaagatccccctgagcggcagcaaccaggagatccggcggcagaaggagcgcatcacagagcagcccctgaaggaggaggaggatgaggacaggaagaacaagggccaccaggccgctgagattgagtggctgggcttcaggaagcccagccaggccgacatgctgcacagcaagcatgatgaggagcagaaggtgtgggatgaggagattgatgatgatgatgatgacaactgcaacaatgatgaagatgaggtgcgggtgattgagttcaagaagaagcatgaggaggtgtcccagttcaaggaggagggagatgccagcgaggacagccccctgagcagcgccagcagccaggccgtgaccccagatgagcagcccaccctgggcaagaagagtgacatcagcagaaatgcctacagccgctacaacaccatctcctacaggaagatcagaaaaggaaacaccaagcagagaattgatgaatttgagagcatgatgcacctgtag

SEQ ID NO: 20533 - DNA, 1074 bp, synthetic construct
  source 1..1074: mol_type = other DNA; note = Synthetic coding sequence
atggtgcagcccttcaccaccatccccttccccccaccaccccagaatggcatccccacagaatatggagtgccccacacccaggactatgccggccagacaggagagcacaacctgaccctgtatggcagcacccaggcccacggggagcagagcagcaacagccccagcacccagaatggcagcctgacccagacagagggcggggcccagacagatggccagcagagccagacccagagcagtgaaaattctgagagcaagagcacccccaagaggctgcacgtgagcaacatccccttccgcttccgggaccctgacctgcggcagatgtttggccagtttgggaagatcctggatgtggagatcatcttcaatgaaagaggcagcaaaggatttggatttgtgacctttgaaaattctgcagatgctgaccgggcccgggagaagctgcacggcaccgtggtggagggcaggaagattgaggtgaacaatgccacagcccgggtgatgaccaacaagaagatggtgaccccctatgccaacggctggaagctgagccctgtggtgggcgctgtgtatggccctgagctgtatgctgccagcagcttccaggctgatgtgtccctgggcaatgatgctgctgtgcccctgagcggccggggcggcatcaacacctacatccccctcatcatccctggcttcccctaccccacagctgccaccacagctgctgccttccggggggcccacctgcggggccggggccgcacagtgtatggagctgtgcgggctgtgcccccaacagccatcccagcctacccaggagtggtgtaccaggacggcttctacggggctgacctgtatggaggctatgctgcctaccgctatgcccagcctgccacagccacagctgccacagctgctgctgctgctgctgctgcctacagtgatggctacggccgggtgtacacagctgacccctaccacgccctggccccagctgccagctatggagtgggcgctgtggccagcctgtacagaggaggctacagcagatttgccccctactag

SEQ ID NO: 20534 - DNA, 387 bp, synthetic construct
  source 1..387: mol_type = other DNA; note = Synthetic coding sequence
atggtgcagcccttcaccaccatccccttccccccaccaccccagaatggcatccccacagaatatggagtgccccacacccaggactatgccggccagacaggagagcacaacctgaccctgtatggcagcacccaggcccacggggagcagagcagcaacagccccagcacccagaatggcagcctgaccacagaaggaggagcccagacagatggccagcagagccagacccagagcagcgagaacagcgagagcaagagcacccccaagaggctgcacgtgagcaacatccccttccgcttccgggaccctgacctgcggcagatgtttggatttgggaagatcctggatgtggagatcatcttcaatgaaagaggcagctag

SEQ ID NO: 20535 - DNA, 1071 bp, synthetic construct
  source 1..1071: mol_type = other DNA; note = Synthetic coding sequence
atgcagggcatcctgctgctggtgtttgccaagtaccagcacctgccctacatccagatcctgagcaccaagagcacccccaccggcctgtttggctactggggcaacaagggcggcgtgaacatctgcctgaagctgtatggctactacgtgtccatcatcaactgccacctgcccccccacatcagcaacaactaccagaggctggagcactttgaccgcatcctggagatgcagaactgtgagggccgggacatccccaacatcctggaccatgacctgatcatctggtttggagacatgaacttcagaattgaggactttggcctgcactttgtgcgggagagcatcaagaaccgctgctacggcggcctgtgggagaaggaccagctgagcatcgccaagaagcatgaccccctgctgcgggagttccaggagggccgcctgctcttcccccccacctacaagtttgacaggaacagcaatgactatgacaccagcgagaagaagaggaagccagcctggacagaccgcatcctgtggaggctgaagaggcagccctgtgccggccctgacacccccatccccccagccagccacttcagcctgagcctgcggggctacagcagccacatgacctacggcatcagtgaccacaagcctgtgtctggcacctttgacctggagctgaagcccctggtgtctgcccccctgattgtgctgatgcctgaggacctgtggacagtggagaatgacatgatggtgtcctacagcagcaccagtgacttccccagcagcccctgggactggattggcctgtacaaggtgggcctgagagatgtgaatgactatgtgtcctatgcctgggtgggggacagcaaggtgtcctgcagcgacaacctgaaccaggtgtacatcgacatcagcaacatccccaccacagaagatgagttcctgctgtgctactacagcaacagcctgcggtctgtggtgggcatcagccggcccttccagatccccccaggcagcctgcgggaggaccccctgggggaggcccagccccagatctag

SEQ ID NO: 20536 - DNA, 1752 bp, synthetic construct; identical to SEQ ID NO: 19484
  source 1..1752: mol_type = other DNA; note = Synthetic coding sequence

SEQ ID NO: 20537 - DNA, 1329 bp, synthetic construct
  source 1..1329: mol_type = other DNA; note = Synthetic coding sequence
atggccaacagctttgctgcccgcatcttcaccaccctgagtgacctgcagaccaacatggccaacctgaaggtgattggcatcgtcatcggcaagacagatgtgaagggcttcccagacaggaagaacatcggcagcgagcgctacaccttctccttcaccatccgggacagccctgcccactttgtgaatgctgcctcctggggcaatgaagactacatcaagagcctgagtgacagcttccgggtgggggactgtgtgatcatcgagaaccccctcatccagaggaaggagattgagcgggaggagaagttctccccagccacccccagcaactgcaagctgctgctgtctgagaaccacagcacagtgaaggtgtgcagcagctatgaggtggacaccaagctgctgagcctcatccacctgcctgtgaaggagagccatgactactacagcctgggggacatcgtggccaacggccacagcctgaatggccgcatcatcaacgtgctggccgctgtgaagtctgtgggggagcccaagtacttcaccaccagtgacaggaggaagggccagagatgtgaggtgcggctgtatgatgaaacagagagcagctttgccatgacctgctgggacaatgaaagcatcctgctggcccagagctggatgccccgggagaccgtcatctttgccagtgatgtgcgcatcaactttgacaagttcaggaactgcatgacagccaccgtcatcagcaagaccatcatcaccaccaacccagacatccctgaggccaacatcctgctgaacttcatccgggagaacaaggagaccaacgtgctggatgatgaaattgacagctacttcaaggagagcatcaacctgagcaccatcgtggatgtgtacacagtggagcagctgaagggcaaggccctgaagaatgaaggcaaggctgaccccagctatggcatcctgtatgcctacatcagcaccctgaacattgatgatgagaccaccaaggtggtgaggaaccgctgcagcagctgtggctacatcgtgaatgaggccagcaacatgtgcaccacctgcaacaagaacagcctggacttcaagtctgtgttcctgtccttccacgtgctgattgacctgacagaccacacaggcaccctgcacagctgcagcctgactggatctgtggccgaggagaccctgggctgcacctttgtgctgagccaccgggcccggagcggcctgaagatctctgtgctgagctgcaagctggccgaccccacagaggccagcaggaacctgagcggccagaagcacgtgtag

SEQ ID NO: 20538 - DNA, 627 bp, synthetic construct
  source 1..627: mol_type = other DNA; note = Synthetic coding sequence
atggccggcacagcccggcatgaccgggagatggccatccaggccaagaagaagctgaccacagccacagaccccatcgagcggctgcggctgcagtgcctggcccggggcagcgctggcatcaagggcctgggccgggtcttccgcatcatggatgatgacaacaacagaaccctggacttcaaggagttcatgaagggcctgaatgactatgctgtggtgatggagaaggaggaggtggaggagctgttcagaagatttgacaaggatggaaatggcaccatcgacttcaatgagttcctgctgaccctgcggccccccatgagccgggccaggaaggaggtgatcatgcaggccttcaggaagctggacaagacaggagatggagtcatcaccatcgaggacctgcgggaggtgtacaatgccaagcaccaccccaagtaccagaatggagagtggagcgaggagcaggtgttcaggaagttcctggacaactttgacagcccctatgacaaggatggcctggtgaccccagaggagttcatgaactactatgctggggtgtctgccagcattgacacagatgtgtacttcatcatcatgatgaggacagcctggaagctgtag

SEQ ID NO: 20539 - DNA, 627 bp, synthetic construct; identical to SEQ ID NO: 20538
  source 1..627: mol_type = other DNA; note = Synthetic coding sequence

SEQ ID NO: 20540 - DNA, 789 bp, synthetic construct
  source 1..789: mol_type = other DNA; note = Synthetic coding sequence
cacagctacagcgagggcctgggccacccccgggtgtcccaggccctggtgaccttccaccagcagaagcccatcgagccccggcgggagctgctgacccagccctgccggcagaaggaccctgccaacgtggactatgaagatctcttcctgtacagcaatgctgtggccgaggaggccgcctgccctgtgtctgcccctgaggaggccagccccaagcctgtgctgtgccaccagagcaaggagaggaagcccagcgctgagatgaaccgcatcaccaccaaggaggccaccagcagctgcccccccaagagccccctgggggagacccggcagaagctgtggaggagcctgaagatgctgcctgagcggggccagagggtgcggcagcagaagagccacctggccaccgtgaacctgagcagcctgctggatgtgagaagaagcaccgtcatcagcggccctggcaccgggaagggcagccaggaccacagcggggaccccaccagcggggaccggggctacacagacccctgtgtggccaccagcctgaagagccccagccagccccaggcccccaaggacaggaaggtgcccaccaggaaggccgagaggtctgtgtcctgcatcgaggtgacccctggggaccgctcctggcaccagatggtggtgcgggccctgagcagccaggagagcaagccagagcaccagggcctggccgagccagaaaatgaccagctgcctgaggagtaccagcagcccccaccatttgcccctggctactgctag

SEQ ID NO: 20541 - DNA, 1941 bp, synthetic construct
  source 1..1941: mol_type = other DNA; note = Synthetic coding sequence
atgagctacacaggctttgtgcagggcagcgagaccaccctgcagagcacctacagcgacaccagcgcccagcccacctgtgactatggctacggcacctggaacagcggcaccaacagaggctatgagggctacggctacggctacggctacggccaggacaacaccaccaactacggctacggcatggccaccagccacagctgggagatgcccagcagtgacaccaatgccaacaccagcgccagcggcagcgccagcgctgacagcgtgctgagccgcatcaaccagaggctggacatggtgccccacctggagacagacatgatgcagggcggcgtgtatggcagcggcggggagagatatgacagctatgagagctgtgacagcagagctgtgctgtctgagcgggacctgtaccgcagcggctatgactacagcgagctggaccctgagatggagatggcctatgagggccagtatgatgcctacagagaccagttcaggatgagaggaaatgacaccttcggcccccgggcccagggctgggccagagatgcccggagcggccggcccatggccagcggctacggccgcatgtgggaggaccccatgggcgcccggggccagtgcatgtctggggccagccggctgcccagcctcttcagccagaacatcatcccagaatatggcatgttccagggcatgaggggcggcggggccttccctgggggcagccgcttcggcttcggctttggaaatggcatgaagcagatgaggaggacctggaagacctggaccacagctgacttccgcaccaagaagaagaagaggaagcagggcggcagcccagatgagccagacagcaaggccaccaggacagactgcagcgacaacagcgacagcgacaatgatgagggcacagaaggagaggccacagagggcctggagggcacagaagctgtggagaagggcagccgggtggatggagaagatgaggagggcaaggaggatggccgggaggagggcaaggaggaccctgagaagggggccctgaccacccaggatgaaaatggccagaccaagaggaagctgcaggccggcaagaagagccaggacaagcagaagaagaggcagagggacaggatggtggagcgcatccagtttgtgtgcagcctgtgcaagtaccgcaccttctatgaagatgagatggccagccacctggacagcaagttccacaaggagcacttcaagtatgtgggcaccaagctgcccaagcagacagctgacttcctgcaggagtatgtgaccaacaagaccaagaagacagaggagctgaggaagacagtggaggacctggatggcctcatccaccagatctacagagaccaggacctgacccaggagatcgccatggagcactttgtgaagaaggtggaggccgcccactgtgccgcctgtgacctcttcatccccatgcagtttggcatcatccagaagcacctgaagaccatggaccacaacagaaacagaaggctgatgatggagcagagcaagaagagcagcctgatggtggcccggagcatcctgaacaacaagctgatcagcaagaagctggagcgctacctgaagggggagaaccccttcacagacagccctgaggaggagaaggagcaggaggaggccgagggcggggccctggatgagggcgcccagggcgaggccgccggcatcagcgagggcgctgagggcgtgcctgcccagccccctgtgcccccagagcccgcccctggagctgtgagccccccacctcctcctcctcctgaggaggaggaggagggcgctgtgcccctgctgggcggggccctgcagaggcagatccggggcatccctggcctggatgtggaggatgatgaggagggcggcggcggggccccctag

SEQ ID NO: 20542 - DNA, 1401 bp, synthetic construct
  source 1..1401: mol_type = other DNA; note = Synthetic coding sequence
atgaggggccccaacagcggcacagagaagggccgcctggtgattcctgagaagcagggctttgacttcctgtgcatgcctgtgttccacccccgcttcaagcgggagttcatccaggagcccgccaagaaccggcccggcccccagaccaggagtgacctgctgctgagcggccgggactggaacaccctgattgtgggcaagctgagcccctggatccggccagacagcaaggtggagaagatcagaagaaacagcgaggccctggaggtgcagttcatcatcaccggcaccaaccaccacagcgagaaggagttctgcagctacctgcagtacctggagtacctgagccagaacagacctcctccaaatgcctatgagctgtttgccaagggctatgaggactacctgcagagccccctgcagcccctgatggacaacctggagagccagacctatgaggtgtttgagaaggaccccatcaagtacagccagtaccagcaggccatctacaagtgcctgctggacagagtgcctgaggaggagaaggacaccaacgtgcaggtgctgatggtgctgggcgccggccggggccccctggtgaatgccagcctgcgggccgccaagcaggccgaccggcgcatcaagctgtatgctgtggagaagaaccccaatgctgtggtgaccctggagaactggcagtttgaggagtggggcagccaggtgacagtggtgtccagtgacatgagggagtgggtggcccctgagaaggctgacatcatcgtgtctgagctgctgggcagctttgctgacaatgagctgagcccagaatgtctggatggagcccagcacttcctgaaggatgatggagtgtccatccctggagagtacaccagcttcctggcccccatcagcagcagcaagctgtacaatgaggtgcgggcctgccgggagaaggaccgggaccctgaggcccagtttgagatgccctacgtggtgcggctgcacaacttccaccagctgagcgccccccagccctgcttcaccttcagccaccccaacagagaccccatgattgacaacaaccgctactgcaccctggagttccctgtggaggtgaacacagtgctgcacggctttgctggctactttgagaccgtgctgtaccaggacatcaccctgagcatccggcctgagacccacagccctggcatgttctcctggttccccatcctcttccccatcaagcagcccatcaccgtgcgggagggccagaccatctgtgtgcgcttctggcgctgcagcaacagcaagaaggtgtggtatgagtgggccgtgacagcccctgtgtgcagcgccatccacaaccccaccggccgcagctacaccatcggcctgtag

SEQ ID NO: 20543 - DNA, 1863 bp, synthetic construct
  source 1..1863: mol_type = other DNA; note = Synthetic coding sequence
atgaggggccccaacagcggcacagagaagggccgcctggtgattcctgagaagcagggctttgacttcctgtgcatgcctgtgttccacccccgcttcaagcgggagttcatccaggagcccgccaagaaccggcccggcccccagaccaggagtgacctgctgctgagcggccgggactggaacaccctgattgtgggcaagctgagcccctggatccggccagacagcaaggtggagaagatcagaagaaacagcgaggccgccatgctgcaggagctgaactttggagcctacctgggcctgcctgccttcctgctgcccctgaaccaggaggacaacaccaacctggcccgggtgctgaccaaccacatccacacaggccaccacagctccatgttctggatgagggtgcccctggtggcccctgaggacctgagagatgacatcattgaaaatgcccccaccacccacacagaggagtacagcggggaggagaagacctggatgtggtggcacaacttccgcaccctgtgtgactacagcaagagaattgctgtggccctggagattggagctgacctgcccagcaaccacgtgattgaccgctggctgggggagcccatcaaggccgccatcctgcccaccagcatcttcctgaccaacaagaagggcttccctgtgctgagcaagatgcaccagaggctcatcttccggctgctgaagctggaggtgcagttcatcatcaccggcaccaaccaccacagcgagaaggagttctgcagctacctgcagtacctggagtacctgagccagaacagacctcctccaaatgcctatgagctgtttgccaagggctatgaggactacctgcagagccccctgcagcccctgatggacaacctggagagccagacctatgaggtgtttgagaaggaccccatcaagtacagccagtaccagcaggccatctacaagtgcctgctggacagagtgcctgaggaggagaaggacaccaacgtgcaggtgctgatggtgctgggcgccggccggggccccctggtgaatgccagcctgcgggccgccaagcaggccgaccggcgcatcaagctgtatgctgtggagaagaaccccaatgctgtggtgaccctggagaactggcagtttgaggagtggggcagccaggtgacagtggtgtccagtgacatgagggagtgggtggcccctgagaaggctgacatcatcgtgtctgagctgctgggcagctttgctgacaatgagctgagcccagaatgtctggatggagcccagcacttcctgaaggatgatggagtgtccatccctggagagtacaccagcttcctggcccccatcagcagcagcaagctgtacaatgaggtgcgggcctgccgggagaaggaccgggaccctgaggcccagtttgagatgccctacgtggtgcggctgcacaacttccaccagctgagcgccccccagccctgcttcaccttcagccaccccaacagagaccccatgattgacaacaaccgctactgcaccctggagttccctgtggaggtgaacacagtgctgcacggctttgctggctactttgagaccgtgctgtaccaggacatcaccctgagcatccggcctgagacccacagccctggcatgttctcctggttccccatcctcttccccatcaagcagcccatcaccgtgcgggagggccagaccatctgtgtgcgcttctggcgctgcagcaacagcaagaaggtgtggtatgagtgggccgtgacagcccctgtgtgcagcgccatccacaaccccaccggccgcagctacaccatcggcctgtag

SEQ ID NO: 20544 - DNA, 2271 bp, synthetic construct
  source 1..2271: mol_type = other DNA; note = Synthetic coding sequence
atgcccagcgtgtccaaggctgctgctgctgccctgagcggcagccccccccagacagagaagcccacccactaccgctacctgaaggagttcagaacagagcagtgccccctcttcagccagcacaagtgtgcccagcaccggcccttcacctgcttccactggcacttcctgaaccagaggagaagaagacccctgcggaggagagatggcaccttcaactacagcccagatgtgtactgcagcaagtacaatgaggccaccggggtgtgcccagatggagatgagagcctgctgggcgtgctgtaccccctgtgggcccctcctcctgtgcctgcccctgtgggcgcccccaccgtgcaccccttcctggcccgctggttcagccacgtgccctgggagcccgccggcagcgctgacccccgggccagcagcaccccagctgggggcaccacctgggccaccggcctgctgggggactttgatgcctgtggcagccagagccgggagtgtgtgaagggcgtgtggtggaccctgctgggcttccgctgcccctacctgcacaggaccactggagacacagagaggaagtaccacctgcgctactacaagacaggcacctgcatccacgagacagatgcccggggccactgtgtgaagaatggcctgcactgtgcctttgcccacggccccctggacctgcggccccctgtgtgtgatgtgcgggagctgcaggcccaggaggccctgcagaatggccagctgggcggcggggagggcgtgcctgacctgcagcccggggtgctggccagccaggccatgattgagaagatcctgtctgaggacccccgctggcaggccctgctgcctgtggccctgctgcggcaccgggtggcccacttcagtgatgccaactttgtgctgggcagctacaagacagagcagtgccccaagccaccccggctgtgccggcagggctacgcctgcccccactaccacaacagccgggacagaagaagaaacccccggcgcttccagtaccgcagcaccccctgccccagcgtgaagcatggagatgagtggggcgagcccagccgctgtgatggaggagatggctgccagtactgccacagcaggacagagcagcagttccaccctgagggccctgtgggcagccctgtgtctggggccttctctgtgttcagccacgccggcctggtggccgaccccagcctgtggtacccagctgagtggagctggcaccacgtgggccacagcaggaccatcaaccctgagggggacaagcccagccggctgggccctgcccctgagaacatcaagagaggaaatgactttgcctgtgatggccgggcagatgctgctggcatggccccccacgtgtgtgtgttccccatctacaagagcaccaagtgcaatgacatgaggcagacaggctactgcccccggggccccttctgtgcctttgcccacgtggagaagagcctgggcatggtgaatgagtggggctgccacgacctgcacctgaccagccccagcagcactggaagtggccagcctggaaatgccaagagaagagacagccctgctgagggcggcccccggggcagcgagcaggacagcaagcagggcgtgcgggcccacggcgtgtatgtgtttgagcagaaccacctggccgtgtttgctgctgtgcaccccccagcccccagcgtgagcagctctgtggccagcagcctggccagcagcgctggcagcggcagcagcagccccacagccctgcctgcccccccagcccgggccctgcccctgggccctgccagcagcacagtggaggccgtgctggccctggagcccacccccagcagccccaccagcagcgctgtgcagggcgtggccggggagctgggcatgggcagcggcggccagggctgctggagccacgtggtgggcgccctggccgctgtgcctgcctggacccacagcggggacctggagtgggaccccagcaccatccgcaccagggtgaatgtgggcggcggccctgctgcccggcctgccatgaccctggcccgggagccccagctgctggtggtgggcggctgccccaccaggaactgcagcggccctgctgccagcccccagcagctgctggatgatgctggccagggcggccgcggggagcgggacagcagccagaggcccctgcggccccagaccacccaccggcaggacaccaggcctgtgcccagctag

SEQ ID NO: 20545 - DNA, 549 bp, synthetic construct
  source 1..549: mol_type = other DNA; note = Synthetic coding sequence
atgaccccaccccagcagcccccacccctgcggtctgagcccggcaccctgggcagcgctgccagcagctacagccccctgggcctgaatggagtgcccggcagcatctgggactttgtgtctggcagcttcagccccagccccagccccatcctgtctgctggcccccccagcagcagcagcgccagccccaatggagctgagctggcccgggtgcggcggcagctggatgaggccaagaggaagatccggcagtgggaggagagctggcagcaggtgaagcaggtgtgtgatgcctggcagcgggaggcccaggaggccaaggagcgggcccgggtggccgacagcgaccggcagctggccctgcagaagaaggaggaggtggaggcccaggtgatcttccagctgcgggccaagcagtgtgtggcctgccgggagcgggcccatggagctgtgctgcggccctgccagcaccacatcctgtgtgagccctgtgccgccacagccccagaatgtccctactgcaagggccagcccctgcagtggtag

SEQ ID NO: 20546 - DNA, 444 bp, synthetic construct
  source 1..444: mol_type = other DNA; note = Synthetic coding sequence
atggagggggagcccccacctgtggaggagcggcggcggctgcaggaggagctgaatgaatttgtggagagcggctgcaggaccctggaggaggtgacagccagcctgggctgggacctggacagcctggaccctggagaggaggaggccgcagaagatgaggtggtgatctgcccctatgacagcaaccaccacatgcccaagagcagcctggccaagcacatggccagctgccgcctgaggaagatgggctacaccaaggaggaggaggatgagatgtacaaccctgagttcttctatgaaaatgtgaagatccccagcatcaccctgaacaaggacagccagttccagatcatcaagcaggccaggacagctgtgggcaaggacagcgactgctacaaccagatcattggagtgtccatcaagaggaactacaagatctag

SEQ ID NO: 20547 - DNA, 522 bp, synthetic construct
  source 1..522: mol_type = other DNA; note = Synthetic coding sequence
atgggcacctttgacctgtggacagactacctgggcctggcccacctggtgcgggccctgagcggcaaggagggccctgagacccggctgagcccccagcctgagcctgagcccatgctggagccagaccagaagaggagcctggagagcagccctgcccctgagcggctgtgcagcttctgcaagcacaacggggagagccgggccatctaccagagccacgtgctgaaggatgaggccggccgggtgctgtgccccatcctgcgggactatgtgtgcccccagtgtggggccacccgggagcgggcccacacccggcgcttctgccccctgaccggccagggctacacctctgtgtacagccacaccaccagaaattctgctgggaagaagctggtgcggccagacaaggccaagacccaggacaccggccaccggcggggcggcggcggcggggccggcttccggggggccggcaagtctgagcccagccccagctgcagccccagcatgagcacctag

SEQ ID NO: 20548 - DNA, 1722 bp, synthetic construct
  source 1..1722: mol_type = other DNA; note = Synthetic coding sequence
atgtctgccttctgcctgggcctggtgggccgggccagcgccccagctgagccagacagcgcctgctgcatggagctgcctgctgctgctggagatgctgtgcgcagccctgctgctgctgctgccctgatcttccctgggggcagcggggagctggagctggccctggaggaggagctggccctgctggccgccggggagcggcccagcgaccccggggagcacccccaggccgagcccggcagcctggccgagggcgccggcccccagcccccacccagccaggaccctgagctgctgagcgtcatccggcagaaggagaaggacctggtgctggccgcccggctgggcaaggccctgctggagaggaaccaggacatgagccggcagtatgagcagatgcacaaggagctgacagacaagctggagcacctggagcaggagaagcatgagctgcggaggagatttgaaaatcgggagggggagtgggagggccgggtgtctgagctggagagtgatgtgaagcagctgcaggatgagctggagcggcagcagatccacctgcgggaggccgaccgggagaagagcagagctgtgcaggagctgtctgagcagaaccagaggctgctggaccagctgagccgggccagcgaggtggagcggcagctgtccatgcaggtgcacgccctgcgggaggacttccgggagaagaacagcagcaccaaccagcacatcatccggctggagagcctgcaggccgagatcaagatgctgagtgacaggaagcgggagctggagcaccggctgagcgccaccctggaggagaatgacctgctgcagggcaccgtggaggagctgcaggacagagtgctgatcctggagcggcagggccatgacaaggacctgcagctgcaccagagccagctggagctgcaggaggtgcggctgagctgccggcagctgcaggtgaaggtggaggagctgacagaggagaggagcctgcagagcagcgctgccaccagcaccagcctgctgtctgaaattgagcagagcatggaggccgaggagctggagcaggagcgggagcagctgcggctgcagctgtgggaggcctactgccaggtgcgctacctgtgcagccacctgcggggaaatgattctgctgacagcgctgtgtccacagacagctccatggatgagagcagcgagaccagcagcgccaaggatgtgcctgctggcagcctgaggacagccctgaatgagctgaagaggctcatccagagcatcgtggatggcatggagcccaccgtgaccctgctgtctgtggagatgacagccctgaaggaggagcgggaccggctgcgggtgaccagcgaggacaaggagcccaaggagcagctgcagaaggccatccgggacagagatgaggccatcgccaagaagaatgctgtggagctggagctggccaagtgcaggatggacatgatgagcctgaacagccagctgctggatgccatccagcagaagctgaacctgagccagcagctggaggcctggcaggatgacatgcaccgggtgattgaccggcagctgatggacacccacctgaaggagaggagccagcctgctgctgccctgtgccggggccacagcgctggaagaggagatgagcccagcattgctgagggcaagaggctcttctccttcttcaggaagatctag

SEQ ID NO: 20549 - DNA, 1086 bp, synthetic construct; identical to SEQ ID NO: 19303
  source 1..1086: mol_type = other DNA; note = Synthetic coding sequence

SEQ ID NO: 20550 - DNA, 3099 bp, synthetic construct
  source 1..3099: mol_type = other DNA; note = Synthetic coding sequence
atggccttcaccaactacagcagcctgaacagagcccagctgacctttgagtacctgcacaccaacagcaccacccatgagttcctgtttggagccctggccgagctggtggacaatgccagagatgctgatgccaccagaattgacatctatgcagagcggcgggaggacctgcggggcggcttcatgctgtgcttcctggatgatggagctggcatggaccccagtgatgctgccagcgtcatccagtttgggaagagcgccaagaggaccccagagagcacccagatcggccagtatggaaatggcctgaagagcggctccatgagaattggcaaggacttcatcctcttcaccaagaaggaggacaccatgacctgcctcttcctgagcaggaccttccacgaggaggagggcattgatgaagtcatcgtgcccctgcccacctggaatgcccggacccgggagcctgtgacagacaacgtggagaagtttgccattgaaacagagctgatctacaagtacagccccttcagaacagaggaggaggtgatgacccagttcatgaagatccctggggacagcggcaccctggtgatcatcttcaacctgaagctgatggacaatggagagcctgagctggacatcatcagcaacccccgggacatccagatggccgagaccagccctgagggcaccaagccagagaggaggagcttccgggcctatgctgctgtgctgtacatcgaccccaggatgaggatcttcatccacggccacaaggtgcagaccaagaggctgagctgctgcctgtacaagcccaggatgtacaagtacaccagcagccgcttcaagaccagggctgagcaggaggtgaagaaggccgagcacgtggccagaattgctgaggagaaggcccgggaggccgagagcaaggcccggaccctggaggtgcggctgggcggggacctgacccgggacagccgggtgatgctgcggcaggtgcagaacagagccatcaccctgcggcgggaggctgatgtgaagaagaggatcaaggaggccaagcagagggccctgaaggagcccaaggagctgaactttgtgtttggagtgaacatcgagcaccgggacctggatggcatgttcatctacaactgcagccgcctcatcaagatgtatgagaaggtgggcccccagctggagggcggcatggcctgtggcggcgtggtgggcgtggtggatgtgccctacctggtgctggagcccacccacaacaagcaggactttgctgatgccaaggagtaccgccacctgctgcgggccatgggagagcacctggcccagtactggaaggacatcgccatcgcccagaggggcatcatcaagttctgggatgaatttggctacctgagcgccaactggaaccagccccccagcagcgagctgcgctacaagagaagaagagccatggagatccccaccaccatccagtgtgacctgtgcctgaagtggaggaccctgcccttccagctgagctctgtggagaaggactacccagacacctgggtgtgcagcatgaacccagaccctgagcaggacagatgtgaggccagcgagcagaagcagaaggtgcccctgggcaccttcaggaaggacatgaagacccaggaggagaagcagaagcagctgacagagaagatccggcagcagcaggagaagctggaggccctgcagaagaccacccccatccgcagccaggccgacctgaagaagctgcccctggaggtgaccacccggcccagcacagaggagcctgtgcggcggccccagaggcccaggagcccccccctgcctgctgtgatcagaaatgcccccagcaggcctcccagcctgcccacccccaggcctgccagccagcccaggaaggcccctgtgatcagcagcacccccaagctgcctgccctggccgcccgggaggaggccagcaccagccggctgctgcagcccccagaggcccccaggaagccagccaacaccctggtgaagacagccagcaggcctgcccccctggtgcagcagctgagccccagcctgctgcccaacagcaagagcccccgggaggtgcccagccccaaggtgatcaagacccctgtggtgaagaagacagagagccccatcaagctgagccctgccacccccagcaggaagaggtctgtggccgtgtctgatgaggaggaggtggaggaggaggccgagaggaggaaggagcgctgcaagaggggccgctttgtggtgaaggaggagaagaaggacagcaatgagctgagtgacagcgctggggaggaggacagcgctgacctgaagagggcccagaaggacaagggcctgcacgtggaggtgcgggtgaaccgggagtggtacacaggccgggtgacagctgtggaggtgggcaagcacgtggtgcgctggaaggtgaagtttgattatgtgcccacagacaccaccccccgggaccgctgggtggagaagggctctgaagatgtgcggctgatgaagccacccagccctgagcaccagagcctggacacccagcaggagggcggggaggaggaggtgggccctgtggcccagcaggccatcgctgtggccgagcccagcaccagcgagtgcctgcgcatcgagccagacaccacagccctgagcaccaaccacgagaccatcgacctgctggtgcagatcctgaggaactgcctgcgctacttcctgccccccagcttccccatcagcaagaagcagctgagcgccatgaacagtgatgagctgatctccttccccctgaaggagtacttcaagcagtatgaggtgggcctgcagaacctgtgcaacagctaccagagcagagctgacagccgggccaaggccagcgaggagagcctgcggaccagcgagaggaagctgcgggagacagaggagaagctgcagaagctgcggaccaacatcgtggccctgctgcagaaggtgcaggaggacatcgacatcaacacagatgatgagctggatgcctacattgaagatctcatcaccaagggggactag

SEQ ID NO: 20551 - DNA, 5943 bp, synthetic construct; identical to SEQ ID NO: 18674
  source 1..5943: mol_type = other DNA; note = Synthetic coding sequence

SEQ ID NO: 20552 - DNA, 513 bp, synthetic construct; identical to SEQ ID NO: 19318
  source 1..513: mol_type = other DNA; note = Synthetic coding sequence

SEQ ID NO: 20553 - DNA, 291 bp, synthetic construct
  source 1..291: mol_type = other DNA; note = Synthetic coding sequence
atgtgccacaccagctgcagccctgcctgccagcccacctgctgcatccacagcccctgccaggccagctgctacgtgcctgtgtcctgccagagctctgtgtgcatgcctgtgtcctgcaccagaattgtgtgtgtggcccccagctgccagcccagcgtgtgtgtgcctgtgtcctgccggcccatcatctacgtgacccccagctgccagagcagcggctgctgccagcccccctgcaccacagccctgtgccggcccatcagctgcagcacccccagctgctgctag

SEQ ID NO: 20554 - DNA, 879 bp, synthetic construct
  source 1..879: mol_type = other DNA; note = Synthetic coding sequence
atggccgccagcaccatgagcatccgcagcagcgcctacagcgacagctggcaggtggatgactgcccagagagctgctgtgagcccccctgctgtgccaccagctgctgtgccccagccccctgcctgaccctggtgtgcacccctgtgtcccgggtgagcagcccctgctgccaggtgacctgtgagcccagcccctgccagagcggctgcaccagcagctgcacccccagctgctgccagcagagcagctgccagcctgcctactgcaccagcagcccctgccagcaggcctgctgcgtgcctgtgtgctgcaagcctgtgtgctgcgtgcctgtgtgctgcggggccagcagctgctgccagcagagcagctaccagcctgcctgctgtgccagcagcagctgccagcctgcctgctgcgtgcctgtgtgctgcaagcctgtgtgctgtgcccccacctgcagtgaagattcctacagctgctgccagcagagcagctgccagcctgcctgctgcaccagcagcccctgccagcagagctactgtgtgcctgtgtgctgcaagcctgtgtgctgcaagcccatctgctgcgtgcctgtgtgcagcggggccagcagcctgtgctgccagcagagcggctgccagcctgcctgctgcaccaccagctgctgccggcccagcagctctgtgtccctgctgtgcaggcctgtgtgcaggcctgcctgctgcgtgcctgtgagcagctgctgtgcccccaccagcagccggcagcccagctactgccggcaggccagctgtgtgtccctgctgtgcaggcctgtgtgcagcaggcctgcctgctacagcttcagcagcggccagaagagcagctgctag

SEQ ID NO: 20555 - DNA, 1608 bp, synthetic construct
  source 1..1608: mol_type = other DNA; note = Synthetic coding sequence
atgaagaagatcagcctgaagaccctgaggaagagcttcaacctgaacaagagcaaggaggagacagacttcatggtggtgcagcagcccagcctggccagtgactttgggaaggatgacagcctgtttggcagctgctacggcaaggacatggccagctgtgacatcaatggagaagatgagaagggcggcaagaacagaagcaagtctgagagcctgatgggcaccctgaagaggcggctgagcgccaagcagaagagcaagggcaaggccggcaccccatctggcagcagcgcagatgaggacaccttcagcagcagcagcgcccccatcgtgttcaaggatgtgcgggcccagaggcccatccgcagcaccagcctgcggagccaccactacagccctgccccctggcccctgcggcccaccaacagcgaggagacctgcatcaagatggaggtgcgggtgaaggccctggtgcacagcagcagccccagccctgccctgaatggagtgaggaaggacttccatgacctgcagagcgagaccacctgccaggagcaggccaacagcctgaagagcagcgccagccacaacggggacctgcacctgcacctggatgagcacgtgcctgtggtgattggcctgatgccccaggactacatccagtacacagtgcccctggatgagggcatgtaccccctggagggcagccgcagctactgcctggacagcagcagccccatggaggtgtctgctgtgcccccccaggtgggcggccgggccttcccagaagatgagagccaggtggaccaggacctggtggtggcccctgagatctttgtggaccagagcgtgaatggcctgctgattggcaccactggagtgatgctgcagagcccccgggccggccatgatgatgtgccccccctgagccccctgctgccccccatgcagaacaaccagatccagaggaacttcagcggcctgaccggcacagaggcccacgtggccgagagcatgcgctgccacctgaactttgaccccaacagcgcccctggggtggcccgggtgtatgacagcgtgcagagcagcggccccatggtggtgaccagcctgacagaggagctgaagaagctggccaagcagggctggtactggggccccatcacccgctgggaggccgagggcaagctggccaacgtgcctgatggcagcttcctggtgcgggacagcagtgatgaccgctacctgctgagcctgtccttccgcagccacggcaagaccctgcacaccagaattgagcacagcaatggccgcttctccttctatgagcagccagatgtggagggccacaccagcatcgtggacctgattgagcacagcatccgggacagtgaaaatggagccttctgctacagccgcagccggctgcccggcagcgccacctaccctgtgcggctgaccaaccctgtgagccgcttcatgcaggtgcgcagcctgcagtacctgtgccgcttcgtcatccggcagtacaccagaattgacctgatccagaagctgcccctgcccaacaagatgaaggactacctgcaggagaagcactactag

SEQ ID NO: 20556 - DNA, 1260 bp, synthetic construct
  source 1..1260: mol_type = other DNA; note = Synthetic coding sequence
atggccgccagcagcctggagcagaagctgagccggctggaggccaagctgaagcaggagaaccgggaggcccggaggagaattgacctgaacctggacatcagcccccagaggccccggcccaccctgcagctgcccctggccaatgatggcggcagccgcagccccagcagcgagagcagcccccagcaccccaccccaccagcccggcccaggcacatgctgggcctgcccagcaccctcttcacccccaggtccatggagagcattgaaattgaccagaagctgcaggagatcatgaagcagacaggctacctgaccatcggcggccagcgctaccaggccgagatcaatgacctggagaacctgggggagatgggcagcggcacctgtggccaggtgtggaagatgaggttcaggaagacaggccacgtgattgctgtgaagcagatgaggaggagcggcaacaaggaggagaacaagaggatcctgatggacctggatgtggtgctgaagagccatgactgcccctacatcgtgcagtgcttcggcaccttcatcaccaacacagatgtgttcatcgccatggagctgatgggcacctgtgccgagaagctgaagaagaggatgcagggccccatccctgagcgcatcctgggcaagatgacagtggccatcgtgaaggccctgtactacctgaaggagaagcatggagtcatccacagagatgtgaagcccagcaacatcctgctggatgagcggggccagatcaagctgtgtgactttggcatcagcggccgcctggtggacagcaaggccaagaccaggtctgctggctgtgccgcctacatggcccctgagagaattgatcctccagaccccaccaagccagactatgacatccgggcagatgtgtggagcctgggcatcagcctggtggagctggccaccggccagttcccctacaagaactgcaagacagactttgaggtgctgaccaaggtgctgcaggaggagccccccctgctgcccggccacatgggcttcagcggggacttccagagctttgtgaaggactgcctgaccaaggaccacaggaagaggcccaagtacaacaagctgctggagcacagcttcatcaagagatatgagaccctggaggtggatgtggcctcctggttcaaggatgtgatggccaagacagagagccccaggaccagcggcgtgctgagccagccccacctgcccttcttcagatag

SEQ ID NO: 20557 - DNA, 963 bp, synthetic construct; identical to SEQ ID NO: 19292
  source 1..963: mol_type = other DNA; note = Synthetic coding sequence

SEQ ID NO: 20558 - DNA, 1737 bp, synthetic construct
  source 1..1737: mol_type = other DNA; note = Synthetic coding sequence
atggagctggagaacatcgtggccaacagcctgctgctgaaggcccggcagggcggctacggcaagaagagcggccgcagcaagaagtggaaggagatcctgaccctgccccctgtgtcccagtgcagcgagctgcggcacagcattgagaaggactacagcagcctgtgtgacaagcagcccatcggccggcggctcttccggcagttctgtgacaccaagcccaccctgaagaggcacatcgagttcctggatgctgtggccgagtatgaggtggctgatgatgaggacagaagtgactgtggcctgagcatcctggaccgcttcttcaatgacaagctggccgcccccctgcctgagatccccccagatgtggtgacagagtgccgcctgggcctgaaggaggagaaccccagcaagaaggcctttgaagaatgtaccagggtggcccacaactacctgcggggggagccctttgaggagtaccaggagagcagctacttcagccagttcctgcagtggaagtggctggagcggcagcctgtgaccaagaacaccttccgccactacagagtgctgggcaaaggaggctttggagaggtgtgtgcctgccaggtgcgggccaccgggaagatgtatgcctgcaagaagctgcagaagaagaggatcaagaagaggaaaggagaggccatggccctgaatgagaagaggatcctggagaaggtgcagagcagatttgtggtgtccctggcctatgcctatgagaccaaggatgccctgtgcctggtgctgaccatcatgaatggaggagacctgaagttccacatctacaacctgggcaaccctggctttgatgagcagagagctgtgttctatgctgctgagctgtgctgcggcctggaggacctgcagcgggagcgcatcgtgtacagagacctgaagccagagaacatcctgctggatgaccggggccacatccgcatcagtgacctgggcctggccacagagatccctgagggccagagggtgcggggccgggtgggcaccgtgggctacatggcccctgaggtggtgaacaatgagaagtacaccttctccccagactggtggggcctgggctgcctgatctatgagatgatccagggccacagccccttcaagaagtacaaggagaaggtgaagtgggaggaggtggaccagaggatcaagaatgacacagaggagtacagcgagaagttctctgaagatgccaagagcatctgcaggatgctgctgaccaagaaccccagcaagaggctgggctgccgcggggagggcgctgctggggtgaagcagcaccctgtgttcaaggacatcaacttccggcggctggaggccaacatgctggagccccccttctgcccagacccccatgctgtgtactgcaaggatgtgctggacatcgagcagttctctgtggtgaagggcatctacctggacacagcagatgaggacttctacgccaggtttgccaccggctgtgtgtccatcccctggcagaatgagatgattgaaagtggctgcttcaaggacatcaacaagtctgagagcgaggaggccctgcccctggacctggacaagaacatccacacccctgtgtcccggcccaacagaggcttcttctaccgcctcttcagaagaggaggctgcctgaccatggtgcccagcgagaaggaggtggagcccaagcagtgctag

SEQ ID NO: 20559 - DNA, 2625 bp, synthetic construct
  source 1..2625: mol_type = other DNA; note = Synthetic coding sequence
atgaaccagaggagccacctgggcaccacctacctggacacagccaagggagctgtggagaccttcatgaagctgcgggcccgggaccctgccagcagaggagaccgctacatgctggtgacctttgaggagcccccctatgccatcaaggccggctggaaggaaaatcatgccaccttcatgaatgagctgaagaacctgcaggccgagggcctgaccaccctgggccagagcctgaggacagcctttgacctgctgaacctgaaccggctggtgactggaattgacaactacggccagggcaggaaccccttcttcctggagcccgccatcatcatcaccatcacagatggcagcaagctgaccaccaccagcggcgtgcaggatgagctgcacctgcccctgaacagccccctgcccggcagcgagctgaccaaggagcccttccgctgggaccagaggctgtttgccctggtgctgcggctgcccggcaccatgtctgtggagagcgagcagctgactggagtgcccctggatgattctgccatcacccccatgtgtgaggtgactggaggccgcagctacagcgtgtgcagccccaggatgctgaaccagtgcctggagagcctggtgcagaaggtgcagagcggcgtggtgatcaactttgagaaggccggccctgaccccagccctgtggaggatggccagcctgacatcagccggcccttcggcagccagccctggcacagctgccacaagctgatctacgtgcggcccaaccccaagacaggagtgcccatcggccactggcctgtgcctgagagcttctggccagaccagaacagccccaccctgccccccaggaccagccaccctgtggtgaagttcagctgcacagactgtgagcccatggtgattgacaagctgccctttgacaagtatgagctggagcccagccccctgacccagttcatcctggagaggaagagcccccagacctgctggcaggtgtatgtgagcaacagcgccaagtacagcgagctgggccaccccttcggctacctgaaggccagcacagccctgaactgtgtgaacctgtttgtgatgccctacaactaccctgtgctgctgcccctgctggatgacctcttcaaggtgcacaaggccaagcccaccctgaagtggaggcagagctttgagagctacctgaagaccatgccaccctactacctgggccccctgaagaaggctgtgaggatgatgggcgcccccaacctgattgctgacagcatggagtatggcctgagctacagcgtcatctcctacctgaagaagctgagccagcaggccaagattgaaagtgacagagtcatcggctctgtgggcaagaaggtggtgcaggagaccggcatcaaggtgcgcagccgcagccacggcctgtccatggcctacaggaaggacttccagcagctgctgcagggcatcagtgaagatgtgccccaccggctgctggacctgaacatgaaggagtacacaggcttccaggtggccctgctgaacaaggacctgaagccccagaccttcagaaatgcctatgacatccccaggaggaacctgctggaccacctgaccaggatgaggagcaacctgctgaagagcacccggcgcttcctgaagggccaggatgaggaccaggtgcacagcgtgcccatcgcccagatgggcaactaccaggagtacctgaagcaggtgcccagccccctgcgggagctggaccctgaccagccccggcggctgcacaccttcggcaaccccttcaagctggacaagaagggcatgatgattgatgaagcagatgaatttgtggccggcccccagaacaagcacaagaggcctggagagcccaacatgcagggcatccccaagagaagacgctgcatgagccccctgctgcggggccggcagcagaaccctgtggtgaacaaccacatcggcggcaaaggacctccagcccccaccacccaggcccagcctgacctgatcaagcccctgcccctgcacaagatcagcgagaccaccaatgacagcatcatccatgatgtggtggagaaccacgtggccgaccagctgagcagtgacatcaccccaaatgccatggacacagagttcagcgccagcagccctgccagcctgctggagcggcccaccaaccacatggaggccctgggccatgaccacctgggcaccaatgacctgactgtgggcggcttcctggagaaccacgaggagccccgggacaaggagcagtgtgccgaggagaacatcccagccagcagcctgaacaagggcaagaagctgatgcactgccgcagccatgaggaggtgaacacagagctgaaggcccagatcatgaaggagatcaggaagccaggcaggaaatatgaaagaatcttcaccctgctgaagcacgtgcagggcagcctgcagaccaggctcatcttcctgcagaatgtcatcaaggaggccagccgcttcaagaagaggatgctgattgagcagctggagaacttcctggatgagatccacagaagagccaaccagatcaaccacatcaacagcaactag

SEQ ID NO: 20560 - DNA, 2340 bp, synthetic construct
  source 1..2340: mol_type = other DNA; note = Synthetic coding sequence
atggctgactacagcaacaagctgtactaccagctggagcaggagaccggcatccagacaggctacaccaggacaggcagcatcttcctggcccagacccaggacaggctcatcagcctgaagaggatcaatgccggcctgaatgtcatcggcatccccagcgagatcatcagccccaagaaggtggccgagctgcaccacctgctgaatgtgcatgacctggtgggcgccatgcacgtgcctgaagatgctgtggtgagcagcgcagatgtggccctggccctggccagcgctgccagccagaatggagtgcagatctatgacaggacctctgtgctgcacgtgatggtgaagaagggccaggtgactggagtggagacagacaagggccagatcgagtgccagtactttgtgaactgtgccggccagtgggcctatgagctgggcctgagcaatgaggagcctgtgtccatccccctgcacgcctgtgagcacttctacctgctgacccggcccctggagacccccctgcagagcagcacccccaccatcgtggatgctgatggccgcatctacatccggaactggcagggcggcatcctgagcggcggctttgagaagaaccccaagcccatcttcacagagggcaagaaccagctggagatccagaacctgcaggaggactgggaccactttgagcccctgctgagcagcctgctgcggaggatgcctgagctggagaccctggagatcatgaagctggtgaactgcccagagaccttcaccccagacatgcgctgcatcatgggagagagccctgctgtgcagggctactttgtgctggccggcatgaacagcgctggcctgagctttggaggaggagctgggaagtacctggccgagtggatggtgcacggctaccccagtgaaaatgtgtgggagctggacctgaagagatttggagccctgcagagcagcaggaccttcctgcggcaccgggtgatggaggtgatgcccctgatgtatgacctgaaggtgccccgctgggacttccagacaggccggcagctgcggaccagccccctgtatgaccggctggatgcccagggcgcccgctggatggagaagcacggctttgagcggcccaagtactttgtgcccccagacaaggacctgctggccctggagcagagcaagaccttctacaagccagactggtttgatattgtggagagcgaggtgaagtgctgcaaggaggccgtgtgtgtgattgacatgagcagcttcaccaagtttgagatcaccagcactggagaccaggccctggaggtgctgcagtacctgttcagcaatgacctggatgtgcctgtgggccacatcgtgcacacaggcatgctgaatgaaggaggcggctatgaaaatgactgcagcatcgcccggctgaacaagaggagcttcttcatgatcagccccacagaccagcaggtgcactgctgggcctggctgaagaagcacatgcccaaggacagcaacctgctgctggaggatgtgacctggaagtacacagccctgaacctgattggccccagggctgtggatgtgctgtctgagctgtcctatgcccccatgaccccagaccacttccccagcctcttctgcaaggagatgtctgtgggctacgccaacggcatccgggtgatgtccatgacccacactggagagcccggcttcatgctgtacatccccattgaatatgccctgcacgtgtacaatgaggtgatgtctgtgggccagaagtatggcatcagaaatgccggctactatgccctgcggagcctgagaattgagaagttctttgccttctggggccaggacatcaacaacctgaccacccccctggagtgtggccgggagagccgggtgaagctggagaagggcatggacttcatcggcagagatgccctgctgcagcagaagcagaatggagtgtacaagaggctgaccatgttcatcctggatgaccatgacagcgacctggacctgtggccctggtggggcgagcccatctacagaaatggccagtatgtgggcaagaccaccagcagcgcctacagctacagcctggagagacatgtgtgcctgggctttgtgcacaacttcagcgaggacaccggggaggagcaggtggtgacagctgacttcatcaacagaggagaatatgaaattgatattgctggctaccgcttccaggccaaggccaagctgtaccctgtggccagcctcttcacccagaagaggaggaaggatgacatggagctgagtgacctgcacggcaagtag

SEQ ID NO: 20561 - DNA, 1191 bp, synthetic construct
  source 1..1191: mol_type = other DNA; note = Synthetic coding sequence
atggccaccagggtggaggaggccgcccggggccggggcggcggcgctgaggaggccacagaggccggccggggcggcagaagaagaagcccccggcagaagctggaggagagccgctctgtgcagaagcagatgaagatcctgcagaagaagcaggcccagatcgtgaaggagaaggtgcacctgcagagcgagcacagcaaggccatcctggcccggagcaagctggagagcctgtgccgggagctgcagaggcacaacaagaccctgaaggaggagaacatgcagcaggcccgggaggaggaggagaggaggaaggaggccacagcccacttccagatcaccctgaatgagatccaggcccagctggagcagcacgacatccacaatgccaagctgcggcaggagaacatcgagctgggggagaagctgaagaagctgattgagcagtatgccctgcgggaggagcacatcgacaaggtgttcaagcacaaggagctgcagcagcagctggtggatgccaagctgcagcagaccacccagctgatcaaggaggctgatgagaagcaccagcgggagcgggagttcctgctgaaggaggccacagagagccgccacaagtatgagcagatgaagcagcaggaggtgcagctgaagcagcagctgagcctgtacatggacaagtttgaggagttccagaccaccatggccaagagcaatgagctgttcaccaccttccggcaggagatggagaagatgaccaagaagatcaagaagctggagaaggagaccatcatctggaggaccaagtgggagaacaacaacaaggccctgctgcagatggccgaggagaagacagtgcgggacaaggagtacaaggccctgcagatcaagctggagcggctggagaagctgtgccgggccctgcagacagaaagaaatgagctgaatgagaaggtggaggtgctgaaggagcaggtgtccatcaaggccgccatcaaggccgccaacagagacctggccacccctgtgatgcagccctgcacagccctggacagccacaaggagctgaacaccagcagcaagagggccctgggcgcccacctggaggccgagcccaagagccagaggtctgctgtgcagaagccacccagcacaggcagcgccccagccatcgagagcgtggactag

SEQ ID NO: 20562 - DNA, 1443 bp, synthetic construct; identical to SEQ ID NO: 19905
  source 1..1443: mol_type = other DNA; note = Synthetic coding sequence

SEQ ID NO: 20563 - DNA, 3774 bp, synthetic construct
  source 1..3774: mol_type = other DNA; note = Synthetic coding sequence
atggcccacttcagcagcgaggaccaggccatgctgcaggccatgctgcggcggctcttccagagcgtgaaggagaagatcaccggggcccccagcctggagtgtgccgaggagatcctgctgcacctggaggagacagatgagaacttccacaactatgaatttgtgaagtacctgcggcagcacatcggcaacaccctgggctccatgattgaggaggagatggagaagtgcaccagtgacaggaaccagggcgaggagtgtggctatgacacagtggtgcagcaggtgaccaagaggacccaggagagcaaggagtacaaggagatgatgcactacctgaagaacatcatgattgctgtggtggagagcatgatcaacaagtttgaagaagatgagaccaggaaccaggagcggcagaagaagatccagaaggagaagagccacagctacagaacagacaactgcagcgacagcgacagcagcctgaaccagagctacaagttctgccagggcaagctgcagctgatcctggaccagctggaccccggccagcccaaggaggtgcgctatgaggccctgcagaccctgtgcagcgcccccccatctgatgtgctgaactgtgagaactggaccaccctgtgtgagaagctgactgtgtccctgagtgaccctgaccctgtgttcagtgaccgcatcctgaagttctgtgcccagaccttcctgctgagccccctgcacatgaccaaggagatctacaccagcctggccaagtacctggagagctacttcctgagccgggagaaccacatccccaccctgtctgctggggtggacatcaccaaccccaacatgacccggctgctgaagaaggtgcggctgctgaatgagtaccagaaggaggcccccagcttctggatccgccaccctgagaagtacatggaggagatcgtggagagcaccctgagcctgctgactgtgaagcacaaccagagccacgtggtgtcccagaagatcctggaccccatctacttctttgccctggtggacaccaaggctgtgtggttcaagaagtggatgcacgcccactacagcaggaccaccgtgctgcggctgctggagaccaagtacaagagcctggtgaccacagccatccagcagtgtgtgcagtactttgagatgtgcaagaccaggaaggcagatgagaccctgggccacagcaagcactgcaggaacaagcagaagaccttctactacctgggccaggagctgcagtacatctacttcatccacagcctgtgcctgctgggccgcctgctgatctacaagcagggcaggaagctgttccccatcaagctgaagaacaagaagggcctggtgtccctgattgacctgctggtgctcttcacccagctgatctactacagccccagctgccccaagatgaccagcgctgcccacagcgagaactacagccctgcctccatggtgacagaggtgctgtggatcctgagtgaccagaaggaatgtgctgtggagtgcctgtacaacaacatcgtgattgagaccctgctgcagcccatccacaacctgatgaagggaaatgaggccagccccaactgcagcgagacagccctgatccacatcgccggcatcctggcccgcatcgcctctgtggaggagggcctcatcctgctgctgtatggagccaacatgaacagcagcgaggagagccccaccggggcccacatcatcgcccagttcagcaagaagctgctggatgaggacatcagcatcttcagcggcagcgagatgctgcctgtggtgaagggggccttcatctctgtgtgccgccacatctacagcacctgtgagggcctgcaggtgctgatcacctacaacctgcacgagagcatcgccaaggcctggaagaagaccagcctgctgtctgagcgcatccccacccctgtggagggcagtgacagcgtgtcctctgtgtcccaggagagccagaacatcatggcctgggaggacaacctgctggatgacctgctgcactttgctgccacccccaagggcctgctgctgctgcagaggactggagccatcaatgaatgtgtgaccttcatcttcaacagatatgccaagaagctgcaggtgagccgccacaagaagtttggctacggcgtgctggtgaccagggtggccagcacagctgctgggggcatcgccctgaagaagagcggcttcatcaatgagctgatcacagagctgtggagcaacctggagtatggaagagatgatgtgcgggtgacccaccccaggaccacccctgtggaccccatcgacaggagctgccagaagagcttcctggccctggtgaacctgctgagctacccagccatctatgagctggtgaggaaccaggacctgcccaacaagacagagtacagcctgcgggaggtgcccacctgtgtgattgacatcatcgacaggctcatcatcctgaacagcgaggccaagatccgcagcctcttcaactatgagcagagccacatcttcggcctgcgggacttcatcattgatggcctgtctgtggagaggaaccacgtgctggtgcgcatcaacctggtgggcggccccctggagcgcatcctgcccccccggctgctggagaagagtgacaacccctacccctggcccatgttcagcagctaccccctgcccaactgctacctgagtgacatcaccagaaatgccggcatcaagcaggacaatgacctggacaagctgctgctgtgcctgaagatcagtgacaagcagacagagtggattgagaactgccagaggcagttctgcaagatgatgaaggccaagccagacatcatcagcggggaggccctgattgagctgctggagaagtttgtgctgcacctgacagagagccccagcgagtgctacttccccagcgtggagtacacagccacagatgccaacgtgaagaatgaaagcctgagctctgtgcagcagctgggcatcaagatgacagtgcgctatggcaagttcctgagcctgctgaaggatggagcagaaaatgacctgacctgggtgctgaagcactgtgagcgcttcctgaagcagcagcagaccagcatcaagagcagcctgctgtgcctgcagggcaactatgccggccatgactggtttgtgagcagcctcttcatgatcatgctgggggacaaggagaagaccttccagttcctgcaccagttcagccggctgctgaccagcgccttcctgtggctgccccggctgcacatcagcagctacctgcccaatgacacagtggagagcggcatccaccctgtgtacttctgcagcacccactacatcgagatgctgctgaaggccgagctgcccctggtgttcagcgccttccacatgagcggctttgcccccagccagatctgcctgcagtggatcacccagtgcttctggaactacctggactggattgagatctgccactacatcgccacctgtgtgttcctgggccctgactaccaggtgtacatctgcatcgctgtgttcaagcacctgcagcaggacatcctgcagcacacccagacccaggacctgcaggtgttcctgaaggaggaggccctgcacggcttccgggtgtctgactactttgagtacatggagatcctggagcagaactacagaacagtgctgctgcgggacatgaggaacatccggctgcagagcacctag

SEQ ID NO: 20564 - DNA, 612 bp, synthetic construct
  source 1..612: mol_type = other DNA; note = Synthetic coding sequence
atggccaccccctacgtgacagatgagaccggcggcaagtacatcgccagcacccagaggccagatggcacctggaggaagcagaggagagtgaaggagggctacgtgccccaggaggaggtgcctgtgtatgagaacaagtatgtgaagttcttcaagagcaagccagagctgcccccaggcctgagccctgaggccacagcccctgtgacccccagcaggcctgagggcggggagcccggcctgagcaagacagccaagaggaacctgaagaggaaggagaagaggcggcagcagcaggagaagggggaggccgaggccctgagcaggaccctggacaaggtgtccctggaggagacagcccagctgcccagcgccccccagggcagccgggccgcccccacagctgccagtgaccagccagattctgctgccaccacagagaaggccaagaagatcaagaacctgaagaagaagctgcggcaggtggaggagctgcagcagaggatccaggccggggaggtgtcccagcccagcaaggagcagctggagaagctggccaggagaagagccctggaggaggagctggaggacctggagctgggcctgtag

SEQ ID NO: 20565 - DNA, 729 bp, synthetic construct; identical to SEQ ID NO: 20180
  source 1..729: mol_type = other DNA; note = Synthetic coding sequence

SEQ ID NO: 20566 - DNA, 738 bp, synthetic construct; identical to SEQ ID NO: 18740
  source 1..738: mol_type = other DNA; note = Synthetic coding sequence

SEQ ID NO: 20567 - DNA, 1020 bp, synthetic construct
  source 1..1020: mol_type = other DNA; note = Synthetic coding sequence
atgatggacagccagctggtggccggcgtggccttcaagaagaccttctcctatgccggctttgagatgcagcccaagaagtaccacaaccccaagatcgccctgctgaatgtggagctggagctgaaggccgagaaggacaatgctgagatccgggtgcacacagtggaggactaccaggccatcgtggatgctgagtggaacatcctgtatgacaagctggagaagatccaccacagcggggccaaggtggtgctgagcaagctgcccatcggagatgtggccacccagtactttgctgaccgggacatgttctgtgccggccgggtgcctgaggaggacctgaagaggaccatgatggcctgtggcggcagcatccagacctctgtgaatgccctgtctgcagatgtgctgggccgctgccaggtgtttgaggagacccagattggaggagagcgctacaacttcttcaccggctgccccaaggccaagacctgcaccttcatcctgcggggcggcgctgagcagttcatggaggagacagagaggagcctgcatgatgccatcatgattgtgagaagagccatcaagaatgacagcgtggtggccggcggcggggccatcgagatggagctgagcaagtacctgcgggactacagcaggaccatccctgggaagcagcagctgctgattggagcctatgccaaggccctggagatcatcccccggcagctgtgtgacaatgccggctttgatgccaccaacatcctgaacaagctgcgggcccggcatgcccagggcggcacctggtatggagtggacatcaacaatgaagatattgctgacaactttgaggcctttgtgtgggagcccgccatggtgcgcatcaatgccctgacagctgccagcgaggccgcctgcctgattgtgtctgtggatgagaccatcaagaaccccaggagcacagtggatgcccccacagctgctggccggggccggggccggggccggccccactag

SEQ ID NO: 20568 - DNA, 768 bp, synthetic construct; identical to SEQ ID NO: 18637
  source 1..768: mol_type = other DNA; note = Synthetic coding sequence

SEQ ID NO: 20569 - DNA, 441 bp, synthetic construct
  source 1..441: mol_type = other DNA; note = Synthetic coding sequence
atggtgaacagctgctgcggctctgtgtgcagcgaccagggctgtgaccagggcctgtgccaggagacctgctgccggcccagctgctgccagaccacctgctgctgccccagctgtgtggtgagcagctgctgccggcccagctgcagccagaccacctgctgccagaccacctgctgccggcccagctgctgccaccctgtgtgctgccagaccacctgccggcccagctgtggggtgagcagctgctgccggcccctgtgctgccagaccacctgccaccccagctgtggcatgagcagctgctgccggcccctgtgctgccagaccacctgccggcccagctgtggggtgagcagctgctgccggcccctgtgctgccagaccacctgctgccgggccacctgctgccggcccagctgctgcggcagcagctgctag

SEQ ID NO: 20570 - DNA, 1296 bp, synthetic construct; identical to SEQ ID NO: 20076
  source 1..1296: mol_type = other DNA; note = Synthetic coding sequence

SEQ ID NO: 20571 - DNA, 471 bp, synthetic construct
  source 1..471: mol_type = other DNA; note = Synthetic coding sequence
atgggctgctgcggctgcagcggcggctgcggcagcggctgcggcggctgcggcagcggcagcggcggctgcggcagcggctgcggcggctgcggcagcagctgctgcgtgcccatctgctgctgcaagcctgtgtgctgctgcgtgcctgcctgcagctgcagcagctgtggcagctgtggcggcagcaagggcggctgcggcagctgtggcagcagcaagggcggctgcggcagctgtggctgcagccagagcaactgctgcaagccctgctgcagcagcagcggctgcggcagcttctgctgccagagcagctgcagcaagccctgctgctgccagagcagctgctgccagagcagctgctgcaagccctgctgctgccagagcagctgctgccagagcagctgcttcaagccctgctgctgccagagcagctgctgcgtgcctgtgtgctgccagtgcaagatctag

SEQ ID NO: 20572 - DNA, 609 bp, synthetic construct
  source 1..609: mol_type = other DNA; note = Synthetic coding sequence
atgggctgctgcggctgcagcggcggctgcggcagcggctgcggcggctgcggcagcggctgcggcggctgcggcagcggctgcggcggctacggcagcggctgcggcggctgcggcagcagctgctgcgtgcctgtgtgctgctgcaagcctgtgtgctgctgcgtgcctgcctgcagctgcagcagctgtggcagctgtggcggcagcaaaggagactgtggcagctgtggcggcagcaaaggaggctgcggcagctgtggcggcagcaaaggaggctgcggcagctgtggcggcagcaaaggaggctgcggcagctgtggcggcagcaaaggaggctgcggcagctgtggcggcagcaaaggaggctgcggcagctgtggcggcagcaaaggaggctgcggcagctgtggctgcagccagtgcaactgctgcaagccctgctgctgcagcagcggctgcggcagctgctgccagagcagctgctgcaacccctgctgctgccagagcagctgctgcgtgcctgtgtgctgccagagcagctgctgcaagccctgctgctgccagagcagctgctgcgtgcctgtgtgctgccagtgcaagatctag

SEQ ID NO: 20573 - DNA, 498 bp, synthetic construct
  source 1..498: mol_type = other DNA; note = Synthetic coding sequence
atgggctgctgcggctgcagcgagggctgcggcagcggctgcggcggctgcggcagcggctgcggcggctgcggcagcggctgcggcggctgcggcagcagctgctgcgtgcctgtgtgctgctgcaagcctgtgtgctgctgcgtgcctgcctgcagctgcagcagctgtggcagctgtggcggcagcaagggcggctgcggcagctgtggcggcagcaagggcggctgcggcagctgtggcggcagcaagggcggctgcggcagctgtggctgcagccagtgcagctgctacaagccctgctgctgcagcagcggctgcggcagcagctgctgccagagcagctgctgcaagccctgctgctgccagagcagctgctgcaagccctgctgctgcagcagcggctgcggcagcagctgctgccagagcagctgctgcaacccctgctgcagccagagcagctgctgcgtgcctgtgtgctgccagtgcaagatctag

SEQ ID NO: 20574 - DNA, 3105 bp, synthetic construct
  source 1..3105: mol_type = other DNA; note = Synthetic coding sequence
atggcctctgtgttcatgtgtggggtggaggacctgctcttcagcggcagcagatttgtgtggaacctgactgtgtccaccctgcggcgctggtacacagagcggctgcgggcctgccaccaggtgctgcggacctggtgtggcctgcaggatgtgtaccagatgacagagggccgccactgccaggtgcacctgctggatgaccggcggctggagctgctggtgcagcccaagctgctggcccgggagctgctggacctggtggccagccacttcaacctgaaggagaaggagtacttcggcatcaccttcattgatgacaccggccagcagaactggctgcagctggaccaccgggtgctggaccatgacctgcccaagaagccaggccccaccatcctgcactttgctgtgcgcttctacatcgagagcatctccttcctgaaggacaagaccaccgtggagctgttcttcctgaatgccaaggcctgtgtgcacaagggccagatcgaggtggagagcgagaccatcttcaagctggccgccttcatcctgcaggaggccaagggggactacaccagtgatgaaaatgccaggaaggacctgaagaccctgcctgccttccccaccaagaccctgcaggagcaccccagcctggcctactgtgaagatagagtgattgagcactacctgaagatcaagggcctgacccggggccaggccgtggtgcagtacatgaagatcgtggaggccctgcccacctatggagtgcactactatgctgtgaaggacaagcagggcctgccctggtggctgggcatctcctacaagggcatcggccagtatgacatccaggacaaggtgaagcccaggaagctgttccagtggaagcagctggagaacctgtacttccgggagaagaagtttgctgtggaggtgcatgacccccggcgcatctctgtgtccaggaggaccttcggccagagcggcctgtttgtgcagacctggtacgccaacagcagcctcatcaagagcatctgggtgatggccatcagccagcaccagttctacctggacaggaagcagagcaaggccaagatccccagcgcccggagcctggatgagatcgccatggacctgacagaaacaggcacccagagggccagcaagctggtgaccctggagaccaagagccagttcatcatggccagcaatggcagcctcatcagcagcggcagccaggacagcgaggtgtctgaggagcagaagcgggagaagatcctggagctgaagaagaaggagaagctgctgcaggagaagctgctgaagaaggtggaggagctgaagaagatctgcctgcgggaggccgagctgaccgggaagatgcccaaggagtaccccctgaacatcggggagaagccaccccaggtgagaagaagagtgggcacagccttcaagctggatgacaacctgctgcccagcgaggaggaccctgccctgcaggagctggagagcaacttcctgatccagcagaagctggtggaggccgccaagaagctggccaatgaaccagacctgtgcaagacagtgaagaagaagaggaagcaggactacacagatgccatgaagaagctgcaggagattgaaaatgccatcaatgagtaccgcatccgctgtgggaagaagcccagccagaaggccaccgtgctgcctgaggacatcatccccagcgagagcagcagcctgagtgacaccaccacctatgatgaccccagtgatgccttcaccttccctggccagaggagcagctctgtgccccacagcccccgcatcctgccccccaagagcctgggcatcgagcgcatccacttcaggaagagcagcatcaatgagcagtttgtggacacccggcagagccgggagatgctgagcacccacagcagcccctacaagaccctggagcggcggccccagggcggccgctccatgcccaccacccctgtgctgaccagaaatgcctacagcagcagccacctggagcctgagagcagcagccagcactgccggcagaggagcggcagcctggagagccagagccacctgctgtctgagatggacagcgacaagcccttcttcagcctgagcaagagccagaggagcagcagcacagagatcctggatgatggcagcagctacaccagccagagcagcacagagtactactgtgtgacccctgtgacaggcccctactacaccacccagaccctggacaccaggacccggggcagaagaagaagcaagaagcagaatgtgtccaccagcaacagcggctccatgcccaacctggcccagaaggacagcctgagaaatggagtgtacagcaagagccaggagccccccagcagcagctactacatcgccggctacaccccctatgcagaatgtgacttctactacagcggcggctacgtgtatgaaaatgacacagagggccagtacagcgtgaaccccagctaccgcagcagcgcccactacggctatgagcggcagagggactacagccgctccttccatgaagatgaggtggacagagtgccccacaacccctatgccaccctgcggctgcccaggaaggccgccgccaagtctgagcacatcaccaagaacatccacaaggccctggtggccgagcacctgcggggctggtaccagagggccagcggccagaaggaccagggccacagcccccagaccagctttgacagcgaccggggcagccagcgctgcctgggctttgctggcctgcaggtgccctgcagccccagcagccgggccagcagctacagctctgtgagcagcaccaatgccagcggcaactggaggacccagctgaccatcggcctgagtgactatgagaccccagcccacagcagctacaccagctgctatggaaatgtgtacaaccccctgcccagccccagccggcagtacacagagatcagccagctggatggaacagatggcaaccagctggaggacaacctggagagcagcgagcagaggctcttctggcatgaggacagcaagccaggcaccctggtgtag

SEQ ID NO: 20575 - DNA, 501 bp, synthetic construct
  source 1..501: mol_type = other DNA; note = Synthetic coding sequence
atgctgagccagagctgcaacctggaccccctgacagagacctacggcatccccttctacctgcagtacctggcccactggccagagtacttcatcgtggccgaggcccctggaggagagctgatgggctacatcatgggcaaggccgagggctctgtggcccgggaggagtggcacggccacgtgacagccctgtctgtggcccctgagttccggcggctgggcctggccgccaagctgatggagctgctggaggagatcagcgagaggaaaggaggcttctttgtggacctgtttgtgcgggtgagcaaccaggtggccgtgaacatgtacaagcagctgggctacagcgtgtacagaacagtgattgagtactacagcgccagcaatggagagccagatgaagatgcctatgacatgaggaaggccctgagccgggacacagagaagaagagcatcatccccctgccccaccctgtgcggccagaagatattgaatag

SEQ ID NO: 20576 - DNA, 399 bp, synthetic construct; identical to SEQ ID NO: 20168
  source 1..399: mol_type = other DNA; note = Synthetic coding sequence

SEQ ID NO: 20577 - DNA, 375 bp, synthetic construct; identical to SEQ ID NO: 19268
  source 1..375: mol_type = other DNA; note = Synthetic coding sequence

SEQ ID NO: 20578 - DNA, 336 bp, synthetic construct
  source 1..336: mol_type = other DNA; note = Synthetic coding sequence
ctgatggacctggacagcggagatgtgaagagaagagtgcacctgtttgagacccagaggaggaccaaggaggaggaccccatcatccccttcagtgatggccccatcatcagcaagtggggcgccatcagccgcagcagcaggacaggctaccacaccacagatcctgtgcaggccacagccagccagggcagcgccaccaagcccatctctgtgtctggaggagtgcacatggccacccggccccaccaccagcacaccatgctgaagggcacagacagcctgctgctgatctacctggtgattgagagcatccctgtgctgggcaccttctag

SEQ ID NO: 20579 - DNA, 399 bp, synthetic construct; identical to SEQ ID NO: 20168
  source 1..399: mol_type = other DNA; note = Synthetic coding sequence

SEQ ID NO: 20580 - DNA, 375 bp, synthetic construct; identical to SEQ ID NO: 19268
  source 1..375: mol_type = other DNA; note = Synthetic coding sequence

SEQ ID NO: 20581 - DNA, 1038 bp, synthetic construct
  source 1..1038: mol_type = other DNA; note = Synthetic coding sequence
atgctgcccaacacaggccgcctggccggctgcaccgtcttcatcaccggggccagccggggcatcggcaaggccatcgccctgaaggccgccaaggatggagccaacatcgtgattgctgccaagacagcccagccccaccccaagctgctgggcaccatctacacagctgctgaggagattgaagctgtgggcggcaaggccctgccctgcatcgtggatgtgagagatgagcagcagatctctgctgctgtggagaaggccatcaagaagtttggagcctacaccatcgccaagtatggcatgtccatgtatgtgctgggcatggccgaggagttcaagggggagattgctgtgaatgccctgtggcccaagacagccatccacacagctgccatggacatgctgggcggccctggcatcgagagccagtgcaggaaggtggacatcatcgcagatgctgcctacagcatcttccagaagcccaagagcttcaccggcaactttgtgattgatgagaacatcctgaaggaggagggcatcgagaactttgatgtgtatgccatcaagccaggccaccccctgcagcctgacttcttcctggatgagtacccagaggccgtgtccaagaaggtggagagcactggagctgtgcctgagttcaaggaggagaagctgcagctgcagcccaagcccaggtctggagctgtggaggagaccttcagaattgtgaaggacagcctgagtgatgatgtggtgaaggccacccaggccatctacctgtttgagctgtctggagaagatggcggcacctggttcctggacctgaagagcaaaggaggaaatgtgggctatggagagcccagcgaccaggctgatgtggtgatgtccatgaccacagatgactttgtgaagatgttcagcggcaagctgaagcccaccatggccttcatgtctgggaagctgaagatcaagggcaacatggccctggccatcaagctggagaagctgatgaaccagatgaatgcccggctgtag

SEQ ID NO: 20582 - DNA, 1257 bp, synthetic construct
  source 1..1257: mol_type = other DNA; note = Synthetic coding sequence
atgctgcccaacacaggccgcctggccggctgcaccgtcttcatcaccggggccagccggggcatcggcaaggccatcgccctgaaggccgccaaggatggagccaacatcgtgattgctgccaagacagcccagccccaccccaagctgctgggcaccatctacacagctgctgaggagattgaagctgtgggcggcaaggccctgccctgcatcgtggatgtgagagatgagcagcagatctctgctgctgtggagaaggccatcaagaagtttggaggcatcgacatcctggtgaacaatgccagcgccatcagcctgaccaacaccctggacacccccaccaagaggctggacctgatgatgaatgtgaacacccggggcacctacctggccagcaaggcctgcatcccctacctgaagaagagcaaggtggcccacatcctgaacatcagcccccccctgaacctgaaccctgtgtggttcaagcagcactgtgcctacaccatcgccaagtatggcatgtccatgtatgtgctgggcatggccgaggagttcaagggggagattgctgtgaatgccctgtggcccaagacagccatccacacagctgccatggacatgctgggcggccctggcatcgagagccagtgcaggaaggtggacatcatcgcagatgctgcctacagcatcttccagaagcccaagagcttcaccggcaactttgtgattgatgagaacatcctgaaggaggagggcattgaaaattttgatgtgtatgccatcaagccaggccaccccctgcagcctgacttcttcctggatgagtacccagaggccgtgtccaagaaggtggagagcactggagctgtgcctgagttcaaggaggagaagctgcagctgcagcccaagcccaggtctggagctgtggaggagaccttccgcatcgtgaaggacagcctgagtgatgatgtggtgaaggccacccaggccatctacctgtttgagctgagcggggaggatggcggcacctggttcctggacctgaagagcaagggcggcaatgtgggctacggggagcccagcgaccaggctgatgtggtgatgtccatgaccacagatgactttgtgaagatgttttctgggaagctgaagcccaccatggccttcatgtctgggaagctgaagatcaagggcaacatggccctggccatcaagctggagaagctgatgaaccagatgaatgcccggctgtag

SEQ ID NO: 20583 - DNA, 1077 bp, synthetic construct
  source 1..1077: mol_type = other DNA; note = Synthetic coding sequence
atgcctggctgtgagctgcctgtgggcacctgcccagacatgtgcccagctgctgagcgggcccagcgggagcgggagcaccggctgcaccggctggaggtggtgcccggctgccggcaggacccccccagggctgacccccagagagctgtgaaggagtacagcaggcctgctgctgggaagccccggcccccacccagccagctgcggcccccatctgtgctgctggccaccgtgcgctacctggccggggaggtggccgagagcgctgacatcgcccgggcagaggtggccagctttgtggccgaccggctgcgggctgtgctgctggacctggccctgcagggcgctggagatgctgaggccgctgtggtgctggaggccgccctggccaccctgctgactgtggtggcccggctgggcccagatgctgcccggggccctgctgaccctgtgctgctgcaggcccaggtgcaggagggcttcggcagcctgcggcgctgctacgcccggggagctggcccccacccccggcagcctgccttccagggcctcttcctgctgtacaacctgggctctgtggaggccctgcacgaggtgctgcagctgcctgctgccctgcgggcctgcccccccctgaggaaggccctggccgtggatgctgccttccgggagggcaatgctgcccggctcttccggctgctgcagaccctgccctacctgcccagctgtgctgtgcagtgccacgtgggccacgcccggcgggaggccctggccaggtttgcccgggccttcagcacccccaagggccagaccctgcccctgggcttcatggtgaacctgctggccctggatggcctgcgggaggcccgggacctgtgccaggcccacggcctgcccctggatggagaggagcgggtggtgttcctgcggggccgctacgtggaggagggcctgcccccagccagcacctgcaaggtgctggtggagagcaagctgcggggccgcaccctggaggaggtggtgatggccgaggaggaggatgagggcacagaccggcccggcagccctgcctag

SEQ ID NO: 20584 - DNA, 150 bp, synthetic construct
  source 1..150: mol_type = other DNA; note = Synthetic coding sequence
atgagcagctgtgtgagcagccagcccagcagcaacagagctgccccccaggatgagctgggcggccggggcagcagcagcagcgagagccagaagccctgtgaggccctgcggggcctgagcagcctgagcatccacctgggcatgtag

SEQ ID NO: 20585 - DNA, 2598 bp, synthetic construct
  source 1..2598: mol_type = other DNA; note = Synthetic coding sequence
atgcctgctgtgtccctgccccccaaggaaaatgccctcttcaagaggatcctgcgctgctatgagcacaagcagtacagaaatggcctgaagttctgcaagcagatcctgagcaaccccaagtttgctgagcacggggagaccctggccatgaagggcctgaccctgaactgcctgggcaagaaggaggaggcctatgagctggtgcggcggggcctgagaaatgacctgaagagccacgtgtgctggcacgtgtatggcctgctgcagaggagtgacaagaagtatgatgaggccatcaagtgctacagaaatgccctgaagtgggacaaggacaacctgcagatcctgcgggacctgagcctgctgcagatccagatgagggacctggagggctaccgggagacccgctaccagctgctgcagctgcggcctgcccagagggcctcctggattggctacgccatcgcctaccacctgctggaggactatgagatggccgccaagatcctggaggagttcaggaagacccagcagaccagcccagacaaggtggactatgagtacagcgagctgctgctgtaccagaaccaggtgctgcgggaggccggcctgtaccgggaggccctggagcacctgtgcacctatgagaagcagatctgtgacaagctggccgtggaggagaccaagggggagctgctgctgcagctgtgccgcctggaggatgctgctgatgtgtaccggggcctgcaggagagaaatcctgagaactgggcctactacaagggcctggagaaggccctgaagccagccaacatgctggagcggctgaagatctatgaggaggcctggaccaagtacccccggggcctggtgccccggcggctgcccctgaacttcctgagcggggagaagttcaaggagtgcctggacaagttcctgaggatgaacttcagcaagggctgcccccctgtgttcaacaccctgcggagcctgtacaaggacaaggagaaggtggccatcatcgaggagctggtggtgggctatgagaccagcctgaagagctgccgcctcttcaaccccaatgatgatggcaaggaggagccccccaccaccctgctgtgggtgcagtactacctggcccagcactatgacaagattggccagcccagcatcgccctggagtacatcaacacagccatcgagagcacccccaccctcatcgagctgttcctggtgaaggccaagatctacaagcatgctggcaacatcaaggaggccgcccgctggatggatgaggcccaggccctggacacagctgaccgcttcatcaacagcaaatgtgccaagtacatgctgaaggccaacctgatcaaggaggccgaggagatgtgcagcaagttcacccgggagggcaccagcgctgtggagaacctgaatgagatgcagtgcatgtggttccagacagaatgtgcccaggcctacaaggccatgaacaagtttggagaggccctgaagaagtgccatgaaattgagcggcacttcatcgagatcacagatgaccagtttgacttccacacctactgcatgaggaagatcaccctgcggagctatgtggacctgctgaagctggaggatgtgctgcggcagcaccccttctacttcaaggccgcccgcatcgccatcgagatctacctgaagctgcatgacaaccccctgacagatgagaacaaggagcacgaggccgacacagccaacatgtctgacaaggagctgaagaagctgaggaacaagcagaggcgggcccagaagaaggcccagatcgaggaggagaagaagaatgctgagaaggagaagcagcagaggaaccagaagaagaagaaggatgatgatgatgaggagattggaggccccaaggaggagctgatccctgagaagctggccaaggtggagacccccctggaggaggccatcaagttcctgacccccctgaagaacctggtgaagaacaagattgagacccacctgtttgcctttgagatctacttcaggaaggagaagttcctgctgatgctgcagagcgtgaagagggcctttgccatcgacagcagccacccctggctgcacgagtgcatgatccgcctcttcaacacagtgtgtgagagcaaggacctgagtgacacagtgaggacagtgctgaagcaggagatgaaccggctgtttggagccaccaaccccaagaacttcaatgagaccttcctgaagaggaacagcgacagcctgccccaccggctgtctgctgccaagatggtgtactacctggaccccagcagccagaagagggccatcgagctggccaccaccctggatgagagcctgaccaacagaaacctgcagacctgcatggaggtgctggaggccctgtatgatggcagcctgggggactgcaaggaggccgctgagatctaccgggccaactgccacaagctgttcccctatgccctggccttcatgcctcctggctatgaggaggacatgaagatcaccgtgaatggagacagcagcgctgaggccgaggagctggccaatgagatctag

SEQ ID NO: 20586 - DNA, 1797 bp, synthetic construct; identical to SEQ ID NO: 19125
  source 1..1797: mol_type = other DNA; note = Synthetic coding sequence

SEQ ID NO: 20587 - DNA, 1818 bp, synthetic construct
  source 1..1818: mol_type = other DNA; note = Synthetic coding sequence
atgggcggctgcttcagcaagcccaagcctgtggagctgaagattgaggtggtgctgcctgagaaggagcggggcaaggaggagctgagcgccagcggcaagggcagcccccgggcctaccagggcaatggaacagcccggcacttccacacagaggagcggctgagcaccccccacccctaccccagcccccaggactgtgtggaggccgctgtgtgccacgtgaaggacctggagaatggccagatgagggaggtggagctgggctggggcaaggtgctgctggtgaaggacaatggagagttccacgccctgggccacaagtgcccccactacggggcccccctggtgaagggcgtgctgagccggggccgggtgcgctgcccctggcatggagcctgcttcaacatcagcactggagacctggaggacttccctggcctggacagcctgcacaagttccaggtgaagattgagaaggagaaggtgtatgtgcgggccagcaagcaggccctgcagctgcagaggaggaccaaggtgatggccaagtgcatcagccccagcgctggctacagcagcagcaccaacgtgctgattgtgggcgctggagctgctggcctggtgtgtgccgagaccctgcggcaggagggcttcagtgaccgcatcgtgctgtgcaccctggacagacacctgccctatgaccggcccaagctgagcaagagcctggacacccagcctgagcagctggccctgcggcccaaggagttcttccgggcctacggcatcgaggtgctgacagaggcccaggtggtgacagtggatgtgaggaccaagaaggtggtgttcaaggatggcttcaagctggagtacagcaagctgctgctggcccctggcagcagccccaagaccctgagctgcaagggcaaggaggtggagaatgtgttcaccatccgcaccccagaagatgccaacagagtggtgcggctggcccggggcagaaatgtggtggtggtgggcgccggcttcctgggcatggaggtggccgcctacctgacagagaaggcccacagcgtgtctgtggtggagctggaggagacccccttccgccgcttcctgggggagcgggtgggccgggccctgatgaagatgtttgagaacaacagagtgaagttctacatgcagacagaggtgtctgagctgcggggccaggagggcaagctgaaggaggtggtgctgaagagcagcaaggtggtgcgggcagatgtgtgtgtggtgggcattggagctgtgcctgccaccggcttcctgcggcagagcggcatcggcctggacagccggggcttcatccctgtgaacaagatgatgcagaccaacgtgcctggggtgtttgctgctggagatgctgtgaccttccccctggcctggaggaacaacaggaaggtgaacatcccccactggcagatggcccacgcccagggccgggtggccgcccagaacatgctggcccaggaggccgagatgagcacagtgccctacctgtggacagccatgtttgggaagagcctgcgctatgccggctatggagagggctttgatgatgtgatcatccagggcgacctggaggagctgaagtttgtggccttctacaccaagggagatgaggtgattgctgtggcctccatgaactatgaccccatcgtgtccaaggtggccgaggtgctggccagcggccgggccatcaggaagcgggaggtggagctgtttgtgctgcacagcaagacaggagacatgtcctggctgaccgggaagggcagctag

SEQ ID NO: 20588 - DNA, 1374 bp, synthetic construct
  source 1..1374: mol_type = other DNA; note = Synthetic coding sequence
atgaaccagccctgcaacagcatggagccccgggtgatggatgatgacatgctgaagctggccgtgggggaccagggcccccaggaggaggccggccagctggccaagcaggagggcatcctcttcaaggatgtgctgagcctgcagctggacttcaggaacatcctgagaattgacaacctgtggcagtttgagaacctgaggaagctgcagctggacaacaacatcatcgagaagattgagggcctggagaacctggcccacctggtgtggctggacctgtccttcaacaacatcgagaccatcgagggcctggacaccctggtgaacctggaggacctgagcctcttcaacaaccgcatcagcaagattgacagcctggatgccctggtgaagctgcaggtgctgagcctgggcaacaacagaattgacaacatgatgaacatcatctacctgcggcgcttcaagtgcctgcggaccctgagcctgagcaggaaccccatcagcgaggccgaggactacaagatgttcatctgtgcctacctgcctgacctgatgtacctggactacagaagaattgatgaccacaccaagaagctggccgaggccaagcaccagtacagcattgatgagctgaagcaccaggagaacctgatgcaggcccagctggaggatgagcaggcccagcgggaggagctggagaagcacaagacagcctttgtggagcacctgaatggcagcttcctgtttgacagcatgtatgcagaggacagcgagggcaacaacctgagctacctgcccggggtgggggagctgctggagacctacaaggacaagtttgtgatcatctgtgtgaacatctttgaatatggcctgaagcagcaggagaagaggaagacagagctggacaccttctctgaatgtgtgcgggaggccatccaggagaaccaggagcagggcaagaggaagatcgccaagtttgaggagaagcacctgagcagcctgagcgccatccgggaggagctggagctgcccaacatcgagaagatgatcctggagtgcagcgctgacatcagcgagctgtttgatgccctgatgaccctggagatgcagctggtggagcagctggaggagaccatcaacatgtttgaaagaaatattgtggacatggtgggcctcttcattgaaaatgtgcagagcctgatggcccagtgccgggacctggagaaccaccaccacgagaagctgctggagatcagcatcagcaccctggagaagatcgtggagggggacctggatgaggacctgcccaatgacctgcgggccggccgcttccagaagttcaactacgtggaggccagcggcaccttctag

SEQ ID NO: 20589 - DNA, 1374 bp, synthetic construct; identical to SEQ ID NO: 20588
  source 1..1374: mol_type = other DNA; note = Synthetic coding sequence

SEQ ID NO: 20590 - DNA, 1572 bp, synthetic construct; identical to SEQ ID NO: 18903
  source 1..1572: mol_type = other DNA; note = Synthetic coding sequence

SEQ ID NO: 20591 - DNA, 1572 bp, synthetic construct; identical to SEQ ID NO: 18903
  source 1..1572: mol_type = other DNA; note = Synthetic coding sequence

SEQ ID NO: 20592 - DNA, 1842 bp, synthetic construct; identical to SEQ ID NO: 18580
  source 1..1842: mol_type = other DNA; note = Synthetic coding sequence

SEQ ID NO: 20593 - DNA, 390 bp, synthetic construct; identical to SEQ ID NO: 19988
  source 1..390: mol_type = other DNA; note = Synthetic coding sequence

SEQ ID NO: 20594 - DNA, 390 bp, synthetic construct; identical to SEQ ID NO: 19988
  source 1..390: mol_type = other DNA; note = Synthetic coding sequence

SEQ ID NO: 20595 - DNA, 4128 bp, synthetic construct
  source 1..4128: mol_type = other DNA; note = Synthetic coding sequence
atggtgcctggagaggagaaccagctggtgcccaaggaggatgtgttctggcgctgccggcagaacatctttgatgagatgaagaagaagttcctgcagattgaaaatgctgctgaggagccccgggtgctgtgcatcatccaggacaccaccaacagcaagacagtgaatgaaagaatcaccctgaacctgcctgccagcacccctgtgaggaagctgtttgaagatgtggccaacaaggtgggctacatcaatggcacctttgacctggtgtggggcaatggcatcaacacagctgacatggcccccctggaccacaccagtgacaagagcctgctggatgccaactttgagcccgggaagaagaacttcctgcacctgacagacaaggatggagagcagccccagatcctgctggaggacagcagcgctggggaggacagcgtgcatgaccgcttcatcggccccctgccccgggagggcagcggcggcagcaccagtgactatgtgtcccagagctacagctacagcagcatcctgaacaagtcagaaacaggctacgtgggcctggtgaaccaggccatgacctgctacctgaacagcctgctgcagaccctcttcatgaccccagagttcagaaatgccctgtacaagtgggagtttgaggagagcgaggaggaccctgtgaccagcatcccctaccagctgcagaggctgtttgtgctgctgcagaccagcaagaagagggccatcgagaccacagatgtgaccaggagctttggctgggacagcagcgaggcctggcagcagcatgatgtgcaggagctgtgccgggtgatgtttgatgccctggagcagaagtggaagcagacagagcaggccgacctgatcaatgagctgtaccagggcaagctgaaggactatgtgcgctgcctggagtgtggctatgagggctggagaattgacacctacctggacatccccctggtgatccggccctacggcagcagccaggcctttgcctctgtggaggaggccctgcacgccttcatccagcctgagatcctggatggccccaaccagtacttctgtgagcgctgcaagaagaagtgtgatgccaggaagggcctgcgcttcctgcacttcccctacctgctgaccctgcagctgaagagatttgattttgactacaccaccatgcaccgcatcaagctgaatgacaggatgaccttccctgaggagctggacatgagcaccttcattgatgtggaggatgagaagagcccccagacagagagctgcacagattctggagcagaaaatgaaggcagctgccacagcgaccagatgagcaatgacttcagcaatgatgatggagtggatgagggcatctgcctggagaccaacagcggcacagagaagatcagcaagagcggcctggagaagaacagcctcatctatgagctgttctctgtgatggtgcacagcggcagcgctgctgggggccactactatgcctgcatcaagagcttcagtgatgagcagtggtacagcttcaatgaccagcacgtgagccgcatcacccaggaggacatcaagaagacccacggcggcagcagcggcagccggggctactacagcagcgcctttgccagcagcaccaatgcctacatgctgatctaccgcctgaaggaccctgccagaaatgccaagttcctggaggtggatgagtacccagagcacatcaagaacctggtgcagaaggagcgggagctggaggagcaggagaagaggcagcgggagattgaaagaaacacctgcaagatcaagctgttctgcctgcaccccaccaagcaggtgatgatggagaacaagctggaggtgcacaaggacaagaccctgaaggaggccgtggagatggcctacaagatgatggacctggaggaggtgatccccctggactgctgccgcctggtgaagtatgatgagttccatgactacctggagaggagctatgaaggagaggaggacacccccatgggcctgctgctgggcggcgtgaagagcacctacatgtttgacctgctgctggagaccaggaagccagaccaggtgttccagagctacaagccaggagaggtgatggtgaaggtgcacgtggtggacctgaaggccgagagcgtggccgcccccatcaccgtgcgggcctacctgaaccagacagtgacagagttcaagcagctgatcagcaaggccatccacctgcctgctgagaccatgagaattgtgctggagcgctgctacaatgacctgcggctgctgtctgtgagcagcaagaccctgaaggccgagggcttcttccgcagcaacaaggtgtttgtggagagcagcgagaccctggactaccagatggcctttgctgacagccacctgtggaagctgctggacagacatgccaacaccatccggctgtttgtgctgctgcctgagcagagccctgtgtcctacagcaagaggacagcctaccagaaggccggcggggacagcggaaatgtggatgatgactgtgagcgggtgaagggccctgtgggcagcctgaagtctgtggaggccatcctggaggagagcacagagaagctgaagagcctgagcctgcagcagcagcaggatggagacaatggagacagcagcaagagcacagagaccagtgactttgagaacatcgagagccccctgaatgaaagagacagcagcgcctctgtggacaaccgggagctggagcagcacatccagaccagtgaccctgagaacttccagagcgaggagaggagtgacagtgatgtgaacaatgacaggagcaccagctctgtggacagcgacatcctgagcagcagccacagcagtgacaccctgtgcaatgctgacaatgcccagatccccctggccaacggcctggacagccacagcatcaccagcagcaggaggaccaaggccaatgaaggcaagaaggagacctgggacacagcagaagaagattctggaacagattctgaatatgatgagagcggcaagagcagaggagagatgcagtacatgtacttcaaggccgagccctatgctgctgatgagggcagcggggagggccacaagtggctgatggtgcacgtggacaagaggatcaccctggccgccttcaagcagcacctggagccctttgtgggcgtgctgagcagccacttcaaggtgttccgggtgtatgccagcaaccaggagtttgagagcgtgcggctgaatgagaccctgagcagcttcagtgatgacaacaagatcaccatccggctgggccgggccctgaagaagggggagtacagagtgaaggtgtaccagctgctggtgaatgagcaggagccctgcaagttcctgctggatgctgtgtttgccaagggcatgacagtgcggcagagcaaggaggagctgatcccccagctgcgggagcagtgtggcctggagctgagcattgaccgcttccggctgaggaagaagacctggaagaaccctggcaccgtcttcctggactaccacatctatgaggaggacatcaacatcagcagcaactgggaggtgttcctggaggtgctggatggagtggagaagatgaagtccatgagccagctggccgtgctgagccgccgctggaagcccagcgagatgaagctggaccccttccaggaggtggtgctggagagcagctctgtggatgagctgcgggagaagctgtctgagatcagcggcatccccctggatgacatcgagtttgccaagggccggggcaccttcccctgtgacatctctgtgctggacatccaccaggacctggactggaaccccaaggtgtccaccctgaatgtgtggcccctgtacatctgtgatgatggagctgtgatcttctacagagacaagacagaggagctgatggagctgacagatgagcagagaaatgagctgatgaagaaggagagcagccggctgcagaagacaggccaccgggtgacctacagccccaggaaggagaaggccctgaagatctacctggatggagcccccaacaaggacctgacccaggactag

SEQ ID NO: 20596 - DNA, 600 bp, synthetic construct
  source 1..600: mol_type = other DNA; note = Synthetic coding sequence
atgaggacagctgaccgggaggcccggcccggcctgcccagcctgctgctgctgctgctggccggggccggcctgtctgctgccagccccccagctgccccccgcttcaacgtgtccctggacagcgtgcctgagctgcgctggctgcctgtgctgcggcactatgacctggacctggtgcgggccgccatggcccaggtgattggagacagagtgcccaagtgggtgcacgtgctgattggcaaggtggtgctggagctggagcgcttcctgccccagcccttcaccggggagatccggggcatgtgtgacttcatgaacctgagcctggccgactgcctgctggtgaacctggcctatgagagctctgtgttctgcaccagcatcgtggcccaggacagccggggccacatctaccacggcaggaacctggactacccctttggaaatgtgctgaggaagctgactgtggatgtgcagttcctgaagaatggccagatcgccttcaccggcaccaccttcatcggctacgtgggcctgtggacaggccagagcccccacaagttcaccgtgtctggagatgagcgggacccccactag

SEQ ID NO: 20597 - DNA, 972 bp, synthetic construct
  source 1..972: mol_type = other DNA; note = Synthetic coding sequence
atgaggacagctgaccgggaggcccggcccggcctgcccagcctgctgctgctgctgctggccggggccggcctgtctgctgccagccccccagctgccccccgcttcaacgtgtccctggacagcgtgcctgagctgcgctggctgcctgtgctgcggcactatgacctggacctggtgcgggccgccatggcccaggtgattggagacagagtgcccaagtgggtgcacgtgctgattggcaaggtggtgctggagctggagcgcttcctgccccagcccttcaccggggagatccggggcatgtgtgacttcatgaacctgagcctggccgactgcctgctggtgaacctggcctatgagagctctgtgttctgcaccagcatcgtggcccaggacagccggggccacatctaccacggcaggaacctggactacccctttggaaatgtgctgaggaagctgactgtggatgtgcagttcctgaagaatggccagatcgccttcaccggcaccaccttcatcggctacgtgggcctgtggacaggccagagcccccacaagttcaccgtgtctggagatgagcgggacaagggctggtggtgggagaatgccatcgccgccctcttcagaagacacatccctgtgtcctggctgatccgggccaccctgtctgagagcgagaactttgaggccgctgtgggcaagctggccaagacccccctgattgctgatgtgtactacatcgtgggcggcaccagcccccgggagggcgtggtgatcaccaggaacagagatggccctgctgacatctggcccctggaccccctgaatggagcctggttccgggtggagaccaactatgaccactggaagccagcccccaaggaggatgacaggaggaccagcgccatcaaggccctgaatgccaccggccaggccaacctgagcctggaggccctcttccagtag

SEQ ID NO: 20598 - DNA, 4539 bp, synthetic construct
  source 1..4539: mol_type = other DNA; note = Synthetic coding sequence
atggctgctgctgctggcaacagagccagcagcagcggcttccctggggcccgggccaccagccctgaggccggcggcggcggcggggccctgaaggccagcagcgccccagctgctgctgctggcctgctgcgggaggccggcagcggcggccgggagagagctgactggaggcggcggcagctgaggaaggtgcgctctgtggagctggaccagctgcctgagcagcccctcttcctggccgccagccccccagccagcagcaccagccccagccctgagccagcagatgctgctggcagcggcaccggcttccagcctgtggccgtgcccccaccccacggggccgccagccggggcggggcccacctgacagaatctgtggccgccccagattctggggccagcagccctgctgctgctgagcctggagagaagagggccccagctgctgagcccagccctgctgctgccccagctggccgggagatggagaacaaggagaccctgaagggcctgcacaagatggatgacaggcctgaggagaggatgatccgggagaagctgaaggccacctgcatgcctgcctggaagcatgagtggctggagaggaggaacagaagaggccctgtggtggtgaagcccatccctgtgaagggagatggcagcgagatgaaccacctggccgctgagagccctggagaggtgcaggccagcgctgccagccctgccagcaagggccgccgcagccccagccctggcaacagccccagcggccgcacagtgaagtctgagagccctggggtgcggaggaagagggtgtcccctgtgcccttccagagcggccgcatcaccccaccccggcgggcccccagcccagatggcttcagcccctacagccctgaggagaccaacagaagagtgaacaaggtgatgagggcccggctgtacctgctgcagcagatcggccccaacagcttcctgattggaggagacagcccagacaacaagtacagagtcttcatcggcccccagaactgcagctgtgcccggggcaccttctgcatccacctgctgtttgtgatgctgcgggtcttccagctggagcccagcgaccccatgctgtggaggaagaccctgaagaactttgaggtggagagcctcttccagaagtaccacagcagaagaagcagccgcatcaaggcccccagcaggaacaccatccagaagtttgtgtccaggatgagcaacagccacaccctgagcagcagcagcaccagcaccagcagcagcgagaacagcatcaaggatgaggaggagcagatgtgccccatctgcctgctgggcatgctggatgaggagagcctgactgtgtgtgaagatggctgcaggaacaagctgcaccaccactgcatgagcatctgggccgaggagtgcagaagaaaccgggagcccctcatctgccccctgtgccgcagcaagtggaggagccatgacttctacagccatgagctgagcagccctgtggacagccccagcagcctgcgggccgcccagcagcagacagtgcagcagcagcccctggccggcagcagaagaaaccaggagagcaacttcaacctgacccactacggcacccagcagatccccccagcctacaaggacctggccgagccctggatccaggtgtttggcatggagctggtgggctgcctcttcagcaggaactggaatgtgcgggagatggccctgcggcggctgagccatgatgtgtctggggccctgctgctggccaatggagagagcactggaaacagcggcggcagcagcggcagcagccccagcggcggggccaccagcggcagcagccagaccagcatctctggagatgtggtggaggcctgctgcagcgtgctgtccatggtgtgtgccgaccctgtgtacaaggtgtatgtggccgccctgaagaccctgcgggccatgctggtgtacaccccctgccacagcctggccgagcgcatcaagctgcagaggctgctgcagcctgtggtggacaccatcctggtgaagtgtgctgatgccaacagcaggaccagccagctgagcatcagcaccctgctggagctgtgcaagggccaggccggggagctggccgtgggccgggagatcctgaaggccggcagcattggaattggaggagtggactatgtgctgaactgcatcctgggcaaccagacagagagcaacaactggcaggagctgctgggccgcctgtgcctgattgaccggctgctgctggagttccctgctgagttctacccccacatcgtgtccacagatgtgtcccaggccgagcctgtggagatccgctacaagaagctgctgagcctgctgacctttgccctgcagagcattgacaacagccacagcatggtgggcaagctgagccgccgcatctacctgagcagcgccaggatggtgaccaccgtgccccacgtgttcagcaagctgctggagatgctgtctgtgagcagcagcacccacttcaccaggatgagaagaaggctgatggccatcgcagatgaggtggagattgctgaggccatccagctgggcgtggaggacaccctggatggccagcaggacagcttcctgcaggcctctgtgcccaacaactacctggagaccacagagaacagcagcccagaatgtactgtgcacctggagaagacaggcaagggcctgtgtgccaccaagctgagcgccagcagcgaggacatcagcgagcggctggccagcatctctgtgggccccagcagcagcaccaccaccaccaccaccaccacagagcagcccaagcccatggtgcagaccaagggccggccccacagccagtgcctgaacagcagccccctgagccaccacagccagctgatgtttcctgccctgagcacccccagcagcagcacccccagcgtgcctgctggaacagccacagatgtgtccaagcaccggctgcagggcttcatcccctgccgcatccccagcgccagcccccagacccagaggaagttcagcctgcagttccacaggaactgcccagagaacaaggacagcgacaagctgagccctgtgttcacccagagccggcccctgcccagcagcaacatccaccggcccaagcccagccggcccaccccaggcaacaccagcaagcagggcgaccccagcaagaacagcatgaccctggacctgaacagcagcagcaaatgtgatgacagctttggctgcagcagcaacagcagcaatgctgtgatccccagtgatgaaacagtgttcacccctgtggaggagaagtgccgcctggatgtgaacacagagctgaacagcagcattgaggacctgctggaggcctccatgcccagcagtgacaccaccgtgaccttcaagtctgaggtggccgtgctgagccctgagaaggccgagaatgatgacacctacaaggatgatgtgaaccacaaccagaagtgcaaggagaagatggaggccgaggaggaggaggccctggccatcgccatggccatgtctgccagccaggatgccctgcccatcgtgccccagctgcaggtggagaatggagaggacatcatcatcatccagcaggacaccccagagaccctgcccggccacaccaaggccaagcagccctaccgggaggacacagagtggctgaagggccagcagatcggcctgggcgccttcagcagctgctaccaggcccaggatgtgggcaccggcaccctgatggctgtgaagcaggtgacctacgtgaggaacaccagcagcgagcaggaggaggtggtggaggccctgcgggaggagatccgcatgatgagccacctgaaccaccccaacatcatccgcatgctgggcgccacctgtgagaagagcaactacaacctcttcatcgagtggatggccggcggctctgtggcccacctgctgagcaagtacggggccttcaaggagagcgtggtgatcaactacacagagcagctgctgcggggcctgagctacctgcacgagaaccagatcatccacagagatgtgaagggggccaacctgctgattgacagcacaggccagaggctgagaattgctgactttggagctgctgcccggctggccagcaagggcaccggggccggggagttccagggccagctgctgggcaccatcgccttcatggcccctgaggtgctgcggggccagcagtatggccgcagctgtgatgtgtggagcgtgggctgtgccatcatcgagatggcctgtgccaagccaccctggaatgctgagaagcacagcaaccacctggccctgatcttcaagatcgccagcgccaccacagcccccagcatccccagccacctgagccctggcctgagagatgtggccctgcgctgcctggagctgcagccccaggacaggcctcccagccgggagctgctgaagcaccctgtgttccgcaccacctggtag

SEQ ID NO: 20599 - DNA, 2274 bp, synthetic construct
  source 1..2274: mol_type = other DNA; note = Synthetic coding sequence
gctgatggaggagacagccaggccttccgctgcaccagctgtggccatgctggcaccaccccagccccccgggaggccctgagccctgcagatgcccacgtgggccggggctttgctgagcgggagcccatcccagcccagggcctgctggtgctggccgtgctgagtgatggagctggggaccacatccggcagaggctgctgccccccctgctgcagatcgtgtgcaagggcctggaggaccccagccaggtggtgagaaatgctgccctgtttgccctgggccagttcagcgagaacctgcagccccacatcagcagctacagccgggaggtgatgcccctgctgctggcctacctgaagtctgtgcccctgggccacacccaccacctggccaaggcctgctacgccctggagaactttgtggagaacctgggccccaaggtgcagccctacctgcctgagctgatggagtgcatgctgcagctgctgaggaaccccagcagcccccgggccaaggagctggccgtgtctgccctgggcgccatcgccacagctgcccaggccagcctgctgccctacttccctgccatcatggagcacctgcgggagttcctgctgaccggccgggaggacctgcagcctgtgcagatccagagcctggagaccctgggcgtgctggcccgggctgtgggggagcccatgaggcccctggccgaggagtgctgccagctgggcctgggcctgtgtgaccaggtggatgatcctgacctgcggcgctgcacctacagcctgtttgctgccctgagcggcctgatgggagagggcctggccccccacctggagcagatcaccaccctgatgctgctgagcctgcggagcacagagggcatcgtgccccagtatgatggcagcagcagcttcctgctgtttgatgatgaaagtgatggagaggaggaggaggagctgatggatgaagatgtggaggaggaggatgacagcgagatcagcggctacagcgtggagaatgccttctttgatgagaaggaggacacctgtgccgctgtgggggagatctctgtgaacacctctgtggccttcctgccctacatggagagcgtgtttgaggaggtgttcaagctgctggagtgcccccacctgaatgtgaggaaggccgcccacgaggccctgggccagttctgctgtgccctgcacaaggcctgccagagctgccccagcgagcccaacacagctgccctgcaggccgccctggcccgggtggtgcccagctacatgcaggccgtgaaccgggagcgggagcggcaggtggtgatggctgtgctggaggccctgactggagtgctgcggagctgtggcaccctgaccctgaagcccccaggccgcctggccgagctgtgtggggtgctgaaggctgtgctgcagaggaagacagcctgccaggacacagatgaggaggaggaggaggaggatgatgaccaggccgagtatgatgccatgctgctggagcacgccggggaggccatcccagccctggccgctgctgctggaggagacagctttgcccccttctttgctggcttcctgcccctgctggtgtgcaagaccaagcagggctgcaccgtggccgagaagagctttgctgtgggcaccctggccgagaccatccagggcctgggcgccgccagcgcccagtttgtgtcccggctgctgcctgtgctgctgagcacagcccaggaggccgaccctgaggtgcgcagcaatgccatcttcggcatgggcgtgctggccgagcacggcggccacccagcccaggagcacttccccaagctgctgggcctgctcttccccctgctggcccgggagagacatgacagagtgcgggacaacatctgtggggccctggcccggctgctgatggccagccccaccaggaagccagagccccaggtgctggccgccctgctgcacgccctgcccctgaaggaggacctggaggagtgggtgaccatcggccgcctcttctccttcctgtaccagagcagcccagaccaggtgattgatgtggcccctgagctgctgcgcatctgcagcctcatcctggccgacaacaagatccccccagacaccaaggccgccctgctgctgctgctgaccttcctggccaagcagcacacagacagcttccaggccgccctgggcagcctgcctgtggacaaggcccaggagctgcaggccgtgctgggcctgtcctag

SEQ ID NO: 20600 - DNA, 1812 bp, synthetic construct
  source 1..1812: mol_type = other DNA; note = Synthetic coding sequence
atgggcgtcatccctgagggccccctgtgggtgtctggcagtgatgacaacctgagcggcaccagcggcatggaggtggatgacagagtgtctgccctggagcagaggctgcagctgcaggaggatgagctggccgtgctgaaggccgccctggctgatgccctgcggcggctgcgggcctgtgaggagcagggcgccgccctgcgggcccggggcacccccaagggccgggccccaccccggctgggcaccacagcctctgtgtgccagctgctgaagggcctgcccaccaggacccccctgaatggcagcggccccccccggcgggtgggcggctacgccaccagccccagcagccccaagaaggaggccaccagcggccgcagctctgtgcggcgctacctgagccctgagcggctggcctctgtgcggcgggaggaccccaggagcaggaccaccagcagcagcagcaactgcagcgccaagaaggagggcaagaccaaggaggtgatcttctctgtggaggatggctctgtgaagatgttcctgcggggccggcctgtgcccatgatgatcccagatgagctggcccccacctacagcctggacaccaggtctgagctgcccagctgccgcctgaagctggagtgggtgtatggctaccggggccgggactgccgggccaacctgtacctgctgcccactggagagatcgtgtactttgtggcctctgtggccgtgctgtacagcgtggaggagcagaggcagaggcactacctgggccacaatgatgacatcaagtgcctggccatccacccagacatggtgaccatcgccaccggccaggtggccggcaccaccaaggagggcaagcccctgcccccccacgtgcgcatctgggacagcgtgtccctgagcaccctgcacgtgctgggcctgggcgtgtttgacagagctgtgtgctgcgtgggcttcagcaagagcaatggaggcaacctgctgtgtgctgtggatgagagcaatgaccacatgctgtctgtgtgggactgggccaaggagaccaaggtggtggatgtgaagtgcagcaatgaagctgtgctggtggccaccttccaccccacagaccccaccgtgctgatcacctgtgggaagagccacatctacttctggaccctggagggcggcagcctgagcaagaggcagggcctgtttgagaagcatgagaagcccaagtatgtgctgtgtgtgaccttcctggagggcggagatgtggtgactggagacagcggcggcaacctgtatgtgtggggcaagggcggcaaccgcatcacccaggccgtgctgggcgcccatgatggcggcgtgtttggcctgtgtgccctgagagatggcaccctggtgtctgggggcggccgggaccggcgggtggtgctgtggggcagtgactacagcaagctgcaggaggtggaggtgcctgaagattttggacctgtgaggacagtggccgagggccatggagacaccctgtatgtgggcaccaccagaaattccatcctgcagggctctgtgcacacaggcttcagcctgctggtgcagggccacgtggaggagctgtggggcctggccacccaccccagccgggcccagtttgtgacctgtggccaggacaagctggtgcacctgtggagcagtgacagccaccagcccctgtggagccgcatcatcgaggtggagagccgctctgtgacccaggccggcggccagtggcatgacctgggcagcctgcagcccccacctcctggcttcaagtag

SEQ ID NO: 20601 - DNA, 996 bp, synthetic construct
  source 1..996: mol_type = other DNA; note = Synthetic coding sequence
atggccgagggcggcggccctgagcctggagagcaggagcggcgcagcagcggccccaggcctccttctgcccgggacctgcagctggccctggccgagctgtatgaagatgaggtgaagtgcaagagcagcaagagcaaccggcccaaggccaccgtcttcaagagccccaggaccccaccccagcgcttctacagcagcgagcacgagtacagcggcctgaacatcgtgcggcccagcacaggcaagatcgtgaatgagctgttcaaggaggcccgggagcacggggctgtgcccctgaatgaggccacccgggccagcggagatgacaagagcaagagcttcaccggcggcggctaccgcctgggcagcagcttctgcaagaggtctgagtacatctacggggagaaccagctgcaggatgtgcagatcctgctgaagctgtggagcaatggcttcagcctggatgatggagagctgcggccctacaatgagcccaccaatgcccagttcctggagagcgtgaagagaggagagatccccctggagctgcagaggctggtgcatggaggccaggtgaacctggacatggaggaccaccaggaccaggagtacatcaagccccggctgcgcttcaaggccttcagcggggagggccagaagctgggcagcctgaccccagaaattgtgtccacccccagcagccctgaggaggaggacaagagcatcctgaatgctgtggtgctgattgatgattctgtgcccaccaccaagatccagatccggctggctgatggcagccgcctcatccagcgcttcaacagcacccaccgcatcctggatgtgaggaacttcatcgtgcagagcaggcctgagtttgctgccctggacttcatcctggtgaccagcttccccaacaaggagctgacagatgagagcctgaccctgctggaggccgacatcctgaacacagtgctgctgcagcagctgaagtag

SEQ ID NO: 20602 - DNA, 2064 bp, synthetic construct
  source 1..2064: mol_type = other DNA; note = Synthetic coding sequence
atggatggaggagccctgacagacaccagcctgacagacagctacttcagcaccagcttcatcggcgtgaatggcttcggcagccctgtggagaccaagtaccccctgatgcagaggatgaccaacagcagcagcagccccagcctgctgaatgattctgccaagccctacagcgcccatgaccccctgaccagccctgccagcagcctcttcaatgactttggagccctgaacatcagccagaggaggaagacccccaaccccacagccagcgagttcatccccaagggcggcagcaccagccggctgagcaatgtgtcccagagcaacatgtctgccttcagccaggtgttcagccaccccagcatgggcagccctgccacagctggcctggcccctggcatgagcctgtctgctggcagcagccccctgcacagccccaagatcaccccccacaccagccctgcccccaggagaagaagccacacccccaacccagccagctacatggtgcccagcagcgccagcacctctgtgaacaaccctgtgtcccagacccccagcagcggccaggtgatccagaaggagaccgtgggcggcaccacctacttctacacagacaccaccccagcccccctgaccggcatggtgttccccaactaccacatctacccacccacagccccccacgtggcctacatgcagcccaaggccaatgcccccagcttcttcatggctgatgagctgcggcaggagctgatcaacagacacctgatcaccatggcccagattgaccaggccgacatgcctgctgtgcccacagaggtggacagctaccacagcctcttccccctggagcccctgcccccacccaaccgcatccagaagagcagcaactttggctacatcaccagctgctacaaggctgtgaacagcaaggatgacctgccctactgcctgcggcgcatccacggcttccggctggtgaacaccaagtgcatggtgctggtggacatgtggaagaagatccagcacagcaacatcgtgaccctgcgggaggtgttcaccaccaaggcctttgctgagcccagcctggtgtttgcctatgacttccacgccggcggggagaccatgatgagccgccacttcaatgaccccaatgctgatgcctacttcaccaagaggaagtggggccagcacgagggccccctgccccggcagcacgccggcctgctgcctgagagcctcatctgggcctacatcgtgcagctgagcagcgccctgcggaccatccacacagctggcctggcctgccgggtgatggaccccaccaagatcctgatcaccgggaagacccggctgcgggtgaactgtgtgggcgtgtttgatgtgctgacctttgacaacagccagaacaacaaccccctggccctgatggcccagtaccagcaggccgacctgatcagcctgggcaaggtggtgctggccctggcctgcaacagcctggccggcatccagcgggagaacctgcagaaggccatggagctggtgaccatcaactacagcagtgacctgaagaacctgatcctgtacctgctgacagaccagaacaggatgaggtctgtgaatgacatcatgcccatgattggagcccgcttctacacccagctggatgctgcccagatgagaaatgatgtgattgaggaggacctggccaaggaggtgcagaatggccgcctcttccggctgctggccaagctgggcaccatcaatgaaagacctgagttccagaaggaccccacctggagcgagactggagaccgctacctgctgaagctgttccgggaccacctgttccaccaggtgacagaagctggggccccctggattgacctgagccacatcatcagctgcctgaacaagctggatgctggggtgcctgagaagatcagcctcatcagcagagatgagaagtctgtgctggtggtgacctacagcgacctgaagcgctgctttgagaacaccttccaggagctgattgctgctgccaacggccagctgtag

SEQ ID NO: 20603 - DNA, 6951 bp, synthetic construct
  source 1..6951: mol_type = other DNA; note = Synthetic coding sequence
atggatggagtgagcagcgaggccaatgaagaaaatgacaacatcgagaggcctgtgagaagaagacacagcagcatcctgaagcccccaagaagccccctgcaggacctgcggggcggcaatgaaagagtgcaggagagcaatgccctgaggaacaagaagaacagcagaagagtgtcctttgctgacaccatcaaggtgttccagacagagagccacatgaagatcgtgaggaagtctgagatggaggagacagaaacaggagagaacctgctgctgatccagaacaagaagctggaggacaactactgtgagatcaccggcatgaacaccctgctgagcgcccccatccacacccagatgcagcagaaggagttcagcatcatcgagcacacccgggagaggaagcacgccaatgaccagaccgtcatcttcagtgatgagaaccagatggacctgaccagcagccacacagtgatgatcaccaagggcctgctggacaaccccatcagcgagaagagcaccaagattgacaccaccagcttcctggccaacctgaagctgcacacagaggacagcaggatgaagaaggaggtgaacttctctgtggaccagaacaccagcagcgagaacaagattgacttcaatgacttcatcaagaggctgaagacaggcaagtgcagcgccttcccagatgtgcctgacaaggaaaattttgagatccccatctacagcaaggagcccaacagcgccagcagcacccaccagatgcacgtgtccctgaaggaggatgagaacaacagcaacatcaccaggctcttccgggagaaggatgatggcatgaacttcacccagtgccacacagccaacatccagaccctcatccccaccagcagcgagaccaacagccgggagagcaaaggaaatgacatcaccatctatggaaatgacttcatggacctgaccttcaaccacaccctgcagatcctgcctgccactggaaacttcagcgagattgagaaccagacccagaatgccatggatgtgaccaccggctacggcaccaaggccagcggcaacaagacagtgttcaagagcaagcagaacacagccttccaggacctgagcatcaacagcgctgacaagatccacatcaccaggagccacatcatgggcgctgagacccacatcgtgtcccagacctgcaaccaggatgcccgcatcctggccatgaccccagagagcatctacagcaaccccagcatccagggctgcaagacagtgttctacagcagctgcaatgatgccatggagatgaccaagtgcctgagcaacatgagggaggagaagaacctgctgaagcatgacagcaactatgccaagatgtactgcaacccagatgccatgagcagcctgacagagaagaccatctacagcggggaggagaacatggacatcaccaagagccacacagtggccatcgacaaccagatcttcaagcaggaccagagcaatgtgcagattgctgctgcccccaccccagagaaggagatgatgctgcagaacctgatgaccaccagtgaagatggcaagatgaatgtgaactgcaacagcgtgccccacgtgtccaaggagcgcatccagcagagcctgagcaaccccctgagcatcagcctgacagacaggaagacagagctgctgagcggggagaacatggacctgacagagagccacaccagcaacctgggcagccaggtgcccctggccgcctacaacctggcccctgagagcaccagcgagagccacagccagagcaagagcagcagtgatgaatgtgaggagatcaccaagagcagaaatgagcccttccagaggagtgacatcatcgccaagaacagcctgacagacacctggaacaaggacaaggactgggtgctgaagatcctgccctacctggacaaggacagcccccagagcgctgactgcaaccaggagatcgccaccagccacaacatcgtgtactgcggcggcgtgctggacaagcagatcaccaacagaaacacagtgtcctgggagcagagcctcttcagcaccaccaagcccctcttcagcagcggccagttctccatgaagaaccacgacacagccatcagcagccacacagtgaagtctgtgctgggccagaacagcaagctggccgagcccctgaggaagagcctgagcaaccccaccccagactactgccacgacaagatgatcatctgcagcgaggaggagcagaacatggacctgaccaagagccacacagtggtgattggcttcggccccagcgagctgcaggagctgggcaagaccaacctggagcacaccaccggccagctgaccaccatgaaccggcagattgctgtgaaggtggagaagtgtgggaagagccccatcgagaagagcggcgtgctgaagagcaactgcatcatggatgtgctggaggatgagagcgtgcagaagcccaagttccccaaggagaagcagaatgtgaagatctggggcaggaagtctgtgggcggccccaagattgacaagaccatcgtgttttctgaagatgacaagaatgacatggacatcaccaagagctacaccatcgagatcaaccaccggcccctgctggagaagagggactgccacctggtgcccctggccggcaccagcgagaccatcctgtacacctgccggcaggatgacatggagatcaccaggagccacaccacagccctggagtgcaagacagtgtccccagatgagatcaccacccggcccatggacaagacagtggtgtttgtggacaaccacgtggagctggagatgacagagagccacacagtgttcatcgactaccaggagaaggagaggacagaccggcccaactttgagctgagccagaggaagagcctgggcacccccaccgtcatctgcacccccacagaggagagcgtcttcttccctggaaatggagagagtgaccggctggtggccaatgacagccagctgacccccctggaggagtggagcaacaacagaggccctgtggaggtggccgacaacatggagctgagcaagagcgccacctgcaagaacatcaaggatgtgcagagccctggcttcctgaatgagcccctgagcagcaagagccagaggaggaagagcctgaagctgaagaatgacaagaccatcgtgttttctgagaaccacaagaatgacatggacatcacccagagctgcatggtggagattgacaatgaaagtgccctggaggacaaggaggacttccacctggccggggccagcaagaccatcctgtacagctgtggccaggatgacatggagatcaccaggagccacaccacagccctggagtgcaagaccctgctgcccaatgagatcgccatccggcccatggacaagacagtgctcttcacagacaactacagcgacctggaggtgacagacagccacacagtgttcatcgactgccaggccacagagaagatcctggaggagaaccccaagtttggaattggcaagggcaagaacctgggcgtgtccttccccaaggacaacagctgtgtgcaggagattgctgagaagcaggccctggccgtgggcaacaagatcgtgctgcacacagagcagaagcagcagctgtttgctgccaccaacagaaccaccaatgagatcatcaagttccacagcgctgccatggatgagaaggtgattggcaaggtggtggaccaggcctgcaccctggagaaggcccaggtggagagctgccagctgaacaacagagacagaagaaatgtggacttcaccagcagccacgccacagctgtgtgtggcagcagtgacaactacagctgcctgcccaacgtcatcagctgcacagacaacctggagggcagcgccatgctgctgtgtgacaaggatgaggagaaggccaactactgccctgtgcagaatgacctggcctatgccaatgactttgccagcgagtactacctggagagcgagggccagcccctgagcgccccctgccccctgctggagaaggaggaggtgatccagaccagcaccaagggccagctggactgtgtgatcaccctgcacaaggaccaggacctgatcaaggaccccaggaacctgctggccaaccagaccctggtgtacagccaggacctgggggagatgaccaagctgaacagcaagagggtgtccttcaagctgcccaaggaccagatgaaggtgtatgtggatgacatctacgtgatcccccagccccacttcagcacagaccagccccccctgcccaagaagggccagagcagcatcaacaaggaggaggtgatcctgagcaaggccggcaacaagagcctgaacatcatcgagaacagcagcgcccccatctgtgagaacaagcccaagatcctgaacagcgaggagtggtttgctgctgcctgcaagaaggagctgaaggagaacatccagaccaccaactacaacacagccctggacttccacagcaacagtgatgtgaccaagcaggtgatccagacccacgtgaatgctggggaggccccagaccctgtgatcaccagcaatgtgccctgcttccacagcatcaagcccaacctgaacaacctgaatggcaagacaggagagttcctggccttccagacagtgcacctgccccccctgcctgagcagctgctggagctgggcaacaaggcccacaatgacatgcacatcgtgcaggccacagagatccacaacatcaacatcatcagcagcaatgccaaggacagcagagatgaggagaacaagaagagccacaacggggctgagaccaccagcctgccccccaagacagtgttcaaggacaaggtgcggcgctgcagcctgggcatcttcctgccccggctgcccaacaagaggaactgcagcgtgactggaattgatgacctggagcagatcccagctgacaccacagacatcaaccacctggagacccagcctgtgagcagcaaggacagcggcatcggctctgtggccggcaagctgaacctgagccccagccagtacatcaatgaggagaacctgcctgtgtacccagatgagatcaacagcagtgacagcatcaacattgaaacagaggagaaggccctgattgagacctaccagaaggagatcagcccctatgagaacaagatgggcaagacctgcaacagccagaagaggacctgggtgcaggaggaggaggacatccacaaggagaagaagatcaggaagaatgagatcaagttcagtgacaccacccaggaccgggagatctttgaccaccacacagaggaggacatcgacaagagcgccaacagcgtgctgatcaagaacctgagcaggacccccagcagctgcagcagcagcctggacagcatcaaggcagatggcaccagcctggacttcagcacctaccgcagcagccagatggagagccagttcctgcgggacaccatctgtgaggagagcctgcgggagaagctgcaggacggccgcatcaccatccgggagttcttcatcctgctgcaggtgcacatcctgatccagaagccccggcagagcaacctgcccggcaacttcaccgtgaacaccccacccaccccagaggacctgatgctgagccagtatgtgtaccggcccaagatccagatctaccgggaggactgtgaggcccggcggcagaagattgaggagctgaagctgagcgccagcaaccaggacaagctgctggtggacatcaacaagaacctgtgggagaagatgaggcactgcagcgacaaggagctgaaggccttcggcatctacctgaacaagatcaagagctgcttcaccaagatgaccaaggtgttcacccaccagggcaaggtggccctgtatggcaagctggtgcagagcgcccagaatgaaagagagaagctgcagatcaagattgatgagatggacaagatcctgaagaagattgacaactgcctgacagagatggagacagagaccaagaacctggaggatgaggagaagaacaaccctgtggaggagtgggacagcgagatgagagctgctgagaaggagctggagcagctgaagacagaggaggaggagctgcagaggaacctgctggagctggaggtgcagaaggagcagaccctggcccagattgacttcatgcagaagcagaggaacagaacagaggagctgctggaccagctgagcctgtctgagtgggatgtggtggagtggagcgatgaccaggccgtgttcacctttgtgtatgacaccatccagctgaccatcacctttgaggagagcgtggtgggcttccccttcctggacaagcgctacaggaagatcgtggatgtgaacttccagagcctgctggatgaggaccaggccccacccagcagcctgctggtgcacaagctgatcttccagtatgtggaggagaaggagagctggaagaagacctgcaccacccagcaccagctgcccaagatgctggaggagttcagcctggtggtgcaccactgccgcctgctgggggaggagattgagtacctgaagcgctggggccccaactacaacctgatgaacatcgacatcaacaacaatgagctgcggctgctcttcagcagcagcgctgcctttgccaagtttgagatcaccctcttcctgagcgcctactaccccagcgtgcccctgcccagcaccatccagaaccacgtgggcaacaccagccaggatgacatcgccaccatcctgagcaaggtgcccctggagaacaactacctgaagaatgtggtgaagcagatctaccaggacctcttccaggactgccacttctaccactag

SEQ ID NO: 20604 - DNA, 714 bp, synthetic construct
  source 1..714: mol_type = other DNA; note = Synthetic coding sequence
atgggctgctgcggctgcagcggcggctgcggcagcggctgcggcggccggggcagcggctgcggcggctgcggcagcggctgcggcggctgcggcagcggctgcggcggctgcggcagcggctgcggcggctgcggcggctgcggcagcggctgtgccggctgcggcggctgcggcagcggctgctgcgtgcctgtgtgctgctgcaagcccatgtgctgctgcgtgcctgcctgcagctgcagcagctgtgggaagggcggctgcggcagctgtggcggcagcaagaggggctgtgtgtcctgtggggtgtccaagggggcctgtggcagctgtggcggcagcaagggcggctgcggcagctgtggcggcagcaagggcggctgcggcagctgtggcggcagcaagggcggctgcggcagctgtggcggcagcaagggcggctgcggcagctatggctgcagccagagcagctgctgcaagccctgctgctgcagcagcggctgcggcagcagctgctgccagagcagctgctgcaagccctactgctgccagagcagctgctgcaagccctactgctgccagagcagctgctgcaagccctgcagctgcttcagcggctgcggcagcagctgctgccagagcagctgctacaagccctgctgctgccagagcagctgctgcgtgcctgtgtgctgccagtgcaagatctag

SEQ ID NO: 20605 - DNA, 717 bp, synthetic construct
  source 1..717: mol_type = other DNA; note = Synthetic coding sequence
atgggctgcagcggctgcagcggcggctgcggcagcagctgtggcggctgcggcagcagctgtggcggctgcggcagcggctacggcggctgcggcagcggctgctgcgtgcctgtgtgctgctgcaagcctgtgtgctgctgcgtgcctgcctgcagctgcagcagctgtggcagctgtggcggcagcaagggcgtgtgtggcagctgtggcggctgcaagggcggctgcggcagctgtggcggcagcaagggcggctgcggcagcagctgctgcgtgcctgtgtgctgcagcagcagctgtggcagctgtggcggcagcaagggcgtgtgtggcttccggggcggcagcaagggcggctgcggcagctgtggctgcagccagtgcagctgctacaagccctgctgctgcagcagcggctgcggcagcagctgctgccagagcagctgctgcaagcccagctgcagccagagcagctgctgcaagccctgctgcagccagagcagctgctgcaagccctgctgctgcagcagcggctgcggcagcagctgctgccagagcagctgctgcaagccctgctgcagccagagcagctgctgcaagccctgctgctgcagcagcggctgcggcagcagctgctgccagagcagctgctgcaagccctgcagcagccagagcagctgctgcgtgcccatctgctgccagtgcaagatctag

SEQ ID NO: 20606 - DNA, 1473 bp, synthetic construct; identical to SEQ ID NO: 18917
  source 1..1473: mol_type = other DNA; note = Synthetic coding sequence

SEQ ID NO: 20607 - DNA, 5826 bp, synthetic construct
  source 1..5826: mol_type = other DNA; note = Synthetic coding sequence
ctgctgacctctgtgctgatgcccagctttggctacttcatccgcagccctgagaagcgggagcccatcgccctgatcaggaagagtgatgtgtcccggggcaacctggagaaggagatggcccacctgaaccacgacctgtacagcggggacctgaatgagcagagccaggcccagctgtctgagggcagcatcaccctgcaggtggaggccgtggagagcaccagccaggtggatgaaaatgatgtgaccctgacagctgacaagggcaagacagaggacaccttcttcatgagcaacaagccccagcgctacaaggacaagctgcctgacagcggggacagcatgctgcgcatcagcaccatcgccagcgccatcgccgaggcctctgtgaacacagaccccagccagctggccgccatgatcaaggccctgagcaacaagacccgggacaagaccttccaggaggatgagaagcagaaggactacagccacgtgcgccacttcctgcccaatgacctggagaagagcaatggcagcaatgccctggacatggagaagtacctgaagaagacagaggtgagccgctatgaaagtgccctggagaacttcagccgggcctccatgtctgacacctgggacctgagcctgcccaaggagcagaccacccaggacatccaccctgtggacctgagcgccacctctgtgtctgtgcgggccccagaagaaaatacagctgccatcgtgtatgtggagaatggagagagcgagaaccaggagagcttccgcaccatcaacagcagcaacagcgtgaccaaccgggagaacaacagcgctgtggtggatgtgaagacctgcagcattgacaacaagctgcaggatgtgggcaatgatgagaaggccaccagcatcagcacccccagcgacagctacagctctgtgaggaacccccgcatcaccagcctgtgcctgctgaaggactgtgaggagatccgggacaaccgggagaaccagaggcagaatgaatgtgtgtctgagatcagcaacagcgagaagcacgtgacctttgagaaccacagaattgtgagccccaagaacagcgacctgaagaacaccagccctgagcacggcggccggggctctgaagatgagcaggagagcttccggcccagcaccagccccctgagccacagcagccccagcgagatcagcggcaccagcagcagcggctgtgccctggagagctttggcagcgctgcccagcagcagcagcccccctgtgagcaggagctgagccccctggtgtgcagccctgctggggtgtcccggctgacctacgtgtctgagcctgagagcagctaccccaccacagccacagatgatgccctggaggacaggaagagtgacatcaccagcgagctgagcaccaccatcatccagggcagccctgctgccctggaggagcgggccatggagaagctgcgggagaaggtgcccttccagaacagaggcaagggcaccctgagcagcatcatccagaacaacagcgacaccaggaaggccacagagaccaccagcctgagcagcaagccagaatatgtgaagccagacttccgctggagcaaggaccccagcagcaagagcggcaacctgctggagaccagcgaggtgggctggaccagcaaccctgaggagctggaccccatccggctggccctgctgggcaagagcggcctgagctgccaggtgggcagcgccaccagccaccctgtgtcctgccaggagcccattgatgaggaccagaggatcagccccaaggacaagagcacagctggccgggagttcagcggccaggtgagccaccagaccaccagcgagaaccagtgcacccccatccccagcagcacagtgcacagctctgtggccgacatgcagaacatgcctgctgctgtgcacgccctgctgacccagcccagcctgtctgctgccccctttgcccagcgctacctgggcaccctgcccagcacaggcagcaccaccctgccccagtgccacgccggaaatgccaccgtgtgtggcttcagcggcggcctgccctacccagctgtggccggggagcctgtgcagaacagcgtggccgtgggcatctgcctgggcagcaacatcggcagcggctggatgggcaccagcagcctgtgcaacccctacagcaacaccctgaaccagaacctgctgagcaccaccaagcccttccctgtgcccagcgtgggcaccaactgtggcatcgagccctgggacagcggcgtgaccagcggcctgggctctgtgcgggtgcctgaggagctgaagctgccccacgcctgctgcgtgggcatcgccagccagaccctgctgtctgtgctgaaccccacagaccgctggctgcaggtgtccattggagtgctgagcatctctgtgaatggagagaaggtggacctgagcacctaccgctgcctggtgttcaagaacaaggccatcatccggccccacgccacagaggagatcaaggtgctcttcatccccagcagccctggggtcttccgctgcaccttctctgtggcctcctggccctgcagcacagatgctgagaccatcgtgcaggccgaggccctggccagcacagtgaccctgacagccatcgccgagagccctgtgattgaggtggagacagagaagaaggatgtgctggactttggagacctgacctacggcggctggaaggccctgcccctgaagctgatcaacagaactcatgccaccgtgcccatccgcctcatcatcaatgccaatgctgtggcctggcgctgcttcaccttcagcaaggagagcgtgcgggcccctgtggaggtggccccctgtgctgatgtggtgacccggctggccggccccagcgtggtgaaccacatgatgcctgccagctatgatggccaggaccctgagttcctgatgatctgggtgctcttccacagccccaagaagcagatcagcagcagtgacatcctggacagcgctgaggagttcagcgccaaggtggacatcgaggtggacagccccaaccccacccctgtgctgcggtctgtgtccctgcgggcccgggccggcatcgcccgcatccacgccccccgggacctgcagaccatgcacttcctggccaaggtggccagcagcaggaagcagcacctgcccctgaagaatgccggcaacatcgaggtgtacctggacatcaaggtgcctgagcagggcagccacttctctgtggaccccaagaacctgctgctgaagccaggagaggagcacgaggtgattgtgtccttcacccccaaggaccctgaggcctgtgaggagcgcatcctgaagatctttgtgcagcccttcggcccccagtatgaggtggtgctgaagggggaggtgatcagcagcggcagcaagcccctgagccctggcccctgcctggacatccccagcatcctgagcaacaagcagttcctggcctggggcggcgtgcccctgggccgcacccagctgcagaagctggccctgaggaacaacagcgccagcaccacccagcacctgcggctgctgatccggggccaggaccaggactgcttccagctgcagaacaccttcggcagcgagcagaggctgaccagcaactgtgagatccgcatccaccccaaggaggacatcttcatctctgtgctgtttgcccccacccggctgagctgcatgctggcccggctggagatcaagcagctgggcaacagaagccagcccggcatcaagttcaccatccccctgagcggctacggcggcaccagcaacctgatcctggagggcgtgaagaagctgagtgacagctacatggtgacagtgaatggcctggtgcctgggaaggagagcaagatcgtgttttctgtgaggaacacaggcagccgggccgcctttgtgaaggctgtgggcttcaaggacagccagaagaaggtgctgctggaccccaaggtgctgcgcatcttcccagacaagtttgtgctgaaggagaggacccaggagaatgtgaccctcatctacaaccccagcgaccggggcatcaacaacaagacagccacagagctgagcacagtgtacctgtttggaggagatgagatcagccggcagcagtacagaagagccctgctgcacaagccagagatgatcaagcagatcctgcctgagcacagcgtgctgcagaacatcaactttgtggaggccttccaggatgagctgctggtgacagaggtgtatgacctgccccagaggcccaatgatgtgcagctgttctacggctccatgtgcaagatcatcctgagcgtcatcggggagttccgggactgcatcagcagccgggagttcctgcagcccagcagcaaggccagcctggagagcaccagtgacctgggcgccagcggcaagcatggaggaaatgtgtccctggatgtgctgcctgtgaagggcccccagggcagccccctgctgagccgggccgcccggccccccctggaccagctggccagcgaggagccctggacagtgctgcctgagcacctgatcctggtggcccccagcccctgtgacatggccaagacaggccgcttccagatcgtgaacaacagcgtgcggctgctgcgctttgagctgtgctggccagcccactgcctgactgtgaccccccagcacggctgtgtggcccctgagagcaagctgcagatcctggtgagccccaacagcagcctgagcaccaagcagagcatgttcccctggagcggcctcatctacatccactgtgatgatggccagaagaagatcgtgaaggtgcagatccgggaggacctgacccaggtggagctgctgacccggctgaccagcaagcccttcggcatcctgagccctgtgtctgagcccagcgtgagccacctggtgaagcccatgaccaagccacccagcaccaaggtggagatccggaacaagagcatcaccttccccaccacagagcccggggagaccagcgagagctgcctggagctggagaaccacggcaccacagatgtgaagtggcacctgagcagcctggccccaccctacgtgaagggcgtggatgagagcggagatgtgttccgggccacctatgctgccttccgctgcagccccatcagcggcctgctggagagccacggcatccagaaggtgtccatcaccttcctgccccggggccgcggggactatgcccagttctgggatgtggagtgccaccccctgaaggagccccacatgaagcacaccctgcgcttccagctgagcggccagagcattgaagcagaaaatgaaccagaaaatgcctgcctgagcacagacagcctcatcaagattgaccacctggtgaagccccggcggcaggccgtgtctgaggccagcgcccgcatccctgagcagctggatgtgacagcccggggcgtgtatgccccagaagatgtgtaccgcttccggcccacctctgtgggggagagcaggaccctgaaggtgaacctgaggaacaacagcttcatcacccacagcctgaagttcctgagcccccgggagcccttctacgtgaagcacagcaagtacagcctgcgggcccagcactacatcaacatgcctgtgcagttcaagcccaagtctgctgggaagtttgaggccctgctggtgatccagacagatgagggcaagagcatcgccatccgcctcatcggggaggccctgggcaagaactag

SEQ ID NO: 20608 - DNA, 111 bp, synthetic construct
  source 1..111: mol_type = other DNA; note = Synthetic coding sequence
atgtgctactacggcaactactacggcggctacggctatggaggcctgggctgcggctacggcagctgctgcggctgcggcttccggcggctgggctgcggctatggatag

SEQ ID NO: 20609 - DNA, 528 bp, synthetic construct
  source 1..528: mol_type = other DNA; note = Synthetic coding sequence
atgagctacaactgctgcagcggcaacttcagcagccgcagctgtggggactacctgcgctacccagccagcagccggggcttctcctaccccagcaacctggtgtacagcacagacctgtgcagccccagcacctgccagctgggcagcagcctgtaccggggctgccaggagatctgctgggagcccaccagctgccagaccagctatgtggagagcagcccctgccagaccagctgctaccggcccaggaccagcctgctgtgcagcccctgcaagaccacctacagcggcagcctgggcttcggcagcagcagctgccgcagcctgggctacggcagccgcagctgctacagcgtgggctgcggcagcagtggagtgcgcagcctgggctacggcagctgtggcttccccagcctgggctacggcagcggcttctgccggcccacctacctggccagccgcagctgccagagcccctgctacagacctgcctacggcagcaccttctgccgcagcacctgctag

SEQ ID NO: 20610 - DNA, 324 bp, synthetic construct
  source 1..324: mol_type = other DNA; note = Synthetic coding sequence
atgggcaagaagaggaccaagggcaagacagtgcccattgatgacagcagcgagaccctggagcctgtgtgccgccacatcaggaagggcctggagcagggcaacctgaagaaggccctggtgaatgtggagtggaacatctgccaggactgcaagacagacaacaaggtgaaggacaaggccgaggaggagacagaggagaagcccagcgtgtggctgtgcctgaagtgtggccaccagggctgcggcaggaacagccaggagcagcacgccctgaagcactacctgacccccaggtctgagccccactgcctggtgctgtag

SEQ ID NO: 20611 - DNA, 2469 bp, synthetic construct
  source 1..2469: mol_type = other DNA; note = Synthetic coding sequence
atgggcaagaagaggaccaagggcaagacagtgcccattgatgacagcagcgagaccctggagcctgtgtgccgccacatcaggaagggcctggagcagggcaacctgaagaaggccctggtgaatgtggagtggaacatctgccaggactgcaagacagacaacaaggtgaaggacaaggccgaggaggagacagaggagaagcccagcgtgtggctgtgcctgaagtgtggccaccagggctgcggcaggaacagccaggagcagcacgccctgaagcactacctgacccccaggtctgagccccactgcctggtgctgagcctggacaactggagcgtgtggtgctacgtgtgtgacaatgaggtgcagtactgcagcagcaaccagctgggccaggtggtggactatgtgaggaagcaggccagcatcaccacccccaagccagagaaggacaatggaaacatcgagctggagaacaagaagctggagaaggagagcaagaatgagcaggagcgggagaagaaggagaacatggccaaggagaacccccccatgaacagcccctgccagatcaccgtgaagggcctgagcaacctgggcaacacctgcttcttcaatgctgtgatgcagaacctgagccagacccctgtgctgcgggagctgctgaaggaggtgaagatgagcggcaccatcgtgaagattgagcccccagacctggccctgacagagcccctggagatcaacctggagcccccaggccccctgaccctggccatgagccagttcctgaatgagatgcaggagaccaagaagggcgtggtgacccccaaggagctgttcagccaggtgtgcaagaaggctgtgcgcttcaagggctaccagcagcaggacagccaggagctgctgcgctacctgctggatggcatgagagctgaggagcaccagagggtgtccaagggcatcctgaaggccttcggcaacagcacagagaagctggatgaggagctgaagaacaaggtgaaggactatgagaagaagaagtccatgcccagctttgtggaccgcatctttggaggagagctgacctccatgatcatgtgtgaccagtgcaggacagtgtccctggtgcatgagagcttcctggacctgagcctgcctgtgctggatgaccagagcggcaagaagtctgtgaatgacaagaacctgaagaagacagtggaggatgaggaccaggacagcgaggaggagaaggacaatgacagctacatcaaggagaggagtgacatccccagcggcaccagcaagcacctgcagaagaaggccaagaagcaggccaagaagcaggccaagaaccagaggcggcagcagaagatccagggcaaggtgctgcacctgaatgacatctgcaccatcgaccaccctgaggacagtgaatatgaggccgagatgagcctgcagggcgaggtgaacatcaagagcaaccacatcagccaggagggcgtgatgcacaaggagtactgtgtgaaccagaaggacctgaatggccaggccaagatgattgaatctgtgacagacaaccagaagagcacagaggaggtggacatgaagaacatcaacatggacaatgacctggaggtgctgaccagcagccccaccaggaacctgaatggagcctacctgacagagggcagcaatggagaggtggacatcagcaatggcttcaagaacctgaacctgaatgctgccctgcacccagatgagatcaacatcgagatcctgaatgacagccacaccccaggcaccaaggtgtatgaggtggtgaatgaagatcctgagacagccttctgcaccctggccaaccgggaggtgttcaacacagatgaatgttccatccagcactgcctgtaccagttcaccagaaatgagaagctgagagatgccaacaagctgctgtgtgaggtgtgcacccggcggcagtgcaatggccccaaggccaacatcaagggggagaggaagcacgtgtacaccaatgccaagaagcagatgctgatcagcctggcccctcctgtgctgaccctgcacctgaagcgcttccagcaggccggcttcaacctgaggaaggtgaacaagcacatcaagtttcctgagatcctggacctggcccccttctgcaccctgaagtgcaagaatgtggccgaggagaacaccagggtgctgtacagcctgtatggagtggtggagcacagcggcaccatgaggagcggccactacacagcctatgccaaggccaggacagccaacagccacctgagcaacctggtgctgcatggagacatcccccaggactttgagatggagagcaagggccagtggttccacatcagtgacacccacgtgcaggccgtgcccaccaccaaggtgctgaacagccaggcctacctgctcttctatgaaagaatcctgtag

SEQ ID NO: 20612 - DNA, 2472 bp, synthetic construct; identical to SEQ ID NO: 19153
  source 1..2472: mol_type = other DNA; note = Synthetic coding sequence

SEQ ID NO: 20613 - DNA, 1167 bp, synthetic construct
  source 1..1167: mol_type = other DNA; note = Synthetic coding sequence
atggaccccatccgctccttctgtgggaagctgcggagcctggccagcaccctggactgtgaaacagcccggctgcagagggccctggatggagaggagagtgactttgaggactaccccatgaggatcctgtatgacctgcacagcgaggtgcagaccctgaaggatgatgtgaacatcctgctggacaaggcccggctggagaaccaggagggcatcgacttcatcaaggccaccaaggtgctgatggagaagaacagcatggacatcatgaagatccgggagtacttccagaagtatggctacagcccccgggtgaagaagaacagcgtgcatgagcaggaggccatcaacagcgaccctgagctgagcaactgtgagaacttccagaagacagatgtgaaggatgacctgagtgacccccctgtggccagcagctgcatcagcgagaagagccccaggagcccccagctgagtgactttggcctggagcgctacatcgtgtcccaggtgctgcccaaccccccccaggccgtgaacaactacaaggaggagcccgtcatcgtgaccccacccaccaagcagagcctggtgaaggtgctgaagacccccaagtgtgccctgaagatggatgactttgaatgtgtgacccccaagctggagcacttcggcatcagcgagtacaccatgtgcctgaatgaagactacaccatgggcctgaagaatgccaggaacaacaagtctgaggaggccatcgacacagagagccggctgaatgacaacgtgtttgccacccccagccccatcatccagcagctggagaagagtgatgctgagtacaccaacagccccctggtgcccaccttctgcaccccaggcctgaagatccccagcaccaagaacagcatcgccctggtgtccaccaactaccccctgagcaagaccaacagcagcagcaatgacctggaggtggaggacaggaccagcctggtgctgaacagcgacacctgctttgagaacctgacagaccccagcagccccaccatcagcagctatgagaacctgctgcggacccccaccccacctgaggtgaccaagatccctgaggacatcctgcagaagttccagtggatctaccccacccagaagctgaacaagatgaggtag

SEQ ID NO: 20614 - DNA, 1353 bp, synthetic construct; identical to SEQ ID NO: 18980
  source 1..1353: mol_type = other DNA; note = Synthetic coding sequence

SEQ ID NO: 20615 - DNA, 3378 bp, synthetic construct
  source 1..3378: mol_type = other DNA; note = Synthetic coding sequence
atgacagtggagcagaatgtgctgcagcagagcgctgcccagaagcaccagcagaccttcctgaaccagctgcgggagatcaccggcatcaatgacacccagatcctgcagcaggccctgaaggacagcaatggaaacctggagctggccgtggccttcctgacagccaagaatgccaagaccccccagcaggaggagaccacctactaccagacagccctgcctggaaatgaccgctacatctctgtgggcagccaggccgacaccaacgtcatcgacctgactggagatgacaaggatgacctgcagagggccatcgccctgagcctggccgagagcaacagagccttccgggagaccggcatcacagatgaggagcaggccatcagccgggtgctggaggccagcattgctgagaacaaggcctgcctgaagaggacccccacagaggtgtggagggacagcaggaacccctatgacaggaagaggcaggacaaggcccctgtgggcctgaagaatgtgggcaacacctgctggttctctgctgtgatccagagcctcttcaacctgctggagttccggcggctggtgctgaactacaagccacccagcaatgcccaggacctgcccaggaaccagaaggagcacaggaacctgcccttcatgagggagctgcgctacctgtttgccctgctggtgggcaccaagaggaaatatgtggaccccagcagagctgtggagatcctgaaggatgccttcaagagcaatgacagccagcagcaggatgtgtctgagttcacccacaagctgctggactggctggaggatgccttccagatgaaggccgaggaggagacagatgaggagaagcccaagaaccccatggtggagctgttctacggccgcttcctggccgtgggcgtgctggagggcaagaagtttgaaaatacagagatgtttggccagtaccccctgcaggtgaatggcttcaaggacctgcatgaatgtctggaggccgccatgattgaaggagaaattgagagcctgcacagcgagaacagcggcaagagcggccaggagcactggttcacagagctgccccctgtgctgacctttgagctgagcagatttgagttcaaccaggccctgggccggcctgagaagatccacaacaagctggagttcccccaggtgctgtacctggaccgctacatgcacaggaaccgggagatcacccgcatcaagcgggaggagatcaagaggctgaaggactacctgactgtgctgcagcagaggctggagcgctacctgtcctatggcagcggccccaagcgcttccccctggtggatgtgctgcagtatgccctggagtttgccagcagcaagcctgtgtgcaccagccctgtggatgacattgatgccagcagccccccatctggcagcatccccagccagaccctgcccagcaccacagagcagcagggcgccctgagcagcgagctgcccagcaccagccccagctctgtggccgccatcagcagccgcagcgtcatccacaagcccttcacccagagccgcatccccccagacctgcccatgcacccagcccccaggcacatcacagaggaggagctgtctgtgctggagagctgcctgcaccgctggaggacagaaattgaaaatgacacccgggacctgcaggagagcatcagccgcatccacaggaccatcgagctgatgtacagcgacaagtccatgatccaggtgccctaccgcctgcatgctgtgctggtgcatgagggccaggccaatgccggccactactgggcctacatctttgaccaccgggagagccgctggatgaagtacaatgacattgctgtgaccaagagctcctgggaggagctggtgcgggacagctttggaggctacagaaatgccagcgcctactgcctgatgtacatcaatgacaaggcccagttcctgatccaggaggagttcaacaaggagaccggccagcccctggtgggcatcgagaccctgcccccagacctgcgggactttgtggaggaggacaaccagagatttgagaaggagctggaggagtgggatgcccagctggcccagaaggccctgcaggagaagctgctggccagccagaagctgcgggagagcgagacctctgtgaccacagcccaggccgccggggaccctgagtacctggagcagcccagcagaagtgacttcagcaagcacctgaaggaggagaccatccagatcatcaccaaggccagccatgaacatgaggacaagagccctgagaccgtgctgcagagcaagccagagaacaccaccagccagcccctgagcaaccagagggtggtggaggtggccatcccccacgtgggcaagttcatgattgagagcaaggagggcggctatgatgatgagatcatgatgacccccaacatgcagggcatcatcatggccatcggcaagagccgctctgtgtatgacagatgtggccctgaggccggcttcttcaaggccatcaagctggagtatgcccggctggtgaagctggcccaggaggacaccccacctgagacagactaccgcctgcaccacgtggtggtgtacttcatccagaaccaggcccccaagaagatcatcgagaagaccctgctggagcagtttggagacaggaacctgagctttgatgagcgctgccacaacatcatgaaggtggcccaggccaagctggagatgatcaagccagaggaggtgaacctggaggagtatgaggagtggcaccaggactacaggaagttccgggagaccaccatgtacctgatcatcggcctggagaacttccagcgggagagctacatcgacagcctgctcttcctgatctgtgcctaccagaacaacaaggagctgctgagcaagggcctgtaccggggccatgatgaggagctgatcagccactaccgccgggagtgcctgctgaagctgaatgagcaggccgctgagctgtttgaaagtggagaagatcgggaggtgaacaacggcctcatcatcatgaatgagttcatcgtgcccttcctgcccctgctgctggtggatgagatggaggagaaggacatcctggccgtggaggacatgaggaaccgctggtgcagctacctgggccaggagatggagccccacctgcaggagaagctgacagacttcctgcccaagctgctggactgcagcatggagatcaagagcttccacgagccccccaagctgcccagctacagcacccatgagctgtgtgaaagatttgcccgcatcatgctgagcctgagcaggaccccagcagatggaagatag

SEQ ID NO: 20616 - DNA, 1608 bp, synthetic construct
  source 1..1608: mol_type = other DNA; note = Synthetic coding sequence
atggacctgcggcaggcctgcaggacccccagcagagatgaagctggggtggagctgctgatgacctacttcatccagctgggctttgtggagagccgcttcttcccccccacccggcagatgggcctgctcttcacctggtatgacagcctgactggagtgcctgtgtcccagcagaacctgctgctggagaaggcctctgtgctcttcaacacaggagccctgtacacccagatcggcacccgctgtgaccggcagacccaggccggcctggagagcgccattgatgccttccagagagctgctggggtgctgaactacctgaaggacaccttcacccacacccccagctatgacatgagccctgccatgctgtctgtgctggtgaagatgatgctggcccaggcccaggagagcgtgtttgagaagatcagcctgcccggcatcagaaatgagttcttcatgctggtgaaggtggcccaggaggccgccaaggtgggggaggtgtaccagcagctgcatgctgccatgagccaggcccctgtgaaggagaacatcccctacagctgggccagcctggcctgtgtgaaggcccaccactacgccgccctggcccactacttcaccgccatcctgctgattgaccaccaggtgaagccaggcacagacctggaccaccaggagaagtgcctgagccagctgtatgaccacatgcctgagggcctgacccccctggccaccctgaagaatgaccagcagaggcggcagctgggcaagagccacctgcggcgggccatggcccaccacgaggagagcgtgcgggaggccagcctgtgcaagaagctgcggagcattgaggtgctgcagaaggtgctgtgtgccgcccaggagaggagccggctgacctacgcccagcaccaggaggaggatgacctgctgaacctgattgatgcccccagcgtggtggccaagacagagcaggaggtggacatcatcctgccccagttcagcaagctgactgtgacagacttcttccagaagctgggccccctgagcgtcttcagcgccaacaagcgctggaccccacccaggagcatccgcttcaccgctgaggagggggacctgggcttcaccctgcggggaaatgcccctgtgcaggtgcacttcctggacccctactgcagcgcctctgtggccggggcccgggagggggactacatcgtgtccatccagctggtggactgcaagtggctgaccctgtctgaggtgatgaagctgctgaagagctttggagaagatgaaattgagatgaaggtggtgtccctgctggacagcaccagctccatgcacaacaagagcgccacctacagcgtgggcatgcagaagacctacagcatgatctgcctggccattgatgatgatgacaagacagacaagaccaagaagatcagcaagaagctgtccttcctgtcctggggcaccaacaagaaccggcagaagagcgccagcaccctgtgcctgcccagcgtgggcgccgcccggccccaggtgaagaagaagctgcccagccccttcagcctgctgaacagcgacagctcctggtactag

SEQ ID NO: 20617 - DNA, 2952 bp, synthetic construct
  source 1..2952: mol_type = other DNA; note = Synthetic coding sequence
atggccccccggctgcagctggagaaggccgcctggcgctgggccgagaccgtgcggcctgaggaggtgtcccaggagcacatcgagacagcctaccgcatctggctggagccctgcatccggggcgtgtgcagaagaaactgcaagggcaaccccaactgcctggtgggcatcggggagcacatctggctgggggagattgatgaaaattccttccacaacattgatgaccccaactgtgagaggaggaagaagaacagctttgtgggcctgaccaacctgggcgccacctgctacgtgaacaccttcctgcaggtgtggttcctgaacctggagctgcggcaggccctgtacctgtgccccagcacctgcagcgactacatgctgggagatggcatccaggaggagaaggactatgagccccagaccatctgtgagcacctgcagtacctgtttgccctgctgcagaacagcaacagacgctacatcgaccccagcggctttgtgaaggccctgggcctggacaccggccagcagcaggatgcccaggagttcagcaagctgttcatgagcctgctggaggacaccctgagcaagcagaagaacccagatgtgaggaacatcgtgcagcagcagttctgtggggagtatgcctacgtgacagtgtgcaaccagtgtggccgggagagcaagctgctgagcaagttctatgagctggagctgaacatccagggccacaagcagctgacagactgcatcagcgagttcctgaaggaggagaagctggagggggacaaccgctacttctgtgagaactgccagagcaagcagaatgccaccaggaagatccggctgctgagcctgccctgcaccctgaacctgcagctgatgagatttgtgtttgaccggcagacaggccacaagaagaagctgaacacctacatcggcttcagcgagatcctggacatggagccctacgtggagcacaagggcggcagctatgtgtatgagctgtctgctgtgctgatccaccggggcgtgtctgcctacagcggccactacatcgcccacgtgaaggacccccagagcggggagtggtacaagttcaatgatgaggacatcgagaagatggagggcaagaagctgcagctgggcatcgaggaggacctggccgagcccagcaagagccagaccaggaagcccaagtgtgggaagggcacccactgcagcagaaatgcctacatgctggtgtaccgcctgcagacccaggagaagcccaacaccaccgtgcaggtgcctgccttcctgcaggagctggtggaccgggacaacagcaagtttgaggagtggtgcatcgagatggccgagatgaggaagcagagcgtggacaagggcaaggccaagcatgaggaggtgaaggagctgtaccagaggctgcctgctggagctgagccctatgaatttgtgtccctggagtggctgcagaagtggctggatgagagcacccccaccaagcccatcgacaaccacgcctgcctgtgcagccatgacaagctgcacccagacaagatcagcatcatgaagaggatcagtgaatatgctgctgacatcttctacagccgctatggaggcggcccccggctgactgtgaaggccctgtgcaaggaatgtgtggtggagcgctgccgcatcctgcggctgaagaaccagctgaatgaagactacaagacagtgaacaacctgctgaaggctgctgtgaagggcagtgatggcttctgggtgggcaagagcagcctgcgctcctggaggcagctggccctggagcagctggatgagcaggatggagatgctgagcagagcaatggcaagatgaatggcagcaccctgaacaaggatgagagcaaggaggagaggaaggaggaggaggagctgaacttcaatgaagacatcctgtgcccccacggggagctgtgcatcagtgaaaatgaaagaaggctggtgtccaaggaggcctggagcaagctgcagcagtacttccccaaggcccctgagttccccagctacaaggagtgctgcagccagtgcaagatcctggagcgggagggggaggagaatgaggccctgcacaagatgattgccaatgagcagaagaccagcctgcccaacctcttccaggacaagaaccggccctgcctgagcaactggccagaggacacagatgtgctgtacatcgtgtcccagttctttgtggaggagtggaggaagtttgtgaggaagcccacccgctgcagccctgtgtcctctgtgggcaacagcgccctgctgtgcccccacggcggcctgatgttcacctttgcctccatgaccaaggaggacagcaagctgattgccctgatctggcccagcgagtggcagatgatccagaagctgtttgtggtggaccacgtgatcaagatcacccgcatcgaggtgggagatgtgaaccccagcgagacccagtacatcagcgagcccaagctgtgcccagaatgtcgggagggcctgctgtgccagcagcagagggacctgcgggagtacacccaggccaccatctacgtgcacaaggtggtggacaacaagaaggtgatgaaggacagcgcccctgagctgaatgtgagcagcagcgagacagaggaggacaaggaggaggccaagccagatggagagaaggaccctgacttcaaccagatcatgcacgccttctctgtggccccctttgaccagaacctgagcattgatggcaagatcctgagtgatgactgtgccaccctgggcaccctgggcgtcatccctgagagcgtcatcctgctgaaggcagatgagcccatcgctgactatgctgccatggatgatgtgatgcaggtgtgcatgcctgaggagggcttcaagggcaccggcctgctgggccactag

SEQ ID NO: 20618 - DNA, 738 bp, synthetic construct
  source 1..738: mol_type = other DNA; note = Synthetic coding sequence
atgtctgtgtgcagcagtgacctgtcctatggcagccgggtgtgcctgcccggcagctgtgacagctgcagcgacagctggcaggtggatgactgcccagagagctgctgtgagcccccctgctgtgccccagccccctgcctgagcctggtgtgcacccctgtgtcccgggtgagcagcccctgctgccgggtgacctgtgagcccagcccctgccagagcggctgcaccagcagctgcacccccagctgctgccagcagagcagctgccagcctgcctgctgcaccagcagcccctgccagcaggcctgctgcgtgcctgtgtgctgcaagacagtgtgctgcaagcctgtgtgctgcatgcctgtgtgctgcggccccagcagcagctgctgccagcagagcagctgccagcctgcctgctgcatcagcagcccctgccagcagagctgctgcgtgcctgtgtgctgcaagcccatctgctgcgtgcctgtgtgcagcggggccagcagcctgtgctgccagcagagcagctgccagcctgcctgctgcaccaccagctgctgccggcccagcagctctgtgtccctgctgtgcaggcctgtgtgcaggcctgccaggagagtgcctgtgcccagctgctgcgtgcccaccagcagctgccagcccagctgtggccgcctggccagctgtggcagcctgctgtgccggcccacctgcagccggctggcctgctag

SEQ ID NO: 20619 - DNA, 1098 bp, synthetic construct
  source 1..1098: mol_type = other DNA; note = Synthetic coding sequence
atggccgccagcaccatgtctgtgtgcagcagtgacctgtcctatggcagccgggtgtgcctgcccggcagctgtgacagctgcagcgacagctggcaggtggatgactgcccagagagctgctgtgagcccccctgctgtgccccagccccctgcctgagcctggtgtgcacccctgtgtcccgggtgagcagcccctgctgccctgtgacctgtgagcccagcccctgccagagcggctgcaccagcagctgcacccccagctgctgccagcagagcagctgccagctggcctgctgtgccagcagcccctgccagcaggcctgctgcgtgcctgtgtgctgcaagacagtgtgctgcaagcctgtgtgctgcgtgtctgtgtgctgcggggacagcagctgctgccagcagagcagctgccagagcgcctgctgcaccagcagcccctgccagcaggcctgctgcgtgcctgtgtgctgcaagcctgtgtgcagcggcatcagcagcagctgctgccagcagagcagctgtgtgtcctgtgtgagcagcccctgctgccaggccgtgtgtgagcccagcccctgccagagcggctgcaccagcagctgcacccccagctgctgccagcagagcagctgccagcccacctgctgcaccagcagcccctgccagcaggcctgctgcgtgcctgtgtgctgcgtgcctgtgtgctgcgtgcccacctgcagcgaggacagcagcagctgctgccagcagagcagctgccagcctgcctgctgcaccagcagcccctgccagcacgcctgctgcgtgcctgtgtgcagcggggccagcaccagctgctgccagcagagcagctgccagcctgcctgctgcacagccagctgctgccggcccagcagctctgtgtccctgctgtgccaccctgtgtgcaagagcacctgctgcgtgcctgtgcccagctgtggggccagcgccagcagctgccagcccagctgctgcaggacagccagctgtgtgtccctgctgtgccggcccatgtgcagcaggcctgcctgctacagcctgtgcagcggccagaagagcagctgctag

SEQ ID NO: 20620 - DNA, 816 bp, synthetic construct
  source 1..816: mol_type = other DNA; note = Synthetic coding sequence
atggccgcctgcaccatgtctgtgtgcagcagcgcctgcagcgacagctggagggtggatgactgcccagagagctgctgtgagcccccctgtggcacagccccctgcctgaccctggtgtgcacccctgtgtcctgtgtgagcagcccctgctgccaggccgcctgtgagcccagcccctgccagagcggctgcaccagcagctgcacccccagctgctgccagcctgcctgctgtgccagcagcccctgccagcaggcctgctgcgtgcctgtgtgctgcaagcctgtgtgctgcctgcccacctgcagcaaggacagcagcagctgctgccagcagagcagctgccagcccacctgctgtgccagcagcagctgccagcagagctgctgcgtgcctgtgtgctgcaagcctgtgtgctgcgtgcccacctgcagcgaggacagcagcagctgctgccagcacagcagctgccagcccacctgctgcaccagcagcccctgccagcagagctgctacgtgcctgtgtgctgcaagcctgtgtgcttcaagcccatctgctgcgtgcctgtgtgcagcggggccagcaccagctgctgccagcagagcagctgccagcctgcctgctgcaccaccagctgctgccggcccagcagctctgtgtccctgctgtgccggcccatctgcaggcctgcctgctgcgtgcccatcagcagctgctgtgccccagccagcagctaccaggccagctgctgcaggcctgccagctgtgtgtccctgctgtgcaggcctgcctgcagccggctggcctgctag

SEQ ID NO: 20621 - DNA, 1206 bp, synthetic construct
  source 1..1206: mol_type = other DNA; note = Synthetic coding sequence
atgtctgtgtgcagcagtgacctgagctacagcagccgggtgtgcctgcccggcagctgtgacagctgcagcgacagctggcaggtggatgactgcccagagagctgctgtgagcccccctgctgtgcccccagctgctgtgccccagccccctgcctgagcctggtgtgcacccctgtgtcccgggtgagcagcccctgctgccctgtgacctgtgagcccagcccctgccagagcggctgcaccagcagctgcacccccagctgctgccagcagagcagctgccagctggcctgctgtgccagcagcccctgccagcaggcctgctgcgtgcctgtgtgctgcaagacagtgtgctgcaagcctgtgtgctgcgtgcctgtgtgctgcggggacagcagctgctgccagcagagcagctgccagagcgcctgctgcaccagcagcccctgccagcaggcctgctgcgtgcccatctgctgcaagcctgtgtgcagcggcatcagcagcagctgctgccagcagagcagctgtgtgtcctgtgtgagcagcccctgctgccaggccgtgtgtgagcccagcccctgccagagcggctgcatcagcagctgcacccccagctgctgccagcagagcagctgccagcctgcctgctgcaccagcagcagctgccagcaggcctgctgcgtgcctgtgtgctgcaagacagtgtgctgcaagcctgtgtgcagcgaggacagcagcagctgctgccagcagagcagctgccagcctgcctgctgcaccagcagcccctgccagcaggcctgctgcgtgcctgtgtgctgcaagcctgtgtgctgcaagcctgtgggctctgtgcccatctgcagcggggccagcagcctgtgctgccagcagagcagctgccagcctgcctgctgcaccagcagccagagccagcagggctgctgcgtgcctgtgtgctgcaagcctgtgtcctgtgtgcctgtgtgcagcggggccagcagcagctgctgccagcagagcagctgccagcctgcctgctgcaccaccagctgctgccggcccagcagctctgtgtccctgctgtgcaggcctgtgtgcaggcctgcctgctgcgtgcctgtgcccagctgctgtgcccccaccagcagctgccagcccagctgctgcaggcctgccagctgtgtgtccctgctgtag

SEQ ID NO: 20622 - DNA, 849 bp, synthetic construct
  source 1..849: mol_type = other DNA; note = Synthetic coding sequence
atggccgccagcaccatgtctgtgtgcagcagcgcctgcagcgacagctggcaggtggatgcctgcccagagagctgctgtgagccccactgctgtgccctgagctgctgtgccccagccccctgcctgaccctggtgtgcacccctgtgtcccgggtgagcagcccctgctgccaggccgcctgtgagcccagcccctgccagagcggctgcaccagcagctgcacccccagctgctgccagcagagcagctgccagcctgcctgctgcaccagcagcccctgccagcaggcctgctgcgtgcctgtgtgctgcaagcctgtgtgctgcctgcccacctgcagcaaggacagcagcagctgctgccagcagagcagctgccagcccacctgctgtgccagcagcagcagccagcagagctgctgcgtgcctgtgtgctgcaagcctgtgtgctacgtgcccacctgcagcgaggacagcagcagctgctgccagcagagcagctgccacccagcctgctgcaccagcagcccctgccagcaggcctgctgcgtgcctgtgcgctgcaagcctgtgtgctgcaagcccatctgctgcgtgcctgtgtgcagcggggccagcaccagctgctgccagcagagcagctgccagcctgcctgctgcaccaccagctgctgccggcccagcagctctgtgtccctgctgtgcaggcctgtgtgcaggcctgcctgctgcatgcctgtgagcagctgctgtgccccagccagcagctgccaggccagctgctgcaggcctgccagctgtgtgtccctgctgtgcaggcctgcctgcagcaggcctgcctgctag

SEQ ID NO: 20623 - DNA, 891 bp, synthetic construct
  source 1..891: mol_type = other DNA; note = Synthetic coding sequence
atggccagcagccccctgcccggccccaatgacatcctgctggccagccccagcagcgccttccagcctgacaccctgagccagcccaggcctggccacgccaacctgaagcccaaccaggtgggccaggtgatcctgtatggcatccccatcgtgtccctggtgattgatggccaggagcggctgtgcctggcccagatcagcaacaccctgctgaagaacttctcctacaatgagatccacaacagaagagtggccctgggcatcacctgtgtgcagtgcacccctgtgcagctggagatcctgcggcgggccggggccatgcccatcagcagcagaagatgtggcatgatcaccaagcgggaggccgagcggctgtgcaagagcttcctgggagaaaatcggccccccaagctgcctgacaactttgcctttgatgtgtcccatgaatgtgcctggggctgccggggcagcttcatcccagcccgctacaacagcagccgggccaagtgcatcaagtgcagctactgcaacatgtacttcagccccaacaagttcatcttccacagccacaggaccccagatgccaagtacacccagccagatgctgccaacttcaacagctggaggaggcacctgaagctgacagacaagagcccccaggatgagctggtgtttgcctgggaggatgtgaaggccatgttcaacggcggcagcaggaagagggccctgccccagcccggggcccacccagcctgccaccccctgagcagcatccgcaccaggagcatcgccttcagcagccagaccctgatgctgctggaggagatctttggagagaaggaccaggaggactacatgaggatcaatgaagacaacatctggctgtag

SEQ ID NO: 20624 - DNA, 5346 bp, synthetic construct
  source 1..5346: mol_type = other DNA; note = Synthetic coding sequence
gtgaagaagatccaccgccaccggctgagccctgccacagagaagggagctgccagcagcggggagggggacaaggaccccccacctccagcccatgaagatattgctgtgaagggcacagccacagctgctggcaccggccctggcaccggggctgctgctgctgctgctgctgctgtgcccccaccccaccctgctgctgctgctgctgctgctgctgctgctgctgctgctgctgctgctgctgtgcccccaccccaccccaacatccgggccctgcagacccaggccccccagcagatcccccggggccctgtgcagcagcccctggaggaccgcatcttcaccccagctgtgtctgctgtgtacagcacagtgacccaggtggcccggcagcccggcacccccacccccagcccctacagcgcccacgagatcaacaagggccaccccaacctggccgccaccccacctggccacgccagcagccctggcctgagccagaccccctaccccagcggccagaatgccggccccaccaccctggtgtacccccagaccccccagaccatgaacagccagccccagaccaggagccctgtgatcttcagccccagccagttcttccagaggccccagatccagcccccccgggccaccatccccaacagcagccccagcatccggcctggggcccagacccccacagctgtgtaccaggccaaccagcacatcatgatggtgaaccacctgcccatgccctaccctgtgccccagggcccccagtactgcatcccccagtaccgccacagcggccccccctacgtgggccccccccagcagtaccctgtgcagcccccaggccctggccccttctacccaggccctggccctggggacttccccaatgcctacggcacccccttctaccccagccagcctgtgtaccagagcgcccccatcatcgtgcccacccagcagcagcccccaccagccaagcgggagaagaagaccatccgcatccgggaccccaaccagggcggcaaggacatcacagaggagatcatgtctgggggcggcagcaggaaccccaccccacccatcggccggcccaccagcacccccaccccaccccagctgcccagccaggtgcctgagcacagccctgtggtgtatggcaccgtggagagcgcccacctggccgccagcacccctgtgacagctgccagtgaccagaagcaggaggagaagcccaagccagaccctgtgctgaagagccccagccctgtgctgcggctggtgctgagcggggagaagaaggagcaggagggccagaccagcgagaccacagccatcgtgtccattgctgagctgcccctgccccccagccccaccaccgtgtcctctgtggcccggagcaccatcgccgcccccaccagcagcgccctgagcagccagcccatcttcaccacagccattgatgacagatgtgagctgagcagcccccgggaggacaccatccccatccccagcctgaccagctgcacagagaccagtgaccccctgcccaccaatgaaaatgatgatgacatctgcaagaagccctgcagcgtggccccaaatgacatccccctggtgagcagcaccaacctgatcaatgagatcaacggggtgtctgagaagctgagcgccacagagagcatcgtggagatcgtgaagcaggaggtgctgcccctgaccctggagctggagatcctggagaaccccccagaggagatgaagctggagtgcatcccagcccccatcacccccagcacagtgcccagcttcccccccaccccacccaccccaccagccagccccccccacacccctgtgattgtgcctgctgctgccaccaccgtgagcagccccagcgctgccatcaccgtgcagagggtgctggaggaggatgagagcatccgcacctgcctgtctgaagatgccaaggagatccagaacaagattgaggtggaggctgatggccagacagaggagatcctggacagccagaacctgaacagcagaagaagccctgtgcctgcccagatcgccatcaccgtgcccaagacctggaagaagcccaaggacaggaccaggaccacagaggagatgctggaggccgagctggagctgaaggccgaggaggagctgagcattgacaaggtgctggagagcgagcaggacaagatgagccagggcttccaccctgagcgggaccccagcgacctgaagaaggtgaaggctgtggaggagaatggagaggaggccgagcctgtgagaaatggagctgagagcgtgtctgagggggagggcattgatgccaacagcggcagcacagacagcagtggagatggagtgaccttccccttcaagccagagagctggaagcccacagacacagagggcaagaagcagtatgaccgggagttcctgctggacttccagttcatgcctgcctgcatccagaagccagagggcctgccccccatcagtgatgtggtgctggacaagatcaaccagcccaagctgcccatgaggaccctggacccccgcatcctgccccggggccctgacttcaccccagcctttgctgactttggccggcagaccccaggcggccggggcgtgcccctgctgaatgtgggcagccgccgcagccagcccggccagaggcgggagcccaggaagatcatcaccgtgtctgtgaaggaggatgtgcacctgaagaaggccgagaatgcctggaagcccagccagaagagggacagccaggctgatgatcctgagaacatcaagacccaggagctgttcaggaaggtgcgcagcatcctgaacaagctgaccccccagatgttcaaccagctgatgaagcaggtgtctggcctgactgtggacacagaggagcggctgaagggcgtcatcgacctggtgtttgagaaggccattgatgagcccagcttctctgtggcctatgccaacatgtgccgctgcctggtgaccctgaaggtgcccatggctgacaagccaggcaacacagtgaacttcaggaagctgctgctgaaccgctgccagaaggagtttgagaaggacaaggcagatgatgatgtgtttgagaagaagcagaaggagctggaggccgccagcgcccctgaggagaggacccggctgcatgatgagctggaggaggccaaggacaaggccaggagaagaagcatcggcaacatcaagttcatcggggagctgttcaagctgaagatgctgacagaggccatcatgcatgactgtgtggtgaagctgctgaagaaccatgatgaggagagcctggagtgcctgtgccgcctgctgaccaccatcggcaaggacctggactttgagaaggccaagcccaggatggaccagtacttcaaccagatggagaagatcgtgaaggagaggaagaccagcagccgcatccgcttcatgctgcaggatgtgattgacctgcggctgtgcaactgggtgtccagaagagctgaccagggccccaagaccatcgagcagatccacaaggaggccaagattgaggagcaggaggagcagaggaaggtgcagcagctgatgaccaaggagaagagaagacctggggtgcagagggtggatgaaggaggctggaacacagtgcagggcgccaagaacagccgggtgctggaccccagcaagttcctgaagatcaccaagcccaccattgatgagaagatccagctggtgcccaaggcccagctgggctcctggggcaagggcagcagcggcggggccaaggccagcgagacagatgccctgcggagcagcgccagcagcctgaaccgcttcagcgccctgcagcccccagcccccagcggcagcacccccagcacccctgtggagtttgacagcaggaggaccctgaccagccggggctccatgggccgggagaagaatgacaagcccctgcccagcgccacagcccggcccaacaccttcatgaggggcggcagcagcaaggacctgctggacaaccagagccaggaggagcagaggcgggagatgctggagaccgtgaagcagctgactggaggagtggatgtggagaggaacagcacagaagctgagaggaacaagacccgggagagcgccaagccagagatcagcgccatgtctgcccatgacaaggccgccctgtctgaggaggagctggagaggaagagcaagagcatcattgatgagttcctgcacatcaatgacttcaaggaggccatgcagtgtgtggaggagctgaatgcccagggcctgctgcacgtgtttgtgcgggtgggcgtggagagcaccctggagaggagccagatcacccgggaccacatgggccagctgctgtaccagctggtgcagagcgagaagctgagcaagcaggacttcttcaagggcttcagcgagaccctggagctggctgatgacatggccatcgacatcccccacatctggctgtacctggccgagctggtgacccccatgctgaaggagggcggcatctccatgagggagctgaccatcgagttcagcaagcccctgctgcctgtgggccgggccggcgtgctgctgtctgagatcctgcacctgctgtgcaagcagatgagccacaagaaggtgggcgccctgtggagggaggccgacctgtcctggaaggacttcctgcctgaaggagaagatgtgcacaacttcctgctggagcagaagctggacttcattgaaagtgacagcccctgcagcagcgaggccctgagcaagaaggagctgtctgctgaggagctgtacaagaggctggagaagctgatcatcgaggacaaggccaatgatgagcagatctttgactgggtggaggccaacctggatgagatccagatgagcagccccaccttcctgcgggccctgatgacagctgtgtgcaaggccgccatcatcgctgacagcagcaccttccgggtggacacagctgtgatcaagcagagggtgcccatcctgctgaagtacctggacagcgacacagagaaggagctgcaggccctgtatgccctgcaggccagcatcgtgaagctggaccagcctgccaacctgctgaggatgttctttgactgcctgtatgatgaggaggtgatcagtgaagatgccttctacaagtgggagagcagcaaggaccctgctgagcagaatggaaaaggagtggccctgaagtctgtgacagccttcttcacctggctgcgggaggccgaggaggagagcgaggacaactag

SEQ ID NO: 20625 - DNA, 4758 bp, synthetic construct; identical to SEQ ID NO: 18496
  source 1..4758: mol_type = other DNA; note = Synthetic coding sequence

SEQ ID NO: 20626 - DNA, 3087 bp, synthetic construct
  source 1..3087: mol_type = other DNA; note = Synthetic coding sequence
atggccagcgaggccgtgaaggtggtggtgcgctgccggcccatgaaccagcgggagcgggagctgcgctgccagcctgtggtgacagtggactgtgcccgggcccagtgctgcatccagaaccctggagctgctgatgagccccccaagcagttcacctttgatggagcctaccacgtggaccacgtgacagagcagatctacaatgaaattgcctaccccctggtggagggcgtgacagagggctacaacggcaccatctttgcctacggccagacaggcagcggcaagagcttcaccatgcagggcctgcctgacccccccagccagaggggcatcatcccccgggcctttgagcacgtgtttgagagcgtgcagtgtgccgagaacaccaagttcctggtgcgggccagctacctggagatctacaatgaagatgtgcgggacctgctgggcgctgacaccaagcagaagctggagctgaaggagcaccctgagaagggcgtgtatgtgaagggcctgtccatgcacacagtgcacagcgtggcccagtgtgagcacatcatggagaccggctggaagaacagatctgtgggctacaccctgatgaacaaggacagcagccgcagccacagcatcttcaccatcagcattgagatgtctgctgtggatgagcggggcaaggaccacctgcgggccggcaagctgaacctggtggacctggccggcagcgagcggcagagcaagacaggagccactggagagcggctgaaggaggccaccaagatcaacctgagcctgagcgccctgggcaatgtcatcagcgccctggtggatggccgctgcaagcacgtgccctacagagacagcaagctgacccggctgctgcaggacagcctgggcggcaacaccaagaccctgatggtggcctgcctgagccctgctgacaacaactatgatgagaccctgagcaccctgcgctatgccaacagagccaagaacatccggaacaagccccgcatcaatgaagaccccaaggatgccctgctgcgggagtaccaggaggagatcaagaagctgaaggccatcctgacccagcagatgagccccagcagcctgagcgccctgctgagccggcaggtgcccccagaccctgtgcaggtggaggagaagctgctgccccagcccgtcatccagcatgatgtggaggccgagaagcagctgatccgggaggagtatgaggagcggctggcccggctgaaggctgactacaaggccgagcaggagagccgggcccggctggaggaggacatcacagccatgaggaacagctatgatgtgcggctgagcaccctggaggagaacctgaggaaggagacagaggccgtgctgcaggtgggcgtgctgtacaaggccgaggtgatgagcagagctgagtttgccagcagcgctgagtaccccccagccttccagtatgagaccgtggtgaagcccaaggtgttcagcaccacagacaccctgcccagtgatgatgtgtccaagacccaggtgagcagcagatttgctgagctgcccaaggtggagcccagcaagtctgagatcagcctgggcagcagcgagagcagcagcctggaggagacctctgtgtctgaggccttccctggccctgaggagcccagcaatgtggaggtgtccatgcccacagaggagagccgcagccgctacttcctggatgaatgtctgggccaggaggccgccggccacctgctgggggagcagaactacctgccccaggaggagccccaggaggtgcccctgcagggcctgctgggcctgcaggacccctttgctgaggtggaggccaagctggcccggctgagcagcacagtggccaggacagatgccccccaggctgatgtgcccaaggtgcctgtgcaggtgcctgcccccacagacctgctggagcccagtgatgcccggcctgaggccgaggccgcagatgacttcccccccaggcctgaggtggacctggccagcgaggtggccctggaggtggtgaggacagctgagcccggggtgtggctggaggcccaggcccctgtggccctggtggcccagcctgagcccctgcctgccacagctggggtgaagcgggagagcgtgggcatggaggtggccgtgctgacagatgaccccctgcctgtggtggaccagcagcaggtgctggcccggctgcagctgctggagcagcaggtggtgggcggggagcaggccaagaacaaggacctgaaggagaagcacaagaggaggaagagatatgcagatgaaagaaggaagcagctggtggccgccctgcagaacagtgatgaggacagcggggactgggtgctgctgaatgtgtatgacagcatccaggaggaggtgcgggccaagagcaagctgctggagaagatgcagaggaagctgcgggctgctgaggtggagatcaaggacctgcagagcgagttccagctggagaagattgactacctggccaccatccggcggcaggagcgggacagcatgctgctgcagcagctgctggagcaggtgcagcccctcatcagaagagactgcaactacagcaacctggagaagatcctgcgggagagctgctgggatgaggacaatggcttctggaagatcccccaccctgtgatcaccaagaccagcctgcctgtggtgtccacaggcccccagaacaagccagccaggaagaccagcgctgctgacaatggagagcccaacatggaggatgaccgctaccgcctgatgctgagccgcagcaacagtgaaaatattgccagcaactacttccgcagcaagagggccagccagatcctgagcacagatgccaggaagagcctgacccaccacaacagccccccaggcctgagctgccccctgagcaacaacagcgccatcccccccacccaggcccctgagatgccccagccccggcccttccggctggagagcctggacatccccttcaccaaggccaagaggaagaagagcaagagcaactttggaagtgagcccctgtag

SEQ ID NO: 20627 - DNA, 921 bp, synthetic construct
  source 1..921: mol_type = other DNA; note = Synthetic coding sequence
atgaggcagcacgacaccagaaatggaagaattgtgctgatctctggaagaagaagcttctgcagcatcttctctgtgctgccctacagagacagcacccaggtgggggacctgaagctggatggcggccggcagagcactggagctgtgtccctgaaggagatcatcggcctggagggcgtggagctgggcgcagatggcaagacagtgtcctacacccagttcctgctgcccaccaatgccttcggggcccggaggaacaccatcgacagcaccagcagcttcagccagttcaggaacctgagccacaggagcctgagcatcggccgggccagcggcacccagggcagcctggacaccggcagtgacctgggggacttcatggactatgaccccaacctgctggatgacccccagtggccctgtgggaagcacaagagggtgctgatcttccccagctacatgaccaccgtgattgattatgtgaagcccagcgacctgaagaaggacatgaatgagaccttcaaggagaagttcccccacatcaagctgaccctgagcaagatccgcagcctgaagcgggagatgaggaagctggcccaggaggactgtggcctggaggagcccaccgtggccatggcctttgtgtactttgagaagctggccctgaagggcaagctgaacaagcagaacaggaagctgtgtgccggggcctgtgtgctgctggccgccaagattggaagtgacctgaagaagcatgaggtgaagcacctgattgacaagctggaggagaagttccggctgaacagaagagagctgattgcctttgagttccctgtgctggtggccctggagtttgccctgcacctgcctgagcacgaggtgatgccccactaccgccgcctggtgcagagcagctag

SEQ ID NO: 20628 - DNA, 2820 bp, synthetic construct
  source 1..2820: mol_type = other DNA; note = Synthetic coding sequence
atggccgcccagcccccccggggcatccggctgagcgccctgtgccccaagttcctgcacaccaacagcaccagccacacctggcccttctctgctgtggccgagctgattgacaatgcctatgaccctgatgtgaatgccaagcagatctggattgacaagacagtcatcaatgaccacatctgcctgaccttcacagacaatggaaatggcatgaccagtgacaagctgcacaagatgctgagctttggcttcagtgacaaggtgaccatgaatggccacgtgcctgtgggcctgtatggaaatggcttcaagagcggctccatgaggctgggcaaggatgccatcgtgttcaccaagaatggagagagcatgtctgtgggcctgctgagccagacctacctggaggtgatcaaggccgagcacgtggtggtgcccatcgtggccttcaacaagcaccggcagatgatcaacctggccgagagcaaggccagcctggccgccatcctggagcacagcctcttcagcacagagcagaagctgctggccgagctggatgccatcatcggcaagaagggcacccgcatcatcatctggaacctgcggagctacaagaatgccacagaatttgattttgagaaggacaagtatgacatccgcatccctgaggacctggatgagatcaccgggaagaagggctacaagaagcaggagaggatggaccagatcgcccctgagagtgactacagcctgcgggcctactgcagcatcctgtacctgaagcccaggatgcagatcatcctgcggggccagaaggtgaagacccagctggtgtccaagagcctggcctacatcgagagagatgtgtaccggcccaagttcctgagcaagacagtgcgcatcaccttcggcttcaactgcaggaacaaggaccactacggcatcatgatgtaccacaggaacagactcatcaaggcctatgagaaggtgggctgccagctgcgggccaacaacatgggcgtgggcgtggtgggcatcatcgagtgcaacttcctgaagcccacccacaacaagcaggactttgactacaccaatgagtaccgcctgaccatcacagccctgggggagaagctgaatgactactggaatgagatgaaggtgaagaagaacacagagtaccccctgaacctgcctgtggaggacatccagaagaggccagaccagacctgggtgcagtgtgatgcctgcctgaagtggaggaagctgcctgatggcatggaccagctgcctgagaagtggtactgcagcaacaacccagacccccagttcaggaactgtgaggtgcctgaggagccagaagatgaggacctggtgcaccccacctatgagaagacctacaagaagaccaacaaggagaagttccgcatccggcagcctgagatgatcccccgcatcaatgctgagctgctcttccggcccacagccctgagcacccccagcttcagcagccccaaggagagcgtgccccggcggcacctgtctgagggcaccaacagctatgccacccggctgctgaacaaccaccaggtgcccccccagagcgagcctgagagcaacagcctgaagaggcggctgagcaccaggagcagcatcctgaatgccaagaacagaaggctgagcagccagtttgagaacagcgtgtacaagggagatgatgatgatgaagatgtgatcatcctggaggagaacagcacccccaagccagctgtggaccatgacatcgacatgaagtctgagcagagccacgtggagcagggcggcgtgcaggtggagtttgtgggggacagcgagccctgtggccagacaggcagcaccagcaccagcagcagccgctgtgaccagggcaacacagctgccacccagacagaggtgcccagcctggtggtgaagaaggaggagaccgtggaggatgaaattgatgtgagaaatgatgctgtgatcctgcccagctgtgtggaggccgaggccaagatccacgagacccaggagaccacagacaagtctgcagatgatgctggctgccagctgcaggagctgaggaaccagctgctgctggtgacagaggagaaggagaactacaagaggcagtgccacatgttcacagaccagatcaaggtgctgcagcagaggatcctggagatgaatgacaagtatgtgaagaaggagacctgccaccagagcacagaaacagatgctgtgttcctgctggagagcatcaacgggaagtctgagagcccagaccacatggtgtcccagtaccagcaggccctggaggagattgaaaggctgaagaagcagtgcagcgccctgcagcacgtgaaggccgagtgcagccagtgcagcaacaatgaaagcaagtctgagatggatgagatggctgtgcagctggatgatgtgttccggcagctggacaagtgcagcattgaaagagaccagtacaagtctgaggtggagctgctggagatggagaagagccagatccgcagccagtgtgaggagctgaagacagaggtggagcagctgaagagcaccaaccagcagacagccacagatgtgtccaccagcagcaacatcgaggagagcgtgaaccacatggatggagagagcctgaagctgcggagcctgcgggtgaatgtgggccagctgctggccatgattgtgcctgacctggacctgcagcaggtgaactatgatgtggatgtggtggatgagatcctgggccaggtggtggagcagatgtctgagatcagcagcacctag

SEQ ID NO: 20629 - DNA, 1149 bp, synthetic construct; identical to SEQ ID NO: 20229
  source 1..1149: mol_type = other DNA; note = Synthetic coding sequence

SEQ ID NO: 20630 - DNA, 5058 bp, synthetic construct
  source 1..5058: mol_type = other DNA; note = Synthetic coding sequence
atgagcctgcccttctaccagcgctgccaccagcactatgacctgagctacagaaacaaggatgtgcgcagcacagtgagccactaccagcgggagaagaagaggtctgctgtgtacacccagggcagcacagcctacagcagccgcagcagcgctgcccacagaagagagagcgaggccttccggcgggccagcgccagcagcagccagcagcaggccagccagcacgccctgagcagcgaggtgtccaggaaggccgccagcgcctatgactatggcagcagccacggcctgacagacagcagcctgctgctggatgactacagcagcaagctgagccccaagcccaagagggccaagcacagcctgctgtctggagaggagaaggagaacctgcccagcgactacatggtgcccatcttcagcggccggcagaagcacgtgtctggcatcacagacacagaggaggagcgcatcaaggaggccgccgcctacatcgcccagaggaacctgctggccagcgaggagggcatcaccaccagcaagcagagcacagccagcaagcagaccacagccagcaagcagagcacagccagcaagcagagcacagccagcaagcagagcacagccagccggcagagcacagccagccggcagagcgtggtgtccaagcaggccaccagcgccctgcagcaggaggagaccagcgagaagaagagcaggaaggtggtgatccgggagaaggccgagcggctgagcctgaggaagaccctggaggagacagagacctaccacgccaagctgaatgaagaccacctgctgcacgcccctgagttcatcatcaagcccaggagccacacagtgtgggagaaggaaaatgtgaagctgcactgcagcattgctggctggccagagccccgggtgacctggtacaagaaccaggtgcccatcaacgtgcacgccaaccctgggaagtacatcatcgagagccgctatggcatgcacaccctggagatcaatggctgtgactttgaggacacagcccagtaccgggccagcgccatgaatgtgaagggggagctgagcgcctatgcctctgtggtggtgaagcgctacaagggggagtttgatgagacccgcttccacgccggggccagcaccatgcccctgagctttggagtgaccccctacggctacgccagcagatttgagatccactttgatgacaagtttgatgtgtcctttggccgggagggggagaccatgagcctgggctgccgggtggtgatcaccccagagatcaagcacttccagcctgagatccagtggtacagaaatggagtgcccctgagccccagcaagtgggtgcagaccctgtggagcggggagcgggccaccctgaccttcagccacctgaacaaggaggatgagggcctgtacaccatccgggtgaggatgggagagtactatgagcagtacagcgcctacgtgtttgtgagagatgctgatgctgagattgagggcgccccagctgcccccctggatgtgaagtgcctggaggccaacaaggactacatcatcatctcctggaagcagcctgctgtggatggcggcagccccatcctgggctacttcatcgacaagtgtgaggtgggcacagacagctggagccagtgcaatgacacccctgtgaagtttgcccgcttccctgtgacaggcctgattgagggccgcagctacatcttccgggtgcgggctgtgaacaagatgggcatcggcttccccagccgggtgtctgagcctgtggccgccctggaccctgctgagaaggcccggctgaagagccggcccagcgccccctggacaggccagatcatcgtgacagaggaggagcccagcgagggcatcgtgcccggccccccaacagacctgtctgtgacagaggccaccaggagctatgtggtgctgtcctggaagcccccaggccagaggggccacgagggcatcatgtactttgtggagaagtgtgaggccggcacagagaactggcagagggtgaacacagagctgcctgtgaagagccccaggtttgccctgtttgacctggccgagggcaagagctactgcttccgggtgcgctgcagcaacagcgctggggtgggggagcccagcgaggccacagaggtgacagtggtgggggacaagctggacatccccaaggcccctgggaagatcatccccagcaggaacacagacacctctgtggtggtgtcctgggaggagagcaaggatgccaaggagctggtgggctactacatcgaggcctctgtggccggcagcggcaagtgggagccctgcaacaacaaccctgtgaagggcagccgcttcacctgccacggcctggtgacaggccagagctacatcttccgggtgcgggctgtgaatgctgctggcctgtctgagtacagccaggacagcgaggccatcgaggtgaaggccgccatcggcggcggcgtgtccccagatgtgtgcccagccctgagtgatgagcccggcggcctgacagccagccggggccgggtgcatgaggccagcccccccaccttccagaaggatgccctgctgggcagcaagcccaacaagcccagcctgcccagcagcagccagaacctgggccagacagaggtgtccaaggtgtctgagaccgtgcaggaggagctgaccccaccaccccagaaggccgccccccagggcaagagcaagagtgaccccctgaagaagaagacagaccgggccccacccagccccccctgtgacatcacctgcctggagagcttccgggacagcatggtgctgggctggaagcagcctgacaagattggaggagctgagatcaccggctactacgtgaactaccgggaggtgattgatggagtgcctgggaagtggagggaggccaacgtgaaggctgtgtctgaggaggcctacaagatcagcaacctgaaggagaacatggtgtaccagttccaggtggccgccatgaacatggccggcctgggcgcccccagcgctgtgtctgagtgcttcaagtgtgaggagtggaccatcgctgtgcccggccccccccacagcctgaagtgcagcgaggtgaggaaggacagcctggtgctgcagtggaagccccctgtgcacagcggccgcacccctgtgacaggctactttgtggacctgaaggaggccaaggccaaggaggaccagtggaggggcctgaatgaagctgccatcaagaatgtgtacctgaaggtgcggggcctgaaggagggcgtgtcctatgtgttccgggtgcgggccatcaaccaggccggcgtgggcaagcccagcgacctggccggccctgtggtggccgagaccaggcctggcaccaaggaggtggtggtgaatgtggatgatgatggagtcatcagcctgaactttgaatgtgacaagatgacccccaagtctgagttctcctggagcaaggactatgtgtccacagaggacagcccccggctggaggtggagagcaaaggaaacaagaccaagatgaccttcaaggacctgggcatggatgacctgggcatctacagctgtgatgtgacagacacagatggcatcgccagcagctacctgattgatgaggaggagctgaagaggctgctggccctgagccatgagcacaagttccccaccgtgcctgtgaagtctgagctggccgtggagatcctggagaagggccaggtgcgcttctggatgcaggccgagaagctgtctggaaatgccaaggtgaactacatcttcaatgagaaggagatctttgagggccccaagtacaagatgcacatcgacaggaacacaggcatcatcgagatgttcatggagaagctgcaggatgaagatgagggcacctacaccttccagctgcaggacggcaaggccaccaaccacagcacagtggtgctggtgggagatgtgttcaagaagctgcagaaggaggccgagttccagaggcaggagtggatcaggaagcagggcccccactttgtggagtacctgtcctgggaggtgactggagaatgtaatgtgctgctgaagtgcaaggtggccaacatcaagaaggagacccacatcgtgtggtacaaggatgagcgggagatctctgtggatgagaagcatgacttcaaggatggcatctgcaccctgctgatcacagagttcagcaagaaggatgctggcatctatgaggtgatcctgaaggatgaccggggcaaggacaagagccggctgaagctggtggatgaggccttcaaggagctgatgatggaggtgtgcaagaagatcgccctgagcgccacagacctgaagatccagagcacagctgagggcatccagctgtacagctttgtgacctactacgtggaggacctgaaggtgaactggagccacaatggaagtgccatccgctacagcgacagagtgaagacaggagtgactggagagcagatctggctgcagatcaatgagcccaccccaaatgacaagggcaagtatgtgatggagctgtttgatggcaagacaggccaccagaagacagtggacctgagcggccaggcctatgatgaggcctatgcagagttccagaggctgaagaagagcctgctcttccagaaggaccgggcccgggtgctgggcggcctgcctgatgtggtgaccatccaggagggcaaggccctgaacctgacctgcaatgtgtggggagaccccccacctgaggtgtcctggctgaagaatgagaaggccctggccagtgatgaccactgcaacctgaagtttgaagctggccgcacagcctacttcaccatcaacggggtgtccacagctgacagcggcaagtatggcctggtggtgaagaacaagtatggcagcgagaccagtgacttcaccgtgtctgtgttcatccctgaggaggaggccaggatggccgccctggagagcctgaagggcggcaagaaggccaagtag

SEQ ID NO: 20631 - DNA, 3456 bp, synthetic construct
  source 1..3456: mol_type = other DNA; note = Synthetic coding sequence
atgatggccgccgccctgggccccccagaggtgattgcccagctggagaatgctgccaaggtgctgatggcccctccttccatggtgaacaatgagcagaggcagcacgccgagcacatcttcctgtccttcaggaagagcaagagcccctttgctgtgtgcaagcacatcctggagaccagcaaggtggactatgtgctcttccaggccgccacagccatcatggaggccgtggtgcgggagtggatcctgctggagaagggcagcattgagagcctgcggaccttcctgctgacctacgtgctgcagaggcccaacctgcagaagtatgtgcgggagcagatcctgctggccgtggccgtcatcgtgaagaggggcagcctggacaagagcattgactgcaagagcatcttccacgaggtgtcccagctgatcagcagcggcaaccccaccgtgcagaccctggcctgcagcatcctgacagccctgctgtctgagttcagcagcagcagcaagaccagcaacatcggcctgtccatggagttccacggcaactgcaagagggtcttccaggaggaggacctgcggcagatcttcatgctgactgtggaggtgctgcaggagttcagcagaagagagaacctgaatgcccagatgagctctgtgttccagcgctacctggccctggccaaccaggtgctgtcctggaacttcctgccccccaagctgggccgccactacatcgccatgtttgagagcagccagaatgtgctgctgaagcccacagagagctggagggagaccctgctggacagccgggtgatggagctgttcttcaccgtgcacaggaagatcagagaagattctgacatggcccaggacagcctgcagtgcctggcccagctggccagcctgcacggccccatcttcccagatgagggcagccaggtggactacctggcccacttcatcgagggcctgctgaacaccatcaatggcatcgagattgaagattctgaggccgtgggcatcagcagcatcatcagcaacctgatcaccgtcttccccagaaatgtgctgacagccatccccagcgagctgttcagcagctttgtgaactgcctgacccacctgacctgcagctttggccgctctgctgccctggaggaggtgctggacaaggatgacatggtgtacatggaggcctatgacaagctgctggagagctggctgaccctggtgcaggatgacaagcacttccacaagggcttcttcacccagcacgctgtgcaggtgttcaacagctacatccagtgccacctggccgccccagatggcaccaggaacctgacagccaatggagtggccagccgggaggaggaggagatcagcgagctgcaggaggatgaccgggaccagttcagtgaccagctggcctctgtgggcatgctgggcagaattgctgctgagcactgcatccccctgctgaccagcctgctggaggagcgggtgacccggctgcacggccagctgcagaggcaccagcagcagctgctggccagccctggcagcagcacagtggacaacaagatgctggatgacctgtatgaggacatccactggctgatcctggtgacaggctacctgctggctgatgacacccagggcgagacccccctcatccccccagagatcatggagtacagcatcaagcacagcagcgaggtggacatcaacaccaccctgcagatcctgggcagccctggagagaaggccagcagcatccctggctacaacagaacagattctgtcatccggctgctgagcgccatcctgcgggtgtctgaggtggagagccgggccatccgggctgacctgacccacctgctgagcccccagatgggcaaggacatcgtgtggttcctgaagcgctgggccaagacctacctgctggtggatgagaagctgtatgaccagatcagcctgcccttcagcacagccttcggggctgacacagagggcagccagtggatcatcggctacctgctgcagaaggtgatcagcaacctgtctgtgtggagcagcgagcaggacctggccaatgacacagtgcagctgctggtgaccctggtggagcggcgggagcgggccaacctggtgatccagtgtgagaactggtggaacctggccaagcagtttgccagccgcagcccccccctgaacttcctgagcagccctgtgcagaggaccctgatgaaggccctggtgctgggcggctttgcccacatggacacagagaccaagcagcagtactggacagaggtgctgcagcccctgcagcagcgcttcctgcgggtcatcaaccaggagaacttccagcagatgtgccagcaggaggaggtgaagcaggagatcacagccaccctggaggccctgtgtggcattgctgaggccacccagattgacaacgtggccatcctcttcaacttcctgatggacttcctgaccaactgcatcggcctgatggaggtgtacaagaacaccccagagaccgtgaacctgatcatcgaggtgtttgtggaggtggcccacaagcagatctgctacctgggggagagcaaggccatgaacctgtatgaggcctgcctgaccctgctgcaggtgtacagcaagaacaacctgggccggcagagaattgatgtgacagctgaggaggagcagtaccaggacctgctgctgatcatggagctgctgaccaacctgctgagcaaggagttcatcgacttcagtgacacagatgaggtgttccggggccacgagcccggccaggccgccaacagatctgtgtctgctgctgatgtggtgctgtatggagtgaacctgatcctgcccctgatgagccaggacctgctgaagttccccaccctgtgcaaccagtactacaagctgatcaccttcatctgtgagatcttccctgagaagatcccccagctgcctgaggacctcttcaagagcctgatgtacagcctggagctgggcatgacctccatgagcagcgaggtgtgccagctgtgcctggaggccctgacccccctggccgagcagtgtgccaaggcccaggagacagacagccccctcttcctggccaccaggcacttcctgaagctggtgtttgacatgctggtgctgcagaagcacaacacagagatgaccacagctgctggggaggccttctacaccctggtgtgcctgcaccaggccgagtacagcgagctggtggagaccctgctgagcagccagcaggaccctgtgatctaccagaggctggctgatgccttcaacaagctgacagccagcagcaccccacccaccctggacaggaagcagaagatggccttcctgaagagcctggaggagttcatggccaacgtgggcggcctgctgtgtgtgaagtag

SEQ ID NO: 20632 - DNA, 420 bp, synthetic construct
  source 1..420: mol_type = other DNA; note = Synthetic coding sequence
atgggcggcggggagcgctacaacatcccagccccccagagcagaaatgtgtccaagaaccagcagcagctgaaccggcagaagaccaaggagcagaacagccagatgaagatcgtgcacaagaagaaggagcggggccacggctacaacagcagcgctgctgcctggcaggccatgcagaatggaggcaagaacaagaacttccccaacaaccagagctggaacagcagcctgagcggcccccggctgctcttcaagagccaggccaaccagaactatgctggggccaagttcagcgagccccccagccccagcgtgctgcccaagccacccagccactgggtgcctgtgtccttcaaccccagcgacaaggagatcatgaccttccagctgaagaccctgctgaaggtgcaggtgtag

SEQ ID NO: 20633 - DNA, 984 bp, synthetic construct
  source 1..984: mol_type = other DNA; note = Synthetic coding sequence
atgaaggagatgctggccaaggacctggaggagagccagggcggcaagagcagcgaggtgctgagcgccacagagctgcgggtgcagctggcccagaaggagcaggagctggcccgggccaaggaggccctgcaggccatgaaggctgacaggaagaggctgaagggggagaagacagacctggtgtcccagatgcagcagctgtatgccaccctggagagccgggaggagcagctgcgggacttcatccggaactatgagcagcacaggaaggagagtgaagatgctgtgaaggccctggccaaggagaaggacctgctggagcgggagaagtgggagctgcggcggcaggccaaggaggccacagaccacgccacagccctgcggagccagctggacctgaaggacaacaggatgaaggagctggaggccgagctggccatggccaagcagagcctggccaccctgaccaaggatgtgcccaagaggcacagcctggccatgcctggagagaccgtgctgaatggaaaccaggagtgggtggtgcaggccgacctgcccctgacagctgccatccggcagagccagcagaccctgtaccacagccaccccccccaccctgctgaccggcaggccgtgcgggtgagcccctgccacagccggcagcccagcgtcatcagtgatgccagcgctgctgagggggacaggagcagcacccccagcgacatcaacagccccaggcacaggacccacagcctgtgcaatggagacagccctggccctgtgcagaagaacctgcacaaccccatcgtgcagagcctggaggacctggaggaccagaagaggaagaagaagaaggagaagatgggcttcggcagcatcagccgggtgtttgcccggggcaagcagaggaagagcctggaccccggcctgtttgatggaacagccccagactactacattgaagaagatgctgactggtag

SEQ ID NO: 20634 - DNA, 984 bp, synthetic construct; identical to SEQ ID NO: 20633
  source 1..984: mol_type = other DNA; note = Synthetic coding sequence

SEQ ID NO: 20635 - DNA, 609 bp, synthetic construct
  source 1..609: mol_type = other DNA; note = Synthetic coding sequence
atggatgagcaggccctgctgggcctgaaccccaatgctgacagcgacttccggcagagggccctggcctactttgagcagctgaagatcagcccagatgcctggcaggtgtgtgccgaggccctggcccagaggacctacagtgatgaccacgtgaagttcttctgcttccaggtgctggagcaccaggtgaagtacaagtacagcgagctgaccaccgtgcagcagcagctgatccgggagaccctcatctcctggctgcaggcccagatgctgaacccccagcctgagaagaccttcatccggaacaaggccgcccaggtgtttgccctgctgtttgtgacagagtacctgaccaagtggcccaagttcttctttgacatcctgtctgtggtggacctgaacccccggggcgtggacctgtacctgcgcatcctgatggccattgattctgagctggtggacagagatgtggtgcacaccagcgaggaggcccggaggaacaccctcatcaaggacaccatgagggagcagtgcatccccaacctggtggagagctggtaccagatcctgcagaactaccagttcaccaacagcgaggtgacctag

SEQ ID NO: 20636 - DNA, 1803 bp, synthetic construct
  source 1..1803: mol_type = other DNA; note = Synthetic coding sequence
atgagccgggtggccaagtaccgccggcaggtgtctgaagatcctgacatcgacagcctgctggagaccctgagccctgaggagatggaggagctggagaaggagctggatgtggtggaccctgatggctctgtgcctgtgggcctgcggcagaggaaccagacagagaagcagagcactggagtgtacaaccgggaggccatgctgaacttctgtgagaaggagaccaagaagctgatgcagcgggagatgtccatggatgagagcaagcaggtggagaccaagacagatgccaagaatggagaggagcggggcagagatgccagcaagaaggccctgggcccccggcgggacagcgacctgggcaaggagcccaagaggggcggcctgaagaagagcttcagccgggacagagatgaagctgggggcaagtctggagagaagcccaaggaggagaagatcatccggggcatcgacaagggccgggtgcgggctgctgtggacaagaaggaggccggcaaggatggccgcggggaggagagagctgtggccaccaagaaggaggaggagaagaagggcagtgacaggaacacaggcctgagccgggacaaggacaagaagcgggaggagatgaaggaggtggccaagaaggaggatgatgagaaggtgaagggggagaggaggaacacagacaccaggaaggagggggagaagatgaagagagctgggggcaacacagacatgaagaaggaggatgagaaggtgaagaggggcactggaaacacagacaccaagaaggatgatgagaaggtgaagaagaatgagcccctgcacgagaaggaggccaaggatgacagcaagaccaagaccccagagaagcagaccccatctggccccaccaagcccagcgagggccctgccaaggtggaggaggaggccgcccccagcatctttgatgagcccctggagcgggtgaagaacaatgaccctgagatgacagaggtgaatgtgaacaacagcgactgcatcaccaatgagatcctggtgcgcttcacagaggccctggagttcaacacagtggtgaagctgtttgccctggccaacaccagggcagatgaccacgtggcctttgccatcgccatcatgctgaaggccaacaagaccatcaccagcctgaacctggacagcaaccacatcaccgggaagggcatcctggccatcttccgggccctgctgcagaacaacaccctgacagagctgcgcttccacaaccagaggcacatctgtggcggcaagacagagatggagatcgccaagctgctgaaggagaacaccaccctgctgaagctgggctaccactttgagctggccggccccaggatgacagtgaccaacctgctgagcaggaacatggacaagcagaggcagaagaggctgcaggagcagaggcaggcccaggaggccaagggggagaagaaggacctgctggaggtgcccaaggccggggctgtggccaagggcagccccaagcccagcccccagcccagccccaagcccagccccaagaacagccccaagaagggcggggccccagctgcccctcctcctcctcctccacccctggcccctcctctcatcatggagaacctgaagaacagcctgagccctgccacccagaggaagatgggagacaaggtgctgcctgcccaggagaagaacagccgggaccagctgctggccgccatccgcagcagcaacctgaagcagctgaagaagctggagctgcccctgctgctgcagtag

SEQ ID NO: 20637 - DNA, 201 bp, synthetic construct
  source 1..201: mol_type = other DNA; note = Synthetic coding sequence
atgattggcaccacagaggtgccctgctgcggccccagcgccacctgggccctgcgctggagcgaccagatcaccctgcccagcctgccctggaccatgagcagcctgtggtgcatccccctgaagggcatgctggccacctgccctgtgtccctgctggagcacgcctacagcaatgccctgcggggctggaagccctag

SEQ ID NO: 20638 - DNA, 2121 bp, synthetic construct
  source 1..2121: mol_type = other DNA; note = Synthetic coding sequence
atggccacagccaactttgggaagatccagatcggcatctacgtggagatcaagagaagtgatggccgcatccaccaggccatggtgaccagcctgaatgaagataatgaatctgtgacagtggagtggattgaaaatggagacaccaagggcaaggagattgacctggagagcatcttcagcctgaacccagacctggtgcctgatgaggagattgagcccagccctgagaccccacctcctccagccagcagcgccaaggtgaacaagatcgtgaagaacagaagaacagtggccagcatcaagaatgacccccccagccgggacaacagagtggtgggcagcgcccgggcccggcccagccagtttcctgagcagagcagcagcgcccagcagaatggatctgtgtctgacatcagccctgtgcaggccgccaagaaggagtttggaccacccagcaggaggaagagcaactgtgtgaaggaggtggagaagctgcaggagaagcgggagaagaggcggctgcagcagcaggagctgcgggagaagagggcccaggatgtggatgccaccaaccccaactatgagatcatgtgcatgatccgggacttccggggcagcctggactaccggcccctgaccacagctgaccccattgatgagcaccgcatctgtgtgtgtgtgaggaagaggcccctgaacaagaaggagacccagatgaaggacctggatgtgatcaccatccccagcaaggatgtggtgatggtgcatgagcccaagcagaaggtggacctgacccgctacctggagaaccagaccttccgctttgattatgcctttgatgattctgccccaaatgagatggtgtaccgcttcaccgcccggcccctggtggagaccatctttgagcggggcatggccacctgctttgcctacggccagacaggcagcggcaagacccacaccatgggcggggacttcagcggcaagaaccaggactgcagcaagggcatctatgccctggccgccagagatgtgttcctgatgctgaagaagcccaactacaagaagctggagctgcaggtgtatgccaccttctttgagatctacagcggcaaggtgtttgacctgctgaacaggaagaccaagctgcgggtgctggaggatggcaagcagcaggtgcaggtggtgggcctgcaggagcgggaggtgaagtgtgtggaggatgtgctgaagctgattgacatcggcaacagctgcaggaccagcggccagaccagcgccaatgcccacagcagccgcagccatgctgtgttccagatcatcctgcggaggaagggcaagctgcacggcaagttcagcctgattgacctggccggaaatgaaagaggagctgacaccagcagcgctgaccggcagacccggctggagggcgctgagatcaacaagagcctgctggccctgaaggagtgcatccgggccctgggcaggaacaagccccacacccccttccgggccagcaagctgacccaggtgctgcgggacagcttcatcggggagaacagcaggacctgcatgattgccaccatcagccctggcatggccagctgtgagaacaccctgaacaccctgcgctatgccaacagagtgaaggagctgactgtggaccccacagctgctggagatgtgcggcccatcatgcaccacccccccaaccagattgatgacctggagacccagtggggcgtgggcagcagcccccagagagatgacctgaagctgctgtgtgagcagaatgaggaggaggtgagcccccagctgttcaccttccatgaagctgtgtcccagatggtggagatggaggagcaggtggtggaggaccacagagctgtgttccaggagagcatccgctggctggaggatgagaaggccctgctggagatgacagaggaggtggactatgatgtggacagctatgccacccagctggaggccatcctggagcagaagattgacatcctgacagagctgcgggacaaggtgaagagcttccgggccgccctgcaggaggaggagcaggccagcaagcagatcaaccccaagaggccccgggccctgtag

SEQ ID NO: 20639 - DNA, 1281 bp, synthetic construct; identical to SEQ ID NO: 18929
  source 1..1281: mol_type = other DNA; note = Synthetic coding sequence

SEQ ID NO: 20640 - DNA, 996 bp, synthetic construct
  source 1..996: mol_type = other DNA; note = Synthetic coding sequence
atgctgcgctgtggccagatgatctttgcccaggccctggtgtgccgccacctgggccgggactggcgctggacccagaggaagaggcagcctgacagctacttctctgtgctgaatgccttcatcgacaggaaggacagctactacagcatccaccagatcgcccagatgggcgtgggggagggcaagagcatcggccagtggtacggccccaacacagtggcccaggtgctgaagaagctggccgtgtttgacacctggagcagcctggccgtgcacatcgccatggacaacacagtggtgatggaggagatccggcggctgtgcaggacctctgtgccctgtgccggggccacagccttccctgctgacagcgacagacactgcaatggcttccctgctggagctgaggtgaccaaccggcccagcccctggaggcccctggtgctgctgatccccctgcggctgggcctgacagacatcaatgaggcctacgtggagaccctgaagcactgcttcatgatgccccagagcctgggcgtcatcggcggcaagcccaacagcgcccactacttcatcggctacgtgggggaggagctgatctacctggacccccacaccacccagcctgctgtggagcccacagatggctgcttcatcccagatgagagcttccactgccagcaccccccctgcaggatgagcattgctgagctggaccccagcattgctgtgggcttcttctgcaagacagaagatgacttcaatgactggtgccagcaggtgaagaagctgagcctgctgggcggggccctgcccatgtttgagctggtggagctgcagcccagccacctggcctgcccagatgtgctgaacctgagcctgggggagagctgccaggtgcaggtgggcagcctgggggacagcagtgatgtggagcggctggagcgcttctttgattctgaagatgaggactttgagatcctgagcctgtag

SEQ ID NO: 20641 - DNA, 1461 bp, synthetic construct; identical to SEQ ID NO: 18479
  source 1..1461: mol_type = other DNA; note = Synthetic coding sequence

SEQ ID NO: 20642 - DNA, 3075 bp, synthetic construct; identical to SEQ ID NO: 19574
  source 1..3075: mol_type = other DNA; note = Synthetic coding sequence

SEQ ID NO: 20643 - DNA, 339 bp, synthetic construct
  source 1..339: mol_type = other DNA; note = Synthetic coding sequence
atggatgacaaggcctctgtgggcaagatctctgtgtccagtgacagcgtgtccaccctgaacagtgaagattttgtgctggtgtcccggcagggagatgagacccccagcaccaacaacggcagtgatgatgagaagacaggcctgaagatcgtgggcaatggcagcgagcagcagctgcagaaggagctggctgatgtgctgatggacccccccatggatgaccagcctggagagaaggagctggtgaagaggagccagctggatggagaaggagatggccccctgagcaaccagctgagcgccagcagcaccatcaaccctgtgcccctggtgtag

SEQ ID NO: 20644 - DNA, 441 bp, synthetic construct
  source 1..441: mol_type = other DNA; note = Synthetic coding sequence
atgctgaaggaggactgtgccagcgagctgaaggtgcacctggccaagagcctgcccctgcccagctctgtgaaccggcccagaattgacctgattgtgtttgtggtgaacctgcacagcaagtacagcctgcagaacacagaggagagcctgcggcacgtggatgccagcttcttcctgggcaaggtgtgcttcctggccaccggggccggccgggagagccactgcagcatccaccgccacacagtggtgaagctggcccacacctaccagagccccctgctgtactgtgacctggaggtggagggcttccgggccaccatggcccagaggctggtgcgggtgctgcagatctgtgccggccacgtgcctggggtgtctgccctgaacctgctgagcctgctgcggagcagcgagggccccagcctggaggacctgtag

SEQ ID NO: 20645 - DNA, 1203 bp, synthetic construct
  source 1..1203: mol_type = other DNA; note = Synthetic coding sequence
atggccagtgacacccaggccgtgcctgatgtgtctggccgcagccgggcccggcgctatgcagagtggagcagcggcctgcggagcggccgggccggcggcggggagacctctgtggagaggaggaggacctgtgcctttgacaccctggaggccttcctgatcatggatggagaggacatcccagacttcagcagcctgaaggaggagacagcctactggaaggagctgagcctgaagtacaagcagagcttccaggaggccagagatgagctggtggagttccaggagggcagccgggagctggaggccgagctggaggcccagctggtgcaggccgagcagaggaacagagacctgcaggccgacaaccagaggctgaagtatgaggtggaggccctgaaggagaagctggagcaccagtatgcccagagctacaagcaggtgtctgtgctggaggatgacctgagccagacccgggccatcaaggagcagctgcacaagtatgtgcgggagctggagcaggccaatgatgacctggagcgggccaagagggccaccatcgtgtccctggaggactttgagcagaggctgaaccaggccatcgagagaaatgccttcctggagagcgagctggatgagaaggagagcctgctggtgtctgtgcagaggctgaaggatgaggcccgggacctgcggcaggagctggccgtgcgggagcggcagcaggaggtgaccaggaagagcgcccccagcagccccaccctggactgtgagaagatggattctgctgtgcaggccagcctgagcctgcctgccacccctgtgggcaagggcacagagaacaccttccccagccccaaggccatccccaacggcttcggcaccagccccctgacccccagcgcccgcatcagcgccctgaacatcgtgggggacctgctgaggaaggtgggcgccctggagagcaagctggccgcctgcaggaactttgccaaggaccaggccagcaggaagagctacatctctggaaatgtgaactgtggggtgctgaatggaaatggcaccaagttcagccgcagcggccacaccagcttctttgataaaggagctgtgaatggatttgatcctgcccctcctcctcctggcctgggcagcagccggcccagcagcgcccctggcatgctgcccctgtctgtgtag

SEQ ID NO: 20646 - DNA, 699 bp, synthetic construct
  source 1..699: mol_type = other DNA; note = Synthetic coding sequence
atgaccccaccccagcagcccccacccctgcggtctgagcccggcaccctgggcagcgctgccagcagctacagccccctgggcctgaatggagtgcccggcagcatctgggactttgtgtctggcagcttcagccccagccccagccccatcctgtctgctggcccccccagcagcagcagcgccagccccaatggagctgagctggcccgggtgcggcggcagctggatgaggccaagaggaagatccggcagtgggaggagagctggcagcaggtgaagcaggtgtgtgatgcctggcagcgggaggcccaggaggccaaggagcgggcccgggtggccgacagcgaccggcagctggccctgcagaagaaggaggaggtggaggcccaggtgaagcagctgcaggaggagctggagggcctgggcgtggccagcaccctgcccggcctgcggggctgtggggacatcggcaccatccccctgcccaagctgcacagcctgcagagccagctgcggctggacctggaggccgtggatggagtcatcttccagctgcgggccaagcagtgtgtggcctgccgggagcgggcccatggagctgtgctgcggccctgccagcaccacatcctgtgtgagccctgtgccgccacagccccagaatgtccctactgcaagggccagcccctgcagtggtag

SEQ ID NO: 20647 - DNA, 1500 bp, synthetic construct
  source 1..1500: mol_type = other DNA; note = Synthetic coding sequence
atgctgccctggcccccagccctggccatgcccatgcccacagagggcaccccaccacccctgagcggcacccccatccctgtgcctgcctacttcagacatgctgagcccggcttcagcctgaagaggccccggggcctgagccgcagcctgcccccacctcctccagccaagggcagcatccccatcagccgcctcttcccccccaggaccccaggctggcaccagctgcagccccggcgggtgtccttccggggggaggccagcgagaccctgcagagccctggctatgaccccagcaggcctgagagcttcttccagcagagcttccagaggctgagccggctgggccacggcagctatggagaggtgttcaaggtgcgcagcaaagaagatggccgcctgtatgctgtgaagaggtccatgagccccttccggggccccaaggaccgggccaggaagctggccgaggtgggcagccatgagaaggtgggccagcacccctgctgcgtgcggctggagcaggcctgggaggagggcggcatcctgtacctgcagacagagctgtgtggccccagcctgcagcagcactgtgaggcctggggcgccagcctgcctgaggcccaggtgtggggctacctgcgggacaccctgctggccctggcccacctgcacagccagggcctggtgcacctggatgtgaagccagccaacatcttcctgggcccccggggccgctgcaagctgggggactttggcctgctggtggagctgggcacagctggagctggggaggtgcaggagggggacccccgctacatggcccctgagctgctgcagggcagctatggaacagctgctgatgtgttcagcctgggcctgaccatcctggaggtggcctgcaacatggagctgccccatggaggagagggctggcagcagctgcggcagggctacctgcccccagagttcaccgctggcctgagcagcgagctgcggtctgtgctggtgatgatgctggagccagaccccaagctgcgggccacagctgaggccctgctggccctgcctgtgctgcggcagccccgggcctggggcgtgctgtggtgcatggctgctgaggccctgagccggggctgggccctgtggcaggccctgctggccctgctgtgctggctgtggcacggcctggcccacccagcctcctggctgcagcccctgggccccccagccaccccacctggcagccccccctgcagcctgctgctggacagcagcctgagcagcaactgggatgatgacagcctgggccccagcctgagccctgaggccgtgctggccaggacagtgggcagcaccagcacccccaggagccgctgcaccccaagagatgccctggacctgagtgacatcaacagcgagcccccccggggcagcttccccagctttgagcccaggaacctgctgagcctgtttgaggacaccctggaccccacctag

SEQ ID NO: 20648 - DNA, 3153 bp, synthetic construct; identical to SEQ ID NO: 18501
  source 1..3153: mol_type = other DNA; note = Synthetic coding sequence

SEQ ID NO: 20649 - DNA, 363 bp, synthetic construct
  source 1..363: mol_type = other DNA; note = Synthetic coding sequence
atgagcattggagtgcccatcaaggtgctgcatgaagctgagggccacatcgtgacctgtgagaccaacacaggagaggtgtaccggggcaagctgattgaagctgaggacaacatgaactgccagatgagcaacatcaccgtgacctacagagatggccgggtggcccagctggagcaggtgtacatccggggcagcaagatccgcttcctgatcctgcctgacatgctgaagaatgcccccatgctgaagtccatgaagaacaagaaccagggcagcggggccggccggggcaaggccgccatcctgaaggcccagggctacctgagcagcctggagtgggtgctggtgcacatctgctag

SEQ ID NO: 20650 - DNA, 1182 bp, synthetic construct; identical to SEQ ID NO: 19786
  source 1..1182: mol_type = other DNA; note = Synthetic coding sequence

SEQ ID NO: 20651 - DNA, 228 bp, synthetic construct
  source 1..228: mol_type = other DNA; note = Synthetic coding sequence
atgagcccccagaagagggtgaagaatgtgcaggcccagaacagaaccagccagggcagcagcagcttccagaccaccctgagcgcctggaaggtgaagcaggaccccagcaacagcaagaacatcagcaagcacggccagaacaaccctgtgggggactatgagcacgcagatgaccaggccgaggaggatgccctgcagatggctgtgggctactttgagaagtag

SEQ ID NO: 20652 - DNA, 996 bp, synthetic construct
  source 1..996: mol_type = other DNA; note = Synthetic coding sequence
atggcctttgtgacccggcagttcatgaggtctgtgagcagcagcagcacagccagcgccagcgccaagaagatcatcgtgaagcacgtgacagtgattggaggcggcctgatgggcgccggcatcgcccaggtggccgccgccaccggccacacagtggtgctggtggaccagacagaggacatcctggccaagagcaagaagggcatcgaggagagcctgaggaaggtggccaagaagaagtttgctgagaacctgaaggctggagatgaatttgtggagaagaccctgagcaccatcgccaccagcacagatgctgcctctgtggtgcacagcacagacctggtggtggaggccatcgtggagaacctgaaggtgaagaatgagctgttcaagaggctggacaagtttgctgctgagcacaccatctttgccagcaacaccagcagcctgcagatcaccagcatcgccaatgccaccacccggcaggacagatttgctggcctgcacttcttcaaccctgtgcctgtgatgaagctggtggaggtgatcaagacccccatgaccagccagaagacctttgagagcctggtggacttcagcaaggccctgggcaagcaccctgtgtcctgcaaggacaccccaggcttcatcgtgaaccggctgctggtgccctacctgatggaggccatccggctgtatgaaagagacttccagacctgtggggacagcaacagcggcctgggcttcagcctgaagggagatgccagcaaagaagatattgacacagccatgaagctgggcgccggctaccccatgggcccctttgagctgctggactatgtgggcctggacaccaccaagttcatcgtggatggctggcatgagatggatgctgagaaccccctgcaccagcccagccccagcctgaacaagctggtggccgagaacaagtttgggaagaagacaggagagggcttctacaagtacaagtag

SEQ ID NO: 20653 - DNA, 1281 bp, synthetic construct; identical to SEQ ID NO: 18929
  source 1..1281: mol_type = other DNA; note = Synthetic coding sequence

SEQ ID NO: 20654 - DNA, 1290 bp, synthetic construct
  source 1..1290: mol_type = other DNA; note = Synthetic coding sequence
atgcccaacgtgctgctgccccccaaggagagcaacctcttcaagaggatcctgaagtgctatgagcagaagcagtacaagaatggcctgaagttctgcaagatgatcctgagcaaccccaagtttgctgagcacggggagaccctggccatgaagggcctgaccctgaactgcctgggcaagaaggaggaggcctatgaatttgtgaggaagggcctgagaaatgatgtgaagagccacgtgtgctggcacgtgtatggcctgctgcagaggagtgacaagaagtatgatgaggccatcaagtgctacagaaatgccctgaagctggacaaggacaacctgcagatcctgcgggacctgagcctgctgcagatccagatgagggacctggagggctaccgggagacccgctaccagctgctgcagctgcggcccacccagagggcctcctggattggctacgccatcgcctaccacctgctgaaggactatgacatggccctgaagctgctggaggagttccggcagacccagcaggtgccccccaacaagattgattatgagtacagcgagctgatcctgtaccagaaccaggtgatgagggaggccgacctgctgcaggagagcctggagcacatcgagatgtatgagaagcagatctgtgacaagctgctggtggaggagatcaagggggagatcctgctgaagctgggccgcctgaaggaggccagcgaggtgttcaagaacctgattgacagaaatgctgagaactggtgctactatgagggcctggagaaggccctgcagatcagcaccctggaggagcggctgcagatctatgaggagatcagcaagcagcaccccaaggccatcaccccccggcggctgcccctgaccctggtgcctggagagcgcttccgggagctgatggacaagttcctgcgggtgaacttcagcaagggctgccccccactcttcaccaccctgaagagcctgtactacaacacagagaaggtgtccatcatccaggagctggtgaccaactatgaggccagcctgaagacctgtgacttcttcagcccctatgaaaatggagagaaggagccccccaccaccctgctgtgggtgcagtacttcctggcccagcactttgacaagctgggccagtacagcctggccctggactacatcaatgctgccatcgccagcacccccaccctcatcgagctgttctacatgaaggccaagatctacaaggtgaagtctgagagctgcttcctgagcagctag

SEQ ID NO: 20655 - DNA, 360 bp, synthetic construct
  source 1..360: mol_type = other DNA; note = Synthetic coding sequence
atggacaagaacattggagagcagctgaacaaggcctatgaggccttccggcaggcctgcatggaccgggacagcgctgtgaaggagctgcagcagaagacagaaaattatgagcagaggatccgggagcagcaggagcagctgagcctgcagcagaccatcatcgacaagctgaagagccagctgctgctggtgaacagcacccaggacaacaactacggctgtgtgcccctgctggaggacagcgagaccaggaagaacaacctgaccctggaccagccccaggacaaggtgatcagcggcatcgcccgggagaagctgcccaaggtggacatcgccagcgctgagagcagcatctag

SEQ ID NO: 20656 - DNA, 699 bp, synthetic construct; identical to SEQ ID NO: 20646
  source 1..699: mol_type = other DNA; note = Synthetic coding sequence

SEQ ID NO: 20657 - DNA, 1461 bp, synthetic construct; identical to SEQ ID NO: 18479
  source 1..1461: mol_type = other DNA; note = Synthetic coding sequence

SEQ ID NO: 20658 - DNA, 3075 bp, synthetic construct; identical to SEQ ID NO: 19574
  source 1..3075: mol_type = other DNA; note = Synthetic coding sequence

SEQ ID NO: 20659 - DNA, 1767 bp, synthetic construct; identical to SEQ ID NO: 19028
  source 1..1767: mol_type = other DNA; note = Synthetic coding sequence

SEQ ID NO: 20660 - DNA, 666 bp, synthetic construct
  source 1..666: mol_type = other DNA; note = Synthetic coding sequence
atgctgaagaacaagggccacagcagcaagaaggacaacctggccgtgaatgctgtggccctgcaggaccacatcctgcatgacctgcagctgaggaacctgtctgtggccgaccacagcaagacccaggtgcagaagaaggagaacaagagcctgaagagggacaccaaggccatcatcgacaccggcctgaagaagaccacccagtgccccaagctggaggacagcgagaaggagtatgtgctggaccccaagcccccacccctgaccctggcccagaagctgggcctcatcggccccccacctccacccctgagcagtgatgagtgggagaaggtgaagcagaggagcctgctgcagggcgacagcgtgcagccctgccccatctgcaaggaggagtttgagctgcggccccaggtgctgctgagctgcagccacgtgttccacaaggcctgcctgcaggcctttgagaagttcaccaacaagaagacctgccccctgtgcaggaagaaccagtaccagaccagggtcatccatgatggagcccggctcttccgcatcaagtgtgtgacccgcatccaggcctactggaggggctgtgtggtgaggaagtggtacagaaacctgaggaagacagtgcccccaacagatgccaagctgaggtag

SEQ ID NO: 20661 - DNA, 900 bp, synthetic construct; identical to SEQ ID NO: 18623
  source 1..900: mol_type = other DNA; note = Synthetic coding sequence

SEQ ID NO: 20662 - DNA, 2193 bp, synthetic construct
  source 1..2193: mol_type = other DNA; note = Synthetic coding sequence
atggaggacctgtttgagaccttccaggatgagatgggcttcagcaacatggaggatgatggccctgaggaggaggagcgggtggccgagccccaggccaacttcaacaccccccaggccctgcgctttgaggagctgctggccaacctgctgaatgagcagcaccagatcgccaaggagctgtttgagcagctgaagatgaagaagcccagcgccaagcagcagaaggaggtggagaaggtgaagccccagtgcaaggaggtgcaccagaccctcatcctggaccctgcccagaggaagaggctgcagcagcagatgcagcagcacgtgcagctgctgacccagatccacctgctggccacctgcaaccccaacctgaaccctgaggccagcagcacccgcatctgcctgaaggagctgggcacctttgcccagagcagcatcgccctgcaccaccagtacaaccccaagttccagaccctcttccagccctgcaacctgatgggcgccatgcagctgattgaggacttcagcacccacgtgtccattgactgcagcccccacaagacagtgaagaagacagccaatgagttcccctgcctgcccaagcaggtggcctggatcctggccaccagcaaggtgttcatgtacccagagctgctgcctgtgtgcagcctgaaggccaagaacccccaggacaagatcctcttcaccaaggccgaggacaacaagtacctgctgacctgcaagacagcccggcagctgactgtgcgcatcaagaacctgaacatgaacagagccccagacaacatcatcaagttctacaagaagaccaagcagctgcctgtgctgggcaagtgctgtgaggagatccagccccaccagtggaagccacccatcgagcgggaggagcaccggctgcccttctggctgaaggccagcctgcccagcatccaggaggagctgcggcacatggctgatggagcccgggaggtgggcaacatgacaggcaccacagagatcaacagcgaccagggcctggagaaggacaacagcgagctgggcagcgagacccgctaccccctgctgctgcccaagggcgtggtgctgaagctgaagcctgtggccgaccgcttccccaagaaggcctggaggcagaagaggagctctgtgctgaagcccctgctgatccagcccagccccagcctgcagcccagcttcaaccctgggaagaccccagcccagagcacccacagcgaggccccacccagcaagatggtgctgcgcatcccccaccccatccagcctgccaccgtgctgcagacagtgcctggggtgccccccctgggcgtgtctggaggagagagctttgagagccctgctgccctgcctgccatgcctcctgaggcccggaccagcttccccctgtctgagagccagaccctgctgagcagcgcccctgtgcccaaggtgatgatgcccagccctgccagctccatgttcaggaagccctacgtgagaagaagacccagcaagagaagaggagcccgggccttccgctgcatcaagccagcccctgtgatccacccagccagcgtcatcttcaccgtgcctgccaccaccgtgaagatcgtgtccctgggcggcggctgcaacatgatccagcctgtgaatgctgctgtggcccagagcccccagaccatccccatcgccaccctgctggtgaaccccaccagcttcccctgccccctgaaccagcccctggtggccagctctgtgagccccctgattgtgtctggcaacagcgtgaacctgcccatccccagcaccccagaggacaaggcccacatgaatgtggacatcgcctgtgctgtggctgatggagaaaatgccttccagggcctggagcccaagctggagccccaggagctgagccccctgagcgccaccgtcttccccaaggtggagcacagccctggccccccacctgtggacaagcagtgccaggagggcctgtctgagaacagcgcctaccgctggacagtggtgaagacagaggagggccggcaggccctggagcccctgccccagggcatccaggagagcctgaacaacagcagccctggggacctggaggaggtggtgaagatggagccagaagatgccacagaggagatcagcggcttcctgtag

SEQ ID NO: 20663 - DNA, 1563 bp, synthetic construct
  source 1..1563: mol_type = other DNA; note = Synthetic coding sequence
atgtttgtgtctgacttcaggaaggagttctatgaggtggtgcagagccagagggtgctgctgtttgtggccagtgatgtggatgccctgtgtgcctgcaagatcctgcaggccctcttccagtgtgaccacgtgcagtacaccctggtgcctgtgtctggctggcaggagctggagacagccttcctggagcacaaggagcagatcaagctgctgatcaagcaggatgatgacctggaggtgcctgcctatgaggacatcttcagagatgaggaggaggatgaggagcacagcggaaatgacagtgatggcagcgagcccagcgagaagaggacccggctggaggaggagatcgtggagcagaccatgagaagacggcagaggcgggagtgggaggccaggagaagagacatcctgtttgattatgagcagtatgagtaccacggcaccagcagcgccatggtgatgtttgagctggcctggatgctgagcaaggacctgaatgacatgctgtggtgggccatcgtgggcctgacagaccagtgggtgcaggacaagatcacccagatgaagtatgtgacagatgtgggcgtgctgcagagacatgtgagccgccacaaccacagaaatgaagatgaggagaacaccctgtctgtggactgcacccgcatcagctttgaatatgacctgcggctggtgctgtaccagcactggagcctgcatgacagcctgtgcaacaccagctacacagctgcccgcttcaagctgtggagcgtgcacggccagaagaggctgcaggagttcctggccgacatgggcctgcccctgaagcaggtgaagcagaagttccaggccatggacatcagcctgaaggagaacctgcgggagatgattgaggagagcgccaacaagtttggcatgaaggacatgagggtgcagaccttcagcatccacttcggcttcaagcacaagttcctggccagtgatgtggtgtttgccaccatgagcctgatggagagccctgagaaggatggcagcggcacagaccacttcatccaggccctggacagcctgagccgcagcaacctggacaagctgtaccacggcctggagctggccaagaagcagctgcgggccacccagcagaccatcgccagctgcctgtgcaccaacctggtgatcagccagggccccttcctgtactgcagcctgatggagggcaccccagatgtgatgctgttcagcaggcctgccagcctgagcctgctgagcaagcacctgctgaagagctttgtgtgcagcaccaagaacagacgctgcaagctgctgcccctggtgatggccgcccccctgtccatggagcacggcaccgtgacagtggtgggcatccccccagagacagacagcagtgacaggaagaacttcttcggccgggcctttgagaaggctgctgagagcaccagcagcaggatgctgcacaaccactttgacctgtctgtgattgagctgaaggccgaggacaggagcaagttcctggatgccctgatcagcctgctgtcctag

SEQ ID NO: 20664 - DNA, 567 bp, synthetic construct; identical to SEQ ID NO: 19160
  source 1..567: mol_type = other DNA; note = Synthetic coding sequence

SEQ ID NO: 20665 - DNA, 1182 bp, synthetic construct
  source 1..1182: mol_type = other DNA; note = Synthetic coding sequence
atggatgctgccaccctgacctatgacaccctgcgctttgctgagtttgaggacttccctgagaccagcgagcctgtgtggatcctgggcaggaagtacagcatcttcacagagaaggatgagatcctgagtgatgtggccagccggctgtggttcacctacaggaagaacttccctgccatcggcggcaccggccccaccagtgacaccggctggggctgcatgctgcgctgtggccagatgatctttgcccaggccctggtgtgccgccacctgggccgggactggcgctggacccagaggaagaggcagcctgacagctacttctctgtgctgaatgccttcatcgacaggaaggacagctactacagcatccaccagatcgcccagatgggcgtgggggagggcaagagcatcggccagtggtacggccccaacacagtggcccaggtgctgaagaagctggccgtgtttgacacctggagcagcctggccgtgcacatcgccatggacaacacagtggtgatggaggagatccggcggctgtgcaggacctctgtgccctgtgccggggccacagccttccctgctgacagcgacagacactgcaatggcttccctgctggagctgaggtgaccaaccggcccagcccctggaggcccctggtgctgctgatccccctgcggctgggcctgacagacatcaatgaggcctacgtggagaccctgaagcactgcttcatgatgccccagagcctgggcgtcatcggcggcaagcccaacagcgcccactacttcatcggctacgtgggggaggagctgatctacctggacccccacaccacccagcctgctgtggagcccacagatggctgcttcatcccagatgagagcttccactgccagcaccccccctgcaggatgagcattgctgagctggaccccagcattgctgtgggcttcttctgcaagacagaagatgacttcaatgactggtgccagcaggtgaagaagctgagcctgctgggcggggccctgcccatgtttgagctggtggagctgcagcccagccacctggcctgcccagatgtgctgaacctgagcctggacagcagtgatgtggagcggctggagcgcttctttgattctgaagatgaggactttgagatcctgagcctgtag

SEQ ID NO: 20666 - DNA, 780 bp, synthetic construct; identical to SEQ ID NO: 18843
  source 1..780: mol_type = other DNA; note = Synthetic coding sequence

SEQ ID NO: 20667 - DNA, 852 bp, synthetic construct
  source 1..852: mol_type = other DNA; note = Synthetic coding sequence
atgatccccccccaggaggccagcgccaggagaagagaaattgaggacaagctgaagcaggaggaggagaccctgtccttcatccgggacagcctggagaagagtgaccagctgaccaagaacatggtgtccatcctgagcagctttgagagccggctgatgaagctggagaacagcatcatccctgtgcacaagcagacagagaacctgcagaggctgcaggagaatgtggagaagaccctgagctgcctggaccacgtgatctcctactaccacgtggccagtgacacagagaagatcatccgggagggccccaccggccgcctggaggagtacctgggctccatggccaagatccagaaggctgtggagtacttccaggacaacagcccagacagccctgagctgaacaaggtgaagctgctgtttgagcggggcaaggaggccctggagagcgagttccgcagcctgatgaccaggcacagcaaggtggtgtcccctgtgctgatcctggacctgatctctggagatgatgacctggaggcccaggaggatgtgaccctggagcacctgcctgagagcgtgctgcaggacgtcatccgcatcagccgctggctggtggagtatggaagaaaccaggacttcatgaatgtgtactaccagatccgcagcagccagctggacaggagcatcaagggcctgaaggagcacttccacaagagcagcagcagcagtggagtgccctacagccctgccatccccaacaagaggaaggacacccccaccaagaagcctgtgaagaggcctggagagccccccagctggcccatcagcgccacagcccggggctag

SEQ ID NO: 20668 - DNA, 2121 bp, synthetic construct
  source 1..2121: mol_type = other DNA; note = Synthetic coding sequence
atgaatgaggccatggccacagacagcccccggcggcccagccgctgcacaggaggagtggtggtgcggccccaggccgtgacagagcagagctacatggagagcgtggtgaccttcctgcaggatgtggtgccccaggcctacagcggcacccccctgacagaggagaaggagaagatcgtgtgggtgcgctttgaaaatgctgacctgaatgacaccagcaggaacctggagttccacgagatccacagcactggaaatgaaccacccctgctgatcatgattggctacagtgatggcatgcaggtgtggagcatccccatctctggagaggcccaggagctgttctctgtgcgccacggccccatccgggccgcccgcatcctgcctgccccccagtttggagcccagaagtgtgacaactttgctgagaagaggcccctgctgggcgtgtgcaagagcatcggcagcagcggcaccagccccccctactgctgcgtggacctgtacagcctgaggactggagagatggtgaagagcatccagttcaagacccccatctatgacctgcactgcaacaagaggatcctggtggtggtgctgcaggagaagattgctgcctttgacagctgcaccttcaccaagaagttctttgtgaccagctgctacccctgccccggccccaacatgaaccccatcgccctgggcagccgctggctggcctatgcagagaacaagctgatccgctgccaccagagcagaggaggagcctgtggggacaacatccagagctacacagccaccgtcatctctgctgccaagaccctgaagagcggcctgaccatggtgggcaaggtggtgacccagctgaccggcaccctgcccagcggcgtgacagaagatgatgtggccatccacagcaacagccgccgcagccccctggtgcccggcatcatcaccgtcatcgacacagagaccgtgggggagggccaggtgctggtgtctgaggacagcgacagtgatggcatcgtggcccacttccctgcccacgagaagcctgtgtgctgcatggccttcaacaccagcggcatgctgctggtgaccacagacaccctgggccatgacttccacgtgttccagatcctgacccacccctggagcagcagccagtgtgctgtgcaccacctgtacaccctgcacagaggagaaacagaggccaaggtgcaggacatctgcttcagccatgactgccgctgggtggtggtgtccaccctgcggggcaccagccacgtgttccccatcaacccctatggaggccagccctgtgtgaggacccacatgagcccccgggtggtgaacaggatgagccgcttccagaagtctgctggcctggaggagattgagcaggagctgaccagcaagcagggcggccgctgcagccctgtgcccggcctgagcagcagccccagcggcagccccctgcacggcaagctgaacagccaggacagctacaacaacttcaccaacaacaaccctggcaacccccggctgagccccctgcccagcctgatggtggtgatgcccctggcccagatcaagcagcccatgaccctgggcaccatcaccaagaggacaggcccctacctgtttggagctggctgcttcagcatcaaggccccctggagctacatcatgaccaagtacatcttctacatcaagccacccaacaaggtgaagcccccaccccagatcagccccagcaagtccatgggcggggagttctgtgtggccgccatcttcggcaccagccgctcctggtttgccaacaatgccggcctgaagcgggagaaggaccagagcaagcaggtggtggtggagagcctgtacatcatcagctgctacggcaccctggtggagcacatgatggagccccggcccctgagcacagcccccaagatcagtgatgacacccccctggagatgatgaccagcccccgggcctcctggaccctggtgaggaccccccagtggaatgagctgcagccccccttcaatgccaaccaccccctgctgctggccgcagatgctgtgcagtactaccagttcctgctggccggctag

SEQ ID NO: 20669 - DNA, 1815 bp, synthetic construct
  source 1..1815: mol_type = other DNA; note = Synthetic coding sequence
atgggcggctgcttcagcaagcccaagccaggggccgccctgcccaccgtggagctgaagattgaggtggtgctgcctgagaaggagcggggcaaggaggagctgagcgccagcggcaagggcagcccccgggcctaccagggcaatggaacagcccggcacttccacacagaggagcggctgagcaccccccacccctaccccagcccccaggactgtgtggaggccgctgtgtgccacgtgaaggacctggagaatggccagatgagggaggtggagctgggctggggcaaggtgctgctggtgaaggacaatggagagttccacgccctgggccacaagtgcccccactacggggcccccctggtgaagggcgtgctgagccggggccgggtgcgctgcccctggcatggagcctgcttcaacatcagcactggagacctggaggacttccctggcctggacagcctgcacaagttccaggtgaagattgagaaggagaaggtgtatgtgcgggccagcaagcaggccctgcagctgcagaggaggaccaaggtgatggccaagtgcatcagccccagcgctggctacagcagcagcaccaacgtgctgattgtgggcgctggagctgctggcctggtgtgtgccgagaccctgcggcaggagggcttcagtgaccgcatcgtgctgtgcaccctggacagacacctgccctatgaccggcccaagctgagcaagagcctggacacccagcctgagcagctggccctgcggcccaaggagttcttccgggcctacggcatcgaggtgctgacagaggcccaggtggtgacagtggatgtgaggaccaagaaggtggtgttcaaggatggcttcaagctggagtacagcaagctgctgctggcccctggcagcagccccaagaccctgagctgcaagggcaaggaggtggagaatgtgttcaccatccgcaccccagaagatgccaacagagtggtgcggctggcccggggcagaaatgtggtggtggtgggcgccggcttcctgggcatggaggtggccgcctacctgacagagaaggcccacagcgtgtctgtggtggagctggaggagacccccttccgccgcttcctgggggagcgggtgggccgggccctgatgaagatgtttgagaacaacagagtgaagttctacatgcagacagaggtgtctgagctgcggggccaggagggcaagctgaaggaggtggtgctgaagagcagcaaggtggtgcgggcagatgtgtgtgtggtgggcattggagctgtgcctgccaccggcttcctgcggcagagcggcatcggcctggacagccggggcttcatccctgtgaacaagatgatgcagaccaacgtgcctggggtgtttgctgctggagatgctgtgaccttccccctggcctggaggaacaacaggaaggtgaacatcccccactggcagatggcccacgcccagggccgggtggccgcccagaacatgctggcccaggaggccgagatgagcacagtgccctacctgtggacagccatgtttgggaagagcctgcgctatgccggctatggagagggctttgatgatgtgatcatccagggcgacctggaggagctgaagtttgtggccttctacaccaagggagatgaggtgattgctgtggcctccatgaactatgaccccatcgtgtccaaggtggccgaggtgctggccagcggccgggccatcaggaagcgggaggtggagactggagacatgtcctggctgaccgggaagggcagctag

SEQ ID NO: 20670 - DNA, 744 bp, synthetic construct
  source 1..744: mol_type = other DNA; note = Synthetic coding sequence
atgagcacagctgctgtgcctgagctgaagcagatcagccgggtggaggccatgaggctgggccctggctggagccacagctgccacgccatgctgtatgctgccaaccctggccagctgtttggccgcatccccatgaggttctctgtgctgatgcagatgagatttgatggcctgctgggcttccctgggggctttgtggaccggcgcttctggagcctggaggatggcctgaacagagtgctgggcctgggcctgggctgcctgcggctgacagaggccgactacctgagcagccacctgacagagggcccccaccgggtggtggcccacctgtatgcccggcagctgaccctggagcagctgcatgctgtggagatctctgctgtgcacagccgggaccacggcctggaggtgggccccccacctggcccccggcccccaccccggggcctggccctggccccctggaaggcccccatgggcaacaccagccctgagggccccctggccggcctgggccgggtgtccctgagccctgccatgggctggggcgagggcagcggggccggccggcctgggaaggagggccggggctggggccctgccctgggcctgccccagggctgtgtgaccagcgccctgctgcctgccatcgccaaccctggcagcggcggcgtgggctctgtgggcaggaagggctggggccgcagcggggactgcctgggctcctgggagacctag

SEQ ID NO: 20671 - DNA, 1338 bp, synthetic construct; identical to SEQ ID NO: 18645
  source 1..1338: mol_type = other DNA; note = Synthetic coding sequence

SEQ ID NO: 20672 - DNA, 1335 bp, synthetic construct
  source 1..1335: mol_type = other DNA; note = Synthetic coding sequence
ttccgggtgcctgctgctggccgccgctgccccctggcccggggggcccggcggcccccagacagcgcctgtggccgcttccccccagaccccggcagccccccagaggaggaggatgctgacctgtctgagcgggaggagagctggctgctggccgagcgggaggagaaccaggaggccgagttccctggcctgcggcgggctgtgcagctgaacctgagccggcccatcgaggagcagggccccctggatgtgatcatccacaagctgacagatgtgatcctggaggccgaccagaatgacagccagagcctggagctggtgcaccgcttccaggagtacattgatgcccaccctgagaccatcgtgctggaccccctgcctgccatccgcaccctgctggacaggagcaagagctatgagctgatcaggaagattgaggcctacatggaggatgaccgcatctgcagcccccccttcatggagctgaccagcctgtgtggagatgacaccatgaggctgctggagaagaatggcctgaccttccccttcatctgcaagaccagggtggcccacggcaccaacagccatgagatggccatcgtgttcaaccaggagggcctgaatgccatccagcccccctgtgtggtgcagaacttcatcaaccacaatgctgtgctgtacaaggtgtttgtggtgggggagagctacacagtggtgcagaggcccagcctgaagaacttctctgctggcaccagtgaccgggagagcatcttcttcaacagccacaacgtgtccaagccagagagcagctctgtgctgacagagctggacaagattgagggcgtgtttgagcggcccagtgatgaagtcatccgggagctgagccgggccctgcggcaggccctgggcgtgtccctgtttggcatcgacatcatcatcaacaaccagacaggccagcacgccgtcatcgacatcaatgccttccctggctatgagggcgtgtctgagttcttcacagacctgctgaaccacatcgccaccgtgctgcagggccagagcacagccatggccgccactggagatgtggccctgctgcggcacagcaagctgctggccgagcctgctgggggcctggtgggggagaggacctgcagcgccagccctggctgctgcggctccatgatgggccaggatgccccctggaaggccgaggctgatgctgggggcacagccaagctgccccaccagaggctgggctgcaatgccggcgtgagccccagcttccagcagcactgtgtggccagcctggccaccaaggccagcagccagtag

SEQ ID NO: 20673 - DNA, 864 bp, synthetic construct
  source 1..864: mol_type = other DNA; note = Synthetic coding sequence
atgtgtggcagaagaagacggcagagagctgccctgctgagccactgggaccccaccctgagcagtgactgggatggagagaggacagccccccagtgcctgctgcgcatcaagagggacatcatgagcatctacaaggagcccccacctggcatgtttgtggtgcctgacacagtggacatgaccaagatccacgccctgatcaccggcccctttgacaccccctatgagggcggcttcttcctgtttgtgttccgctgccccccagactaccccatccaccccccccgggtgaagctgatgaccactggaaacaacacagtgcgcttcaaccccaacttctacagaaatggcaaggtgtgcctgagcatcctgggcacctggacaggccctgcctggagccctgcccagagcatcagctctgtgctgatcagcatccagagcctgatgacagagaacccctaccacaatgaacctggctttgagcaggagcggcaccctggggacagcaagaactacaatgaatgcatcagacatgagaccatccgggtggccgtgtgtgacatgatggagggcaaatgtccctgcccagagcccctgcggggcgtgatggagaagagcttcctggagtactatgacttctatgaggtggcctgcaaggaccggctgcacctgcagggccagaccatgcaggacccctttggagagaagaggggccactttgactaccagagcctgctgatgaggctgggcctcatccggcagaaggtgctggagcggctgcacaatgaaaatgctgagatggacagcgacagcagcagcagcggcacagaaacagacctgcacggcagcctgcgggtgtag

SEQ ID NO: 20674 - DNA, 852 bp, synthetic construct
  source 1..852: mol_type = other DNA; note = Synthetic coding sequence
cctccctgcagcctcatcagtgactgctgtgccggcaaccagagggacagcgtgggcgtgggccccagcgagcccggctgctacccctgccccggccccaacatgaaccccatcgccctgggcagccgctggctggcctatgcagagaacaagctgatccgctgccaccagagccggggcggggcctgtggggacaacatccagagctacacagccaccgtcatctctgctgccaagaccctgaagagcggcctgaccatggtgggcaaggtggtgacccagctgaccggcaccctgcccagcggcgtgacagaagatgatgtggccatccacagcaacagcagaagaagccccctggtgcccggcatcatcaccgtgattgacacagaaacagtgggggagggccaggtgctggtgtctgaagattctgacagtgatggcatcgtggcccacttccctgcccacgagaagcctgtgtgctgcatggccttcaacaccagcggcatgctgctggtgaccacagacaccctgggccatgacttccacgtgttccagatcctgacccacccctggagcagcagccagtgtgctgtgcaccacctgtacaccctgcacagaggagaaacagaggccaaggtgcaggacatctgcttcagccatgactgccgctgggtggtggtgtccaccctgcggggcaccagccacgtgttccccatcaacccctacggcggccagccctgtgtgaggacccacatgagcccccgggtggtgaacaggatgagccgcttccagaagtctgctggcctggaggagattgagcaggagctgaccagcaagcagggcggccgctag

SEQ ID NO: 20675 - DNA, 2235 bp, synthetic construct
  source 1..2235: mol_type = other DNA; note = Synthetic coding sequence
atgtctgctgccaaccctgagacccccaacagcaccatcagccgggaggccagcacccagagcagcagcgctgctgccagccagggctgggtgctgcctgagggcaagatcgtgcccaacacagtgtttgtgggcggcattgatgccaggatggatgaaacagagatcggcagctgcttcggccgctatggctctgtgaaggaggtgaagatcatcaccaacagaactggagtgtccaagggctacggctttgtgtcctttgtgaatgatgtggatgtgcagaagatcgtgggcagccagatccacttccacggcaagaagctgaagctgggccctgccatcaggaagcagaagctgtgtgcccggcacgtgcagccccggcccctggtggtgaaccccccacctccaccccagttccagaatgtgtggaggaaccccaacacagagacctacctgcagccccagatcacccccaaccctgtgacccagcacgtgcagagcgctgccaaccctgagacccccaacagcaccatcagccgggaggccagcacccagagcagcagcgctgctgccagccagggctgggtgctgcctgagggcaagatcgtgcccaacacagtgtttgtgggcggcattgatgccaggatggatgaaacagaaattggcagctgcttcggccgctatggctctgtgaaggaggtgaagatcatcaccaacagaactggagtgtccaagggctacggctttgtgtcctttgtgaatgatgtggatgtgcagaagatcgtgggcagccagatccacttccacggcaagaagctgaagctgggccctgccatcaggaagcagaagctgtgtgcccggcacgtgcagccccggcccctggtggtgaaccccccacctccaccccagttccagaatgtgtggaggaaccccaacacagagacctacctgcagccccagatcacccccaaccctgtgacccagcacgtgcagagcgctgccaaccctgagacccccaacagcaccatcagccgggaggccagcacccagagcagcagcgctgctgccagccagggctgggtgctgcctgagggcaagatcgtgcccaacacagtgtttgtgggcggcattgatgccaggatggatgaaacagagatcggcagctgcttcggccgctatggctctgtgaaggaggtgaagatcatcaccaacagaactggagtgtccaagggctacggctttgtgtcctttgtgaatgatgtggatgtgcagaagatcgtgggcagccagatccacttccacggcaagaagctgaagctgggccctgccatcaggaagcagaagctgtgtgcccggcacgtgcagccccggcccctggtggtgaaccccccacctccaccccagttccagaatgtgtggaggaaccccaacacagagacctacctgcagccccagatcacccccaaccctgtgacccagcacgtgcaggcctacagcgcctacccccacagccctggccaggtgatcaccggctgccagctgctggtgtacaactaccaggagtaccccacctacccagacagcgccttccaggtgaccaccggctaccagctgcctgtgtacaactaccagcccttccctgcctaccccaggagccccttccaggtgacagctggctaccagctgcctgtgtacaactaccaggccttccctgcctaccccaacagccccttccaggtggccaccggctaccagtttcctgtgtacaactaccagcccttccctgcctaccccagcagccccttccaggtgacagctggctaccagctgcctgtgtacaactaccaggccttccctgcctaccccaacagccccttccaggtggccaccggctaccagtttcctgtgtacaactaccaggccttccctgcctaccccaacagccctgtgcaggtgaccaccggctaccagctgcctgtgtacaactaccaggccttccctgcctaccccagcagccccttccaggtgaccaccggctaccagctgcctgtgtacaactaccaggccttccctgcctaccccaacagcgctgtgcaggtgaccaccggctaccagttccacgtgtacaactaccagatgccaccccagtgccctgtgggggagcagaggaggaacctgtggacagaggcctacaagtggtggtacctggtgtgcctgatccagaggcgggactag

SEQ ID NO: 20676 - DNA, 1089 bp, synthetic construct; identical to SEQ ID NO: 18944
  source 1..1089: mol_type = other DNA; note = Synthetic coding sequence

SEQ ID NO: 20677 - DNA, 2130 bp, synthetic construct
  source 1..2130: mol_type = other DNA; note = Synthetic coding sequence
atggctgatgctggcatcagaagagtggtgcccagcgacctgtaccccctggtgctgggcttcctgcgggacaaccagctgtctgaggtggccaacaagtttgccaaggccaccggggccacccagcaggatgccaatgccagcagcctgctggacatctacagcttctggctgaagagcgccaaggtgcctgagaggaagctgcaggccaatggacctgtggccaagaaggccaagaagaaggccagcagcagtgacagcgaggacagcagcgaggaggaggaggaggtgcagggccccccagccaagaaggctgctgtgcctgccaagagggtgggcctgcccccaggcaaggccgccgccaaggccagcgagagcagcagcagcgaggagagcagtgatgatgatgatgaggaggaccagaagaagcagcctgtgcagaagggcgtgaagccccaggccaaggccgccaaggccccacccaagaaggccaagagcagtgacagcgacagcgacagcagcagtgaagatgagccccccaagaaccagaagcccaagatcacccctgtgacagtgaaggcccagaccaaggccccacccaagccagcccgggccgcccccaagatcgccaacgggaaggccgccagcagcagcagcagcagcagcagcagcagcagcagtgatgacagcgaggaggagaaggccgccgccacccccaagaaggtgtggaccatcacctctgtgcgggcagagaccgtgcccaagaagcaggtggtggccaaggcccctgtgaaggccgccaccacccccaccaggaagagcagcagcagcgaggacagcagcagtgatgaggaggaggagcagaagaagcccatgaagaacaagccaggcccctacagctctgtgcccccacccagcgcccccccacccaagaagagcctgggcacccagccccccaagaaggctgtggagaagcagcagcctgtggagagcagcgaggacagcagtgatgaaagtgacagcagcagcgaggaggagaagaagccacccaccaaggctgtggtgtccaaggccaccaccaagcccccaccagccaagaaggctgctgagagcagcagtgacagcagtgacagcgacagcagtgaagatgatgaggcccccagcaagccagctggcaccaccaagaacagcagcaacaagccagctgtgaccaccaagagccctgctgtgaagccagctgctgcccccaagcagcctgtgggcggcggccagaagctgctgaccaggaaggctgacagcagcagcagcgaggaggagagcagcagcagcgaggaggagaagaccaagaagatggtggccaccaccaagcccaaggccacagccaaggccgccctgagcctgcctgccaagcaggccccccagggcagccgggacagcagcagtgacagcgacagcagcagcagcgaggaggaggaggagaagaccagcaagtctgctgtgaagaagaagccccagaaggtggccggcggggccgcccccagcaagccagccagcgccaagaagggcaaggccgagagcagcaacagcagcagcagtgatgacagcagcgaggaggaggaggagaagctgaagggcaagggcagcccccggccccaggcccccaaggccaacggcaccagcgccctgacagcccagaatggcaaggccgccaagaacagcgaggaggaggaggaggagaagaagaaggctgctgtggtggtgtccaagagcggcagcctgaagaagaggaagcagaatgaagctgccaaggaggccgagaccccccaggccaagaagatcaagctgcagacccccaacaccttccccaagaggaagaagggggagaagagggccagcagccccttccggcgggtgcgggaggaggagattgaggtggacagccgggtggccgacaacagctttgatgccaagagaggagctgctggggactggggcgagcgggccaaccaggtgctgaagttcaccaagggcaagagcttcagacatgagaagaccaagaagaagaggggcagctaccggggcggcagcatctctgtgcaggtgaacagcatcaagtttgacagcgagtag

SEQ ID NO: 20678 - DNA, 558 bp, synthetic construct; identical to SEQ ID NO: 19671
  source 1..558: mol_type = other DNA; note = Synthetic coding sequence

SEQ ID NO: 20679 - DNA, 1764 bp, synthetic construct; identical to SEQ ID NO: 19443
  source 1..1764: mol_type = other DNA; note = Synthetic coding sequence

SEQ ID NO: 20680 - DNA, 1098 bp, synthetic construct
  source 1..1098: mol_type = other DNA; note = Synthetic coding sequence
atgaaggagctgtggtgtgtgatggactgggccgtgcccggcctgctgggcagcggcacctacttcaagaagcagttcagtgaccctgtggagcacggccagaggcacacagccaccaagcgggagctggccactggaaggaaggccatgcagaggctggccaagaagatgagcggctggttcctgcggaggaccaagaccctcatcaaggaccagctgcccaagaaggaggacaggatggtgtactgcagcctgacagacttccagaaggctgtgtaccagacagtgctggagacagaagatgtgaccctcatcctgcagagcagcgagccctgcacctgccgcagcggccagaagagaagaaactgctgctacaagaccaacagccacggggagaccgtgaagaccctgtacctgagctacctgactgtgctgcagaaggtggccaaccacgtggccctgctgcaggccgccagcaccagcaagcagcaggagaccctcatcaagaggatctgtgaccaggtgttcagccgcttcccagactttgtgcagaagagcaaggatgctgcctttgagaccctgagtgaccccaagtacagcggcaagatgaaggtgctgcagcagctgctgaaccactgcaggaagaacagagacaaggtgctgctcttctccttcagcaccaagctgctggatgtgctgcagcagtactgcatggccagcggcctggactacagaaggctggatggcagcaccaagtctgaggagcggctgaagatcgtgaaggagttcaacagcacccaggatgtgaacatctgcctggtgtccaccatggccggcggcctgggcctgaactttgtgggcgccaacgtggtggtgctgtttgaccccacctggaacccagccaatgacctgcaggccatcgacaggacccagacccactgcagaagagaaagagatgctgagcccctgagcagcgcccctggcctgcagaatggaagtgaaaatgctgtgccctacccctggtggtgctgcgtgactggagccagcatcagctgctggaggtgtgagatctgccgcatccaggatgtgctggagtag

SEQ ID NO: 20681 - DNA, 1104 bp, synthetic construct
  source 1..1104: mol_type = other DNA; note = Synthetic coding sequence
atggagaagaagaagatggtgacccagggcaaccaggagcccaccaccaccccagatgccatggtgcagcccttcaccaccatccccttccccccaccaccccagaatggcatccccacagaatatggagtgccccacacccaggactatgccggccagacaggagagcacaacctgaccctgtatggcagcacccaggcccacggggagcagagcagcaacagccccagcacccagaatggcagcctgacccagacagagggcggggcccagacagatggccagcagagccagacccagagcagtgaaaattctgagagcaagagcacccccaagaggctgcacgtgagcaacatccccttccgcttccgggaccctgacctgcggcagatgtttggccagtttgggaagatcctggatgtggagatcatcttcaatgaaagaggcagcaaaggatttggatttgtgacctttgaaaattctgcagatgctgaccgggcccgggagaagctgcacggcaccgtggtggagggcaggaagattgaggtgaacaatgccacagcccgggtgatgaccaacaagaagatggtgaccccctatgccaacggctggaagctgagccctgtggtgggcgctgtgtatggccctgagctgtatgctgccagcagcttccaggctgatgtgtccctgggcaatgatgctgctgtgcccctgagcggccggggcggcatcaacacctacatccccctcatcatccctggcttcccctaccccacagctgccaccacagctgctgccttccggggggcccacctgcggggccggggccgcacagtgtatggagctgtgcgggctgtgcccccaacagccatcccagcctacccaggagtggacatgcagcccacagacatgcacagcctgctgctgcagccccagccccccctgctgcagcccctgcagcccctgactgtgacagtgatggccggctgcacccagcccacccccaccatgcccctgcccctgcccctggccatggagctggccctgtggagggtgtacacagaggtggccacagctgacctgcccccaacagaggtgacctag

SEQ ID NO: 20682 - DNA, 1764 bp, synthetic construct; identical to SEQ ID NO: 19443
  source 1..1764: mol_type = other DNA; note = Synthetic coding sequence

SEQ ID NO: 20683 - DNA, 1143 bp, synthetic construct
  source 1..1143: mol_type = other DNA; note = Synthetic coding sequence
atggatgctgccaccctgacctatgacaccctgcgctttgctgagtttgaggacttccctgagaccagcgagcctgtgtggatcctgggcaggaagtacagcatcttcacagagaaggatgagatcctgagtgatgtggccagccggctgtggttcacctacaggaagaacttccctgccatcggcggcaccggccccaccagtgacaccggctggggctgcatgctgcgctgtggccagatgatctttgcccaggccctggtgtgccgccacctgggccgggactggcgctggacccagaggaagaggcagcctgacagctacttctctgtgctgaatgccttcatcgacaggaaggacagctactacagcatccaccagatcgcccagatgggcgtgggggagggcaagagcatcggccagtggtacggccccaacacagtggcccaggtgctgaagaagctggccgtgtttgacacctggagcagcctggccgtgcacatcgccatggacaacacagtggtgatggaggagatccggcggctgtgcaggacctctgtgccctgtgccggggccacagccttccctgctgacagcgacagacactgcaatggcttccctgctggagctgaggtgaccaaccggcccagcccctggaggcccctggtgctgctgatccccctgcggctgggcctgacagacatcaatgaggcctacgtggagaccctgaagcactgcttcatgatgccccagagcctgggcgtcatcggcggcaagcccaacagcgcccactacttcatcggctacgtgggggaggagctgatctacctggacccccacaccacccagcctgctgtggagcccacagatggctgcttcatcccagatgagagcttccactgccagcaccccccctgcaggatgagcattgctgagctggaccccagcattgctgtgggcttcttctgcaagacagaagatgacttcaatgactggtgccagcaggtgaagaagctgagcctgctgggcggggccctgcccatgtttgagctggtggagctgcagcccagccacctggcctgcccagatgtgctgaacctgagcctgggggagagctgccaggtgcagatcctgctgatgtag

SEQ ID NO: 20684 - DNA, 2124 bp, synthetic construct
  source 1..2124: mol_type = other DNA; note = Synthetic coding sequence
atgatccccccccaggaggccagcgccaggagaagagaaattgaggacaagctgaagcaggaggaggagaccctgtccttcatccgggacagcctggagaagagtgaccagctgaccaagaacatggtgtccatcctgagcagctttgagagccggctgatgaagctggagaacagcatcatccctgtgcacaagcagacagagaacctgcagaggctgcaggagaatgtggagaagaccctgagctgcctggaccacgtgatctcctactaccacgtggccagtgacacagagaagatcatccgggagggccccaccggccgcctggaggagtacctgggctccatggccaagatccagaaggctgtggagtacttccaggacaacagcccagacagccctgagctgaacaaggtgaagctgctgtttgagcggggcaaggaggccctggagagcgagttccgcagcctgatgaccaggcacagcaaggtggtgtcccctgtgctgatcctggacctgatctctggagatgatgacctggaggcccaggaggatgtgaccctggagcacctgcctgagagcgtgctgcaggacgtcatccgcatcagccgctggctggtggagtatggaagaaaccaggacttcatgaatgtgtactaccagatccgcagcagccagctggacaggagcatcaagggcctgaaggagcacttccacaagagcagcagcagcagtggagtgccctacagccctgccatccccaacaagaggaaggacacccccaccaagaagcctgtgaagaggcctggcaccatcaggaaggcccagaacctgctgaagcagtacagccagcacggcctggatggcaagaagggcggcagcaacctgatccccctggagggccacgagcatgacttccgggtgaagcacctgtctgaggccctgaatgacaagcacggccccctggccggcagagatgacatgctggatgtggagacagatgcctacatccactgtgtgtctgcctttgtgaagctggcccagagcgagtaccagctgctggccgacatcatccctgagcaccaccagaagaagacctttgacagcctcatccaggatgccctggatggcctgatgctggagggagaaaatattgtgtctgctgccaggaaggccatcgtgagacatgacttcagcacagtgctgactgtgttccccatcctgcggcacctgaagcagaccaagccagagtttgaccaggtgctgcagggcacagctgccagcaccaagaacaagctgcccggcctcatcacctccatggagaccatcggggccaaggccctggaggactttgctgacaacatcaagaatgaccctgacaaggagtacaacatgcccaaggatggcaccgtgcatgagctgaccagcaatgccatcctcttcctgcagcagctgctggacttccaggagacagctggggccatgctggccagccaggagaccagcagcagcgccaccagctacagcagcgagttcagcaagaggctgctgagcacctacatctgcaaggtgctgggcaacctgcagctgaacctgctgagcaagagcaaggtgtatgaggaccctgccctgagcgccatcttcctgcacaacaactacaactacatcctgaagagcctggagaagtctgagctgatccagctggtggccgtgacccagaagacagctgagaggagctaccgggagcacatcgagcagcagatccagacctaccagaggtcctggctgaaggtgacagactacatcgccgagaagaacctgcccgtcttccagcccggggtgaagctgcgggacaaggagcggcagatcatcaaggagcgcttcaagggcttcaatgatggcctggaggagctgtgcaagatccagaaggcctgggccatcccagacacagagcagagggaccgcatccggcaggcccagaagaccatcgtgaaggagacctacggggccttcctgcagaagtttggatctgtgcccttcaccaagaaccctgagaagtacatcaagtatggagtggagcaggtgggggacatgattgaccggctgtttgacaccagcgcctag

SEQ ID NO: 20685 - DNA, 1026 bp, synthetic construct; identical to SEQ ID NO: 19437
  source 1..1026: mol_type = other DNA; note = Synthetic coding sequence

SEQ ID NO: 20686 - DNA, 1488 bp, synthetic construct
  source 1..1488: mol_type = other DNA; note = Synthetic coding sequence
atggccggcgtgggccgcagcggcggcccctggggccgcacccggggcggccgcagcggccgcctgggcgtgtccctgggcgccctgagcagcctgcccctggaggagctgccccggcccctgtgctgccgccgctgcagaagacacttcggctttgccctgcggggggagaccatccctgtgtctgtggccggcagcgccagcagccagtttgcccccctggccctgcacctgagcctgctgctgagccgcatcagcgccagccggctgacccgctggcccccaccagacaagcgggagggcagcgctgtggaccccgggaagagaagaagcctggccgccacccccagcagcagcctgccctgcaccctgattgccctgggcctgcggcatgagaaggaggccaatgagctgatggaggacctgtttgagaccttccaggatgagatgggcttcagcaacatggaggatgatggccctgaggaggaggagcgggtggccgagccccaggccaacttcaacaccccccaggccctgcgctttgaggagctgctggccaacctgctgaatgagcagcaccagatcgccaaggagctgtttgagcagctgaagatgaagaagcccagcgccaagcagcagaaggaggtggagaaggtgaagccccagtgcaaggaggtgcaccagaccctcatcctggaccctgcccagaggaagaggctgcagcagcagatgcagcagcacgtgcagctgctgacccagatccacctgctggccacctgcaaccccaacctgaaccctgaggccagcagcacccgcatctgcctgaaggagctgggcacctttgcccagagcagcatcgccctgcaccaccagtacaaccccaagttccagaccctcttccagccctgcaacctgatgggcgccatgcagctgattgaggacttcagcacccacgtgtccattgactgcagcccccacaagacagtgaagaagacagccaatgagttcccctgcctgcccaagcaggtggcctggatcctggccaccagcaaggtgttcatgtacccagagctgctgcctgtgtgcagcctgaaggccaagaacccccaggacaagatcctcttcaccaaggccgaggacaacctgctggccctgggcctgaagcactttgagggcacagagttcctgaaccccctcatcagcaagtacctgctgacctgcaagacagcccggcagctgactgtgcgcatcaagaacctgaacatgaacagagccccagacaacatcatcaagttctacaagaagaccaagcagctgcctgtgctgggcaagtgctgtgaggagatccagccccaccagtggaagccacccatcgagcgggaggagcaccggctgcccttctggctgaaggtgcagcccagcagcagcaagtctgtgggcggccgccgcagcctgaaggtgctgcgggagtaccagggcctgccctag

SEQ ID NO: 20687 - DNA, 180 bp, synthetic construct
  source 1..180: mol_type = other DNA; note = Synthetic coding sequence
atggccgcccctggggccctgctggtgatgggcgtgtctggcagcggcaactgggatggcaacagcatgatgctgatgatcatcaccaggaggaagattgagggccgctgggagaaggcctaccgctccatgaccaggacaggcttccacggctctgtgacctgcatgaccttctactag

SEQ ID NO: 20688 - DNA, 207 bp, synthetic construct
  source 1..207: mol_type = other DNA; note = Synthetic coding sequence
atgggagaaacagagggcaagaaggatgaagctgactacaagaggctgcagaccttccccctggtgcgccacagcgacatgcctgaggagatgagggtggagaccatggagctgtgtgtgacagcctgtgagaagttcagcaacaacaatgaggtgctgcctgctgtgcaggccgccccccgggcctttgatggcccctgtggctag

SEQ ID NO: 20689 - DNA, 2451 bp, synthetic construct; identical to SEQ ID NO: 19768
  source 1..2451: mol_type = other DNA; note = Synthetic coding sequence

SEQ ID NO: 20690 - DNA, 1119 bp, synthetic construct; identical to SEQ ID NO: 18969
  source 1..1119: mol_type = other DNA; note = Synthetic coding sequence

SEQ ID NO: 20691 - DNA, 480 bp, synthetic construct
  source 1..480: mol_type = other DNA; note = Synthetic coding sequence
atgatccccccccaggaggccagcgccaggagaagagaaattgaggacaagctgaagcaggaggaggagaccctgtccttcatccgggacagcctggagaagagtgaccagctgaccaagaacatggtgtccatcctgagcagctttgagagccggctgatgaagctggagaacagcatcatccctgtgcacaagcagacagagaacctgcagaggctgcaggagaatgtggagaagaccctgagctgcctggaccacgtgatctcctactaccacgtggccagtgacacagagaagatcatccgggagggccccaccggccgcctggaggagtacctgggctccatggccaagatccagaaggctgtggagtacttccaggacaacagcccagacagccctgagctgaacaaggtggtgcggggcccccagaacaacgtgcgcagcctgggcatctctgtgtctgccctggtgtcctag

SEQ ID NO: 20692 - DNA, 243 bp, synthetic construct
  source 1..243: mol_type = other DNA; note = Synthetic coding sequence
atggccagcgaggagctgcagaaggacctggaggaggtgaaggtgctgctggagaaggccaccaggaagagggtgagagatgccctgacagctgagaagagcaagattgaaacagagatcaagaacaagatgcagcagaagagccagaagaaggccgagctgctggacaatgagaagccagctgctgtggtggcccccatcaccaccggctacacagatggcatcagccagatcagcctgtag

SEQ ID NO: 20693 - DNA, 606 bp, synthetic construct
  source 1..606: mol_type = other DNA; note = Synthetic coding sequence
atgcccagcgagaccctgtgggagatcgccaaggccgaggtggagaagaggggcatcaatggaagtgaaggagatggagctgagattgctgagaagtttgtgttcttcatcggcagcaagaatggaggcaagaccaccatcatcctgcgctgcctggacagagatgagccccccaagcccaccctggccctggagtacacctacggccggcgggccaagggccacaacacccccaaggacatcgcccacttctgggagctgggcggcggcaccagcctgctggacctgatcagcatccccatcaccggggacaccctgcggaccttcagcctggtgctggtgctggacctgagcaagcccaatgacctgtggcccaccatggagaacctgctgcaggccaccaagagccacgtggacaaggtgatcatgaagctgggcaagaccaatgccaaggctgtgtctgagatgaggcagaagatctggaacaacatgcccaaggaccaccctgtgtcctgctgcctgggcctgctgctggagagcctggtgcccttcatcgtgaatgacaacatcaccaacaacttcttccgcttcctgtgcatgacctag

SEQ ID NO: 20694 - DNA, 1401 bp, synthetic construct
  source 1..1401: mol_type = other DNA; note = Synthetic coding sequence
atgagctacagacctgtggtgtcccctgtgatgagcctgacccggcgctgcatgaggagcaggacctccatgaggacagatgctgtgttcctgatcctgtacaaggagctgtactaccgccacatctatgccaaggtgtctgggggccccagcctggagcagagatttgagagctactacaactactgcaacctcttcaactacatcctgaatgctgatggccctgcccccctggagctgcccaaccagtggctgtgggacatcattgatgagttcatctaccagttccagagcttcagccagtaccgctgcaagacagccaagaagtctgaggaggagattgacttcctgcggagcaaccccaagatctggaatgtgcacagcgtgctgaatgtgctgcacagcctggtggacaagagcaacatcaaccggcagctggaggtgtacaccagcggcggggaccctgagagcgtggccggggagtatggccgccacagcctgtacaagatgctgggctacttcagcctggtgggcctgctgcggctgcacagcctgctgggggactactaccaggccatcaaggtgctggagaacatcgagctgaacaagaagtccatgtacagccgggtgcctgagtgccaggtgaccacctactactacgtgggctttgcctacctgatgatgaggcgctaccaggatgccatccgggtgtttgccaacatcctgctgtacatccagaggaccaagtccatgttccagaggaccacctacaagtatgagatgatcaacaagcagaatgagcagatgcacgccctgctggccatcgccctgaccatgtaccccatgagaattgatgagagcatccacctgcagctgcgggagaagtacggggacaagatgctgaggatgcagaagggggacccccaggtgtatgaggagctgttctcctacagctgccccaagttcctgagccctgtggtgcccaactatgacaacgtgcaccccaactaccacaaggagcccttcctgcagcagctgaaggtgttcagtgatgaggtgcagcagcaggcccagctgagcaccatccgctccttcctgaagctgtacaccaccatgcctgtggccaagctggccggcttcctggacctgacagagcaggagttccgcatccagctgctggtgttcaagcacaagatgaagaacctggtgtggaccagcggcatcagcgccctggatggagagttccagagcgccagcgaggtggacttctacatcgacaaggacatgatccacatcgctgacaccaaggtggccaggagatatggagacttcttcatccggcagatccacaagtttgaggagctgaacagaaccctgaagaagatgggccagaggccctag

SEQ ID NO: 20695 - DNA, 597 bp, synthetic construct
  source 1..597: mol_type = other DNA; note = Synthetic coding sequence
atgagcagagctgtgaccatcgccgaggccttctgccacatcctcttccgcatcatcagcgagatcctgatgaggatgctggaggagcagtgcctcttccccctgcctgagccccaggacctcttccaggccagccagatgaagtttgaggacttccagaaggacctgaggaagctgaagaaggacctgaaggcctgtgaggtggaggccggcaaggtgtaccaggtgagcagcaaggagcacatgcagcccttcaaggagaacatggagcagttcatcatccaggccaagattgaccaggaggccgaggagaacagcctgacagagacccacaagtgcttcctggagaccacagcctacttcttcatgaagcccaagctgggggagaaggaggtgagccccaatgccttcttcagcatctggcatgagttcagcagtgacttcaaggacttctggaagaaggagaacaagctgctgctgcaggagcgggtgaaggaggccgaggaggtgtgccggcagaagaagggcaagagcctgtacaagatcaagcccaggcatgacagcggcatcaaggccaagatctccatgaagacctag

SEQ ID NO: 20696 - DNA, 441 bp, synthetic construct
  source 1..441: mol_type = other DNA; note = Synthetic coding sequence
atggagcccacccgggactgccccctgtttggaggagccttcagcgccatcctgcccatgggcgccattgatgtgtctgacctgcggcctgtgcctgacaaccaggaggtgttctgccaccctgtgacagaccagagcctcatcgtggagctgctggagctgcaggcccacgtgcggggggaggccgccgcccgctaccactttgaagatgtgggcggcgtgcagggcgcccgggctgtgcacgtggagagcgtgcagcccctgagcctggagaacctggccctgcggggccgctgccaggaggcctgggtgctgagcggcaagcagcagatcgccaaggagaaccagcaggtggccaaggatgtgaccctgcaccaggccctgctgcggctgccccagtaccagacagacctgctgctgaccttcaaccagcccccatag

SEQ ID NO: 20697 - DNA, 1584 bp, synthetic construct
  source 1..1584: mol_type = other DNA; note = Synthetic coding sequence
atgagcctgtgtggggcccgggccaatgccaagatgatggccgcctacaatggaggcaccagcgctgctgctgctggccaccaccaccaccaccaccaccacctgccccacctgcccccaccccacctgcaccaccaccaccacccccagcaccacctgcaccctggcagcgctgctgctgtgcaccctgtgcagcagcacaccagcagcgctgctgctgctgctgctgctgctgctgctgctgctgccatgctgaaccctggccagcagcagccctacttccccagccctgcccctggccaggcccctggccctgctgctgctgccccagcccaggtgcaggccgctgctgctgccaccgtgaaggcccaccaccaccagcacagccaccacccccagcagcagctggacatcgagccagaccggcccatcggctacggggcctttggagtggtgtggagcgtgacagaccccagagatggcaagagggtggccctgaagaagatgcccaacgtgttccagaacctggtgtcctgcaagagggtcttccgggagctgaagatgctgtgcttcttcaagcatgacaacgtgctgagcgccctggacatcctgcagcccccccacatcgactactttgaggagatctacgtggtgacagagctgatgcagagcgacctgcacaagatcatcgtgagcccccagcccctgagcagtgaccacgtgaaggtgttcctgtaccagatcctgcggggcctgaagtacctgcacagcgctggcatcctgcaccgggacatcaagccaggcaacctgctggtgaacagcaactgtgtgctgaagatctgtgactttggcctggcccgggtggaggagctggatgagagccgccacatgacccaggaggtggtgacccagtactaccgggcccctgagatcctgatgggcagccgccactacagcaatgccatcgacatctggagcgtgggctgcatctttgctgagctgctgggccgccgcatcctcttccaggcccagagccccatccagcagctggacctgatcacagacctgctgggcacccccagcctggaggccatgaggacagcctgtgagggcgccaaggcccacatcctgcggggcccccacaagcagcccagcctgcctgtgctgtacaccctgagcagccaggccacccatgaggccgtgcacctgctgtgcaggatgctggtgtttgaccccagcaagaggatcagcgccaaggatgccctggcccacccctacctggatgagggccgcctgcgctaccacacctgcatgtgcaagtgctgcttcagcaccagcacaggccgggtgtacaccagtgactttgagcctgtgaccaaccccaagtttgatgacacctttgagaagaacctgagctctgtgcggcaggtgaaggagatcatccaccagttcatcctggagcagcagaagggcaacagagtgcccctgtgcatcaacccccagagcgctgccttcaagagcttcatcagcagcacagtggcccagcccagcgagatgccacccagccccctggtgtgggagtag

SEQ ID NO: 20698 - DNA, 2742 bp, synthetic construct
  source 1..2742: mol_type = other DNA; note = Synthetic coding sequence
atgaatgaggccatggccacagacagcccccggcggcccagccgctgcacaggaggagtggtggtgcggccccaggccgtgacagagcagagctacatggagagcgtggtgaccttcctgcaggatgtggtgccccaggcctacagcggcacccccctgacagaggagaaggagaagatcgtgtgggtgcgctttgaaaatgctgacctgaatgacaccagcaggaacctggagttccacgagatccacagcactggaaatgaaccacccctgctgatcatgattggctacagtgatggcatgcaggtgtggagcatccccatctctggagaggcccaggagctgttctctgtgcgccacggccccatccgggccgcccgcatcctgcctgccccccagtttggagcccagaagtgtgacaactttgctgagaagaggcccctgctgggcgtgtgcaagagcatcggcagcagcggcaccagccccccctactgctgcgtggacctgtacagcctgaggactggagagatggtgaagagcatccagttcaagacccccatctatgacctgcactgcaacaagaggatcctggtggtggtgctgcaggagaagattgctgcctttgacagctgcaccttcaccaagaagttctttgtgaccagctgctacccctgccccggccccaacatgaaccccatcgccctgggcagccgctggctggcctatgcagagaacaagctgatccgctgccaccagagcagaggaggagcctgtggggacaacatccagagctacacagccaccgtcatctctgctgccaagaccctgaagagcggcctgaccatggtgggcaaggtggtgacccagctgaccggcaccctgcccagcggcgtgacagaagatgatgtggccatccacagcaacagccgccgcagccccctggtgcccggcatcatcaccgtcatcgacacagagaccgtgggggagggccaggtgctggtgtctgaggacagcgacagtgatggcatcgtggcccacttccctgcccacgagaagcctgtgtgctgcatggccttcaacaccagcggcatgctgctggtgaccacagacaccctgggccatgacttccacgtgttccagatcctgacccacccctggagcagcagccagtgtgctgtgcaccacctgtacaccctgcacagaggagaaacagaggccaaggtgcaggacatctgcttcagccatgactgccgctgggtggtggtgtccaccctgcggggcaccagccacgtgttccccatcaacccctatggaggccagccctgtgtgaggacccacatgagcccccgggtggtgaacaggatgagccgcttccagaagtctgctggcctggaggagattgagcaggagctgaccagcaagcagggcggccgctgcagccctgtgcccggcctgagcagcagccccagcggcagccccctgcacggcaagctgaacagccaggacagctacaacaacttcaccaacaacaaccctggcaacccccggctgagccccctgcccagcctgatggtggtgatgcccctggcccagatcaagcagcccatgaccctgggcaccatcaccaagaggacaggcaaggtgaagcccccaccccagatcagccccagcaagtccatgggcggggagttctgtgtggccgccatcttcggcaccagccgctcctggtttgccaacaatgccggcctgaagcgggagaaggaccagagcaagcaggtggtggtggagagcctgtacatcatcagctgctacggcaccctggtggagcacatgatggagccccggcccctgagcacagcccccaagatcagtgatgacacccccctggagatgatgaccagcccccgggcctcctggaccctggtgaggaccccccagtggaatgagctgcagccccccttcaatgccaaccaccccctgctgctggccgcagatgctgtgcagtactaccagttcctgctggccggcctggtgcccccaggcagccctggccccatcaccaggcatggcagctatgacagcctggccagtgaccacagcggccaggaggatgaggagtggctgagccaggtggagatcgtgacccacacaggcccccaccggcggctgtggatgggcccccagttccagttcaagaccatccaccccagcggccagaccaccgtcatcagcagcagcagctctgtgctgcagagccacggccccagcgacaccccccagcccctgctggactttgacacagatgacctggacctgaacagcctgcgcatccagcctgtgcggagtgaccctgtgtccatgcctggcagcagcaggcctgtgtctgacagaagaggagtgtccacagtgattgatgctgccagcggcacctttgacagatctgtgaccctgctggaggtgtgtggctcctggccagagggcttcggcctgcggcacatgagctccatggagcacacagaggagggcctgcgggagcggctggctgatgccatggccgagagccccagcagagatgtggtgggcagcggcacagagctgcagcgggagggcagcattgagaccctgagcaacagcagcggcagcaccagcggcagcatccccaggaactttgatggctaccgcagccccctgcccaccaatgaaagccagcccctgagcctcttccccaccggcttcccctag

SEQ ID NO: 20699 - DNA, 2160 bp, synthetic construct; identical to SEQ ID NO: 18876
  source 1..2160: mol_type = other DNA; note = Synthetic coding sequence

SEQ ID NO: 20700 - DNA, 324 bp, synthetic construct
  source 1..324: mol_type = other DNA; note = Synthetic coding sequence
atgtctgtgctgcggcccctggacaagctgcccggcctgaacacagccaccatcctgctggtgggcacagaagatgccctgctgcagcagctggccgacagcatgctgaaggaggactgtgccagcgagctgaaggtgcacctggccaagagcctgcccctgcccagctctgtgaaccggcccagaattgacctgattgtgtttgtggtgaacctgcacagcaagtacagcctgcagaacacagaggagagcctgcggcacgtggatgccagcttcttcctgggcaaggtgtgcttcctggccaccggcggcggccgcctgtag

SEQ ID NO: 20701 - DNA, 1599 bp, synthetic construct
  source 1..1599: mol_type = other DNA; note = Synthetic coding sequence
atgtttgtgctgggcatccccctgtgcccagccctgtccttctctggaggagatgacagccagacccagctgtttgtgagcagcaaggatgtgatcaaggagattgaggactttgacagcctggaggccctgcggctggagggcaacacagtgggcgtggaggccgcccgggtgattgccaaggccctggagaagaagtctgagctgaagcgctgccactggagcgacatgttcaccggccgcctgaggacagagatccccccagccctgatcagcctgggggagggcctcatcacagctggggcccagctggtggagctggacctgagtgacaatgccttcggcccagatggagtgcagggctttgaggccctgctgaagagcagcgcctgcttcaccctgcaggagctgaagctgaacaactgtggcatgggcatcggcggcggcaaggtgattggcaccctggaggaggtgcacatgccccagaatggcatcaaccaccctggcatcacagccctggcccaggcctttgctgtgaaccccctgctgcgggtcatcaacctgaatgacaacaccttcacagagaagggagctgtggccatggccgagaccctgaagaccctgcggcaggtggaggtgatcaactttggagactgcctggtgcgcagcaaaggagctgtggccatcgcagatgccatccggggcggcctgcccaagctgaaggagctgaacctgtccttctgtgagatcaagagagatgctgccctggccgtggccgaggccatggctgacaaggccgagctggagaagctggacctgaatggaaacaccctgggggaggagggctgtgagcagctgcaggaggtgctggagggcttcaacatggccaaggtgctggccagcctgagtgatgatgaagatgaggaggaggaggaggagggggaggaggaggaggaggaggccgaggaggaggaggaggaggatgaggaggaggaggaggaggaggaggaggaggaggaggaggagccccagcagaggggccagggcgagaagagcgccacccccagcaggaagatcctggaccccaacacaggagagcccgcccctgtgctgagcagccccccaccagcagatgtgtccaccttcctggccttccccagccctgagaagctgctgcggctgggccccaagagctctgtgctgattgcccagcagacagacaccagtgaccctgagaaggtggtgtctgccttcctgaaggtgtcctctgtgttcaaggatgaggccaccgtgaggatggctgtgcaggatgctgtggatgccctgatgcagaaggccttcaacagcagcagcttcaacagcaacaccttcctgacccggctgctggtgcacatgggcctgctgaagtctgaggacaaggtgaaggccatcgccaacctgtatggccccctgatggccctgaaccacatggtgcagcaggactacttccccaaggccctggcccccctgctgctggcctttgtgaccaagcccaacagcgccctggagagctgcagctttgcccggcacagcctgctgcagaccctgtacaaggtgtag

SEQ ID NO: 20702 - DNA, 1383 bp, synthetic construct; identical to SEQ ID NO: 19538
  source 1..1383: mol_type = other DNA; note = Synthetic coding sequence

SEQ ID NO: 20703 - DNA, 567 bp, synthetic construct; identical to SEQ ID NO: 19160
  source 1..567: mol_type = other DNA; note = Synthetic coding sequence

SEQ ID NO: 20704 - DNA, 1596 bp, synthetic construct
  source 1..1596: mol_type = other DNA; note = Synthetic coding sequence
atgaacaagaccaaccaggtgtatgctgccaatgaagaccacaacagccagttcattgatgactacagcagcagtgatgagagcctgtctgtgagccacttctccttcagcaagcagagccaccggcccaggaccatccgggacaggaccagcttcagcagcaagctgcccagccacaacaagaagaacagcaccttcatccccaggaagcccatgaagtgcagcaatgagaaggtggtgaaccaggagcagagctatgagagcatggacaagttcctggatggagtgcaggaggtggcctacatccacagcaaccagaatgtgattggcagcagcaaggccgagaaccacatgagccgctgggccgcccatgatgtgtttgagctgaagcagttcagccagctgcctgccaacattgctgtgtgcagcagcaagacctacaaggagaaggtggatgctgacaccctgccccacaccaagaagggccagcagcccagcgagggcagcatcagcctgcccctgtacatcagcaaccctgtgaaccagaagaagaagaaggtgtaccacaccaaccagaccaccttcatcattggagagacccccaagggcatccggaggaagcagtttgaggagatggccagctacttcaacagcagctctgtgaatgaatttgccaagcacatcaccaatgccaccagcgaggagcggcagaagatgctgcgggacttctacgccagccagtacccagaggtgaaggagttctttgtggacagcgtgtcccagttcaacaacagcagctttgagaagggggagcagaggaccaggaagaagagtgacaagcgggagagcctcatcaagccccggctgagtgacagcgagaccctgtccttcaaggacagcaccaacaagatcagccaggtgtgcagcctgaagacctacaagaggaagtctgtgaagttccagaaccacatctcctaccgggaggaggtgttcttcaatgatgctgagaccaagaagagccctgtgagcagcacccaggagattgacagcggcaagaacagccaggccagcgaggacacagtgaccagccgcagcctgaacagcgagagcgagacccgggagcggcggctggagaacaccatgaaggaccagcaggacctgaccaggacaggcatcagcaggaaggagcccctgctgaagctggagaacaagaagattgaaaatcctgtgctggagaacaccagcgtcatcagcctgctgggggacaccagcatcctggatgacctcttcaagagccacggcaacagccccacccagctgcccaagaaggtgctgagcggccccatggagaaggccaagcagaggcccaaggacttctgggacatcctgaatgagcagaatgatgagagcctgagcaagctgacagacctggccgtcatcgagaccctgtgtgagaaggcccccctggccgcccccttcaagagaagagaggagcccgccaccagcctgtggaagagcaatgagaagttcctgtggaagaagttcagccccagcgacacagatgaaaatgccaccaacacccagagcaccacctag

SEQ ID NO: 20705 - DNA, 1089 bp, synthetic construct
  source 1..1089: mol_type = other DNA; note = Synthetic coding sequence
atgacaggccacaccaggagcagcctgccccgctgcacaggaattgtgctgctgatcaagctgcgcttcagcgagcggctgaccggccacctgcacgcccagggcaccccaccctacgtgatcaacctggaccctgctgtgcatgaggtgcccttccctgccaacatcgacatccgggacacagtgaagtacaaggaggtgatgaagcagtatggcctgggccccaacggcggcatcgtgaccagcctgaacctgtttgccaccaggtttgaccaggtgatgaagttcatcgagaaggcccagaacatgagcaaatatgtgctgattgacaccccaggccagatcgaggtgttcacctggagcgccagcggcaccatcatcacagaggccctggccagcagcttccccaccgtggtgatctacgtgatggacaccagccgcagcaccaaccctgtgaccttcatgagcaacatgctgtatgcctgcagcatcctgtacaagaccaagctgcccttcatcgtggtgatgaacaagacagacatcatcgaccacagctttgctgtggagtggatgcaggactttgaggccttccaggatgccctgaaccaggagaccacctacgtgagcaacctgaccaggtccatgagcctggtgctggatgagttctacagcagcctgcgggtggtgggcgtgtctgctgtgctgggcaccggcctggatgagctgtttgtgcaggtgaccagcgctgctgaggagtatgagcgggagtacagaccagaatatgagcggctgaagaagagcctggccaatgctgagagccagcagcagcgggagcagctggagcggctgaggaaggacatgggctctgtggccctggatgctggaacagccaaggacagcctgagccctgtgctgcaccccagcgacctgatcctgacccggggcaccctggatgaggaggatgaggaggccgacagcgacacagatgacatcgaccaccgggtgacagaggagagccatgaggagcccgccttccagaacttcatgcaggagagcatggcccagtactggaagaggaacaacaagtag

SEQ ID NO: 20706 - DNA, 1338 bp, synthetic construct; identical to SEQ ID NO: 19215
  source 1..1338: mol_type = other DNA; note = Synthetic coding sequence

SEQ ID NO: 20707 - DNA, 405 bp, synthetic construct
  source 1..405: mol_type = other DNA; note = Synthetic coding sequence
atgtctgaaaatgctgcccctggcctcatcagcgagctgctgctgcagaggggcaccaccaaggtggccaccggcctggtgctgaacagagaccagaggctggcctgggccgagaacagcattgacttcatcagccgggagctgtgtgcccacagcatcaggaagctgcaggcccacgtgctgctgatcaaggctgtgcacggctactttgacagccggcagaactacagcgagaaggagagcctgtccttcatgattgacaccatgaagagcaccctgaaggagcagttccagtttgtggaggtgcccggcaaccactgtgtgcacatgtctgagccccagcacgtggccagcatcatcagcagcttcctgcagtgcacccacatgctgcctgcccagctgtag

SEQ ID NO: 20708 - DNA, 321 bp, synthetic construct
  source 1..321: mol_type = other DNA; note = Synthetic coding sequence
atgagcagcaagggcagcagcacagatggccgcacagacctggccaacggcagcctgagcagcagccctgaggagatgtctggagctgaggagggccgggagaccagcagcggcatcgaggtggaggccagtgacctgagcctgagcctgactggagatgatggcggccccaacagaaccagcacagagagccggggcacagacacagagagcagcggggaggacaaggacagcgacagcatggaggacaccggccactacagcatcaatgatgagaacagagtgcatgacagaagtgaggaggaggaggaggaggagtag

SEQ ID NO: 20709 - DNA, 990 bp, synthetic construct; identical to SEQ ID NO: 18844
  source 1..990: mol_type = other DNA; note = Synthetic coding sequence

SEQ ID NO: 20710 - DNA, 2235 bp, synthetic construct
  source 1..2235: mol_type = other DNA; note = Synthetic coding sequence
atggccacagccaactttgggaagatccagatcggcatctacgtggagatcaagagaagtgatggccgcatccaccaggccatggtgaccagcctgaatgaagataatgaatctgtgacagtggagtggattgaaaatggagacaccaagggcaaggagattgacctggagagcatcttcagcctgaacccagacctggtgcctgatgaggagattgagcccagccctgagaccccacctcctccagccagcagcgccaaggtgaacaagatcgtgaagaacagaagaacagtggccagcatcaagaatgacccccccagccgggacaacagagtggtgggcagcgcccgggcccggcccagccagtttcctgagcagagcagcagcgcccagcagaatggatctgtgtctgacatcagccctgtgcaggccgccaagaaggagtttggaccacccagcaggaggaagagcaactgtgtgaaggaggtggagaagctgcaggagaagcgggagaagaggcggctgcagcagcaggagctgcgggagaagagggcccaggatgtggatgccaccaaccccaactatgagatcatgtgcatgatccgggacttccggggcagcctggactaccggcccctgaccacagctgaccccattgatgagcaccgcatctgtgtgtgtgtgaggaagaggcccctgaacaagaaggagacccagatgaaggacctggatgtgatcaccatccccagcaaggatgtggtgatggtgcatgagcccaagcagaaggtggacctgacccgctacctggagaaccagaccttccgctttgattatgcctttgatgattctgccccaaatgagatggtgtaccgcttcaccgcccggcccctggtggagaccatctttgagcggggcatggccacctgctttgcctacggccagacaggcagcggcaagacccacaccatgggcggggacttcagcggcaagaaccaggactgcagcaagggcatctatgccctggccgccagagatgtgttcctgatgctgaagaagcccaactacaagaagctggagctgcaggtgtatgccaccttctttgagatctacagcggcaaggtgtttgacctgctgaacaggaagaccaagctgcgggtgctggaggatggcaagcagcaggtgcaggtggtgggcctgcaggagcgggaggtgaagtgtgtggaggatgtgctgaagctgattgacatcggcaacagctgcaggaccagcggccagaccagcgccaatgcccacagcagccgcagccatgctgtgttccagatcatcctgcggaggaagggcaagctgcacggcaagttcagcctgattgacctggccggaaatgaaagaggagctgacaccagcagcgctgaccggcagacccggctggagggcgctgagatcaacaagagcctgctggccctgaaggagtgcatccgggccctgggcaggaacaagccccacacccccttccgggccagcaagctgacccaggtgctgcgggacagcttcatcggggagaacagcaggacctgcatgattgccaccatcagccctggcatggccagctgtgagaacaccctgaacaccctgcgctatgccaacagagtgaaggagtttggcatcagccccagcgacatccccttcagccagggcagcggcagcaggccagacctgagccccagctatgaatatgatgacttcagccccagcgtgaccagggtgaaggagctgactgtggaccccacagctgctggagatgtgcggcccatcatgcaccacccccccaaccagattgatgacctggagacccagtggggcgtgggcagcagcccccagagagatgacctgaagctgctgtgtgagcagaatgaggaggaggtgagcccccagctgttcaccttccatgaagctgtgtcccagatggtggagatggaggagcaggtggtggaggaccacagagctgtgttccaggagagcatccgctggctggaggatgagaaggccctgctggagatgacagaggaggtggactatgatgtggacagctatgccacccagctggaggccatcctggagcagaagattgacatcctgacagagctgcgggacaaggtgaagagcttccgggccgccctgcaggaggaggagcaggccagcaagcagatcaaccccaagaggccccgggccctgtag

SEQ ID NO: 20711 - DNA, 1701 bp, synthetic construct; identical to SEQ ID NO: 18478
  source 1..1701: mol_type = other DNA; note = Synthetic coding sequence

SEQ ID NO: 20712 - DNA, 798 bp, synthetic construct; identical to SEQ ID NO: 18432
  source 1..798: mol_type = other DNA; note = Synthetic coding sequence

SEQ ID NO: 20713 - DNA, 2808 bp, synthetic construct
  source 1..2808: mol_type = other DNA; note = Synthetic coding sequence
atgaatgaggccatggccacagacagcccccggcggcccagccgctgcacaggaggagtggtggtgcggccccaggccgtgacagagcagagctacatggagagcgtggtgaccttcctgcaggatgtggtgccccaggcctacagcggcacccccctgacagaggagaaggagaagatcgtgtgggtgcgctttgaaaatgctgacctgaatgacaccagcaggaacctggagttccacgagatccacagcactggaaatgaaccacccctgctgatcatgattggctacagtgatggcatgcaggtgtggagcatccccatctctggagaggcccaggagctgttctctgtgcgccacggccccatccgggccgcccgcatcctgcctgccccccagtttggagcccagaagtgtgacaactttgctgagaagaggcccctgctgggcgtgtgcaagagcatcggcagcagcggcaccagccccccctactgctgcgtggacctgtacagcctgaggactggagagatggtgaagagcatccagttcaagacccccatctatgacctgcactgcaacaagaggatcctggtggtggtgctgcaggagaagattgctgcctttgacagctgcaccttcaccaagaagttctttgtgaccagctgctacccctgccccggccccaacatgaaccccatcgccctgggcagccgctggctggcctatgcagagaacaagctgatccgctgccaccagagcagaggaggagcctgtggggacaacatccagagctacacagccaccgtcatctctgctgccaagaccctgaagagcggcctgaccatggtgggcaaggtggtgacccagctgaccggcaccctgcccagcggcgtgacagaagatgatgtggccatccacagcaacagccgccgcagccccctggtgcccggcatcatcaccgtcatcgacacagagaccgtgggggagggccaggtgctggtgtctgaggacagcgacagtgatggcatcgtggcccacttccctgcccacgagaagcctgtgtgctgcatggccttcaacaccagcggcatgctgctggtgaccacagacaccctgggccatgacttccacgtgttccagatcctgacccacccctggagcagcagccagtgtgctgtgcaccacctgtacaccctgcacagaggagaaacagaggccaaggtgcaggacatctgcttcagccatgactgccgctgggtggtggtgtccaccctgcggggcaccagccacgtgttccccatcaacccctatggaggccagccctgtgtgaggacccacatgagcccccgggtggtgaacaggatgagccgcttccagaagtctgctggcctggaggagattgagcaggagctgaccagcaagcagggcggccgctgcagccctgtgcccggcctgagcagcagccccagcggcagccccctgcacggcaagctgaacagccaggacagctacaacaacttcaccaacaacaaccctggcaacccccggctgagccccctgcccagcctgatggtggtgatgcccctggcccagatcaagcagcccatgaccctgggcaccatcaccaagaggacaggcaaggtgaagcccccaccccagatcagccccagcaagtccatgggcggggagttctgtgtggccgccatcttcggcaccagccgctcctggtttgccaacaatgccggcctgaagcgggagaaggaccagagcaagcaggtggtggtggagagcctgtacatcatcagctgctacggcaccctggtggagcacatgatggagccccggcccctgagcacagcccccaagatcagtgatgacacccccctggagatgatgaccagcccccgggcctcctggaccctggtgaggaccccccagtggaatgagctgcagccccccttcaatgccaaccaccccctgctgctggccgcagatgctgtgcagtactaccagttcctgctggccggcctggtgcccccaggcagccctggccccatcaccaggcatggcagctatgacagcctggccagtgaccacagcggccaggaggatgaggagtggctgagccaggtggagatcgtgacccacacaggcccccaccggcggctgtggatgggcccccagttccagttcaagaccatccaccccagcggccagaccaccgtcatcagcagcagcagctctgtgctgcagagccacggccccagcgacaccccccagcccctgctggactttgacacagatgacctggacctgaacagcctgcgcatccagcctgtgcggagtgaccctgtgtccatgcctggcagcagcaggcctgtgtctgacagaagaggagtgtccacagtgattgatgctgccagcggcacctttgacagatctgtgaccctgctggaggtgtgtggctcctggccagagggcttcggcctgcggcacatgagctccatggagcacacagaggagggcctgcgggagcggctggctgatgccatggccgagagccccagcagagatgtggtgggcagcggcacagacacagccctggatgtggccgtgaagaccttccccccagagcggcacgtggccgtgaagtgctttgagctgcagcgggagggcagcattgagaccctgagcaacagcagcggcagcaccagcggcagcatccccaggaactttgatggctaccgcagccccctgcccaccaatgaaagccagcccctgagcctcttccccaccggcttcccctag

SEQ ID NO: 20714 - DNA, 615 bp, synthetic construct
  source 1..615: mol_type = other DNA; note = Synthetic coding sequence
atggaggccgccggcagccctgctgccacagagaccgggaagtacatcgccagcacccagaggccagatggcacctggaggaagcagaggagagtgaaggagggctacgtgccccaggaggaggtgcctgtgtatgagaacaagtatgtgaagttcttcaagagcaagccagagctgcccccaggcctgagccctgaggccacagcccctgtgacccccagcaggcctgagggcggggagcccggcctgagcaagacagccaagaggaacctgaagaggaaggagaagaggcggcagcagcaggagaagggggaggccgaggccctgagcaggaccctggacaaggtgtccctggaggagacagcccagctgcccagcgccccccagggcagcagagctgcccccacagctgccagtgaccagcctgacagcgctgccaccacagagaaggccaagaagatcaagaacctgaagaagaagctgcggcaggtggaggagctgcagcagaggatccaggccggggaggtgtcccagcccagcaaggagcagctggagaagctggcccggcggcgggccctggaggaggagctggaggacctggagctgggcctgtag

SEQ ID NO: 20715 - DNA, 663 bp, synthetic construct
  source 1..663: mol_type = other DNA; note = Synthetic coding sequence
atgagcagcggcaactaccagcagagcgaggccctgagcaagcccaccttcagcgaggagcaggccagcgccctggtggagagcgtgtttggcctgaaggtgtccaaggtgcggcccctgcccagctatgatgaccagaacttccacgtgtatgtgtccaagaccaaggatggccccacagaatatgtgctgaagatcagcaacaccaaggccagcaagaacccagacctgattgaggtgcagaaccacatcatcatgttcctgaaggctgctggcttccccacagcctctgtgtgccacaccaagggggacaacacagccagcctggtgtctgtggacagcggcagcgagatcaagagctacctggtgcggctgctgacctacctgcccggccggcccatcgccgagctgcctgtgagcccccagctgctgtatgaaattggcaagctggccgccaagctggacaagaccctgcagcgcttccaccaccccaagctgagcagcctgcaccgggagaacttcatctggaacctgaagaatgtgcccctgctggagaagtacctgtatgccctgggccagaacagaaaccgggagatcgtggagcacgtgatccacctgttcaaggaggaggtgatgaccaagctgagccacttccgggagtag

SEQ ID NO: 20716 - DNA, 603 bp, synthetic construct
  source 1..603: mol_type = other DNA; note = Synthetic coding sequence
atgagcagtgacagcatggaccagcccaggaacccctgtgaaaatgagcccctgaccccaggctaccacggcttccctgcccgggacagccagggcaaccaggagcccaccaccaccccagatgccatggtgcagcccttcaccaccatccccttccccccaccaccccagaatggcatccccacagaatatggagtgccccacacccaggactatgccggccagacaggagagcacaacctgaccctgtatggcagcacccaggcccacggggagcagagcagcaacagccccagcacccagaatggcagcctgacccagacagagggcggggcccagacagatggccagcagagccagacccagagcagtgaaaattctgagagcaagagcacccccaagaggctgcacgtgagcaacatccccttccgcttccgggaccctgacctgcggcagatgtttggccagtttgggaagatcctggatgtggagatcatcttcaatgaaagaggcagcaaaggatttggatttgtgacctttgaaaattctgcagatgctgaccgggcccgggagaagctgcacggcaccgtggtggagggctag

SEQ ID NO: 20717 - DNA, 387 bp, synthetic construct
  source 1..387: mol_type = other DNA; note = Synthetic coding sequence
atggccccagccaagaagggcggggagaagaagaagggccgcagcgccatcaatgaggtggtgacccgggagtacaccatcaacatccacaagaggatccacggcgtgggcttcaagaagagggccccccgggccctgaaggagatcaggaagtttgccatgaaggagatgggcaccccagatgtgagaattgacacccggctgaacaaggctgtgtgggccaagggcatcagaaatgtgccctaccgcatccgggtgcggctgagcaggaagagaaatgaagatgaggacagccccaacaagctgtacaccctggtgacctacgtgcctgtgaccaccttcaagatctctgtgctgaacagcgtgacagtggccaagagcccctag

SEQ ID NO: 20718 - DNA, 393 bp, synthetic construct
  source 1..393: mol_type = other DNA; note = Synthetic coding sequence
atggccccagccaagaagggcggggagaagaagaagggccgcagcgccatcaatgaggtggtgacccgggagtacaccatcaacatccacaagaggatccacggcgtgggcttcaagaagagggccccccgggccctgaaggagatcaggaagtttgccatgaaggagatgggcaccccagatgtgagaattgacacccggctgaacaaggctgtgtgggccaagggcatcagaaatgtgccctaccgcatccgggtgcggctgagcaggaagagaaatgaagatgaggacagccccaacaagctgtacaccctggtgacctacgtgcctgtgaccaccttcaagagcctgcagaatgatgacctcttcaagacagactgccaccaccagtag

SEQ ID NO: 20719 - DNA, 1524 bp, synthetic construct
  source 1..1524: mol_type = other DNA; note = Synthetic coding sequence
atgtggctgaccagctaccccagccccaacttccctgtgtctgtgctgcagaatggagtgaagatgaccaatgaggcccccaagggcctgcgggccaacatcatccgcagctacctgatggaccccatcagtgaccctgagttcttcggcagctgcaagaagccagaggagttcaagaagctgctgtatggcctgtgcttcttccacgccctggtgcaggagaggaggaagtttggccccctgggctggaacatcccctatgagttcaatgaaacagacctgcgcatctctgtgcagcagctgcacatgttcctgaaccagtatgaggagctgccctatgaggccctgcgctacatgaccggggagtgcaactatggaggccgggtgacagatgactgggacaggaggaccctgcggagcatcctgaacaagttcttcaaccctgagctggtggagaacagcgactacaagtttgacagcagcggcatctactttgtgcccccatctggggaccacaagagctacatcgagtacaccaagaccctgcccctgaccccagcccctgagatcttcggcatgaatgccaatgctgacatcaccaaggaccagagcgagacccagctgctgtttgacaacatcctgctgacccagagccgctctgctggagctggggccaagagcagtgatgaggtggtgaatgaggtggccagtgacatcctgggcaagctgcccaacaactttgatattgaagctgccatgaggcgctaccccaccacctacacccagagcatgaacacagtgctggtgcaggagatgggccgcttcaacaagctgctgaagaccatccgggacagctgtgtgaacatccagaaggccatcaagggcctggccgtgatgagcacagacctggaggaggtggtgagcagcatcctgaatgtgaagatccctgagatgtggatgggcaagagctaccccagcctgaagcccctgggcagctatgtgaatgacttcctggcccggctgaagttcctgcagcagtggtatgaggtgggccccccacctgtgttctggctgagcggcttcttcttcacccaggccttcctgactggagcccagcagaactatgccaggaagtacaccatccccatcgacctgctgggctttgattatgaggtgatggaggacaaggagtacaagcaccccccagaagatggagtcttcatccacggcctcttcctggatggagcctcctggaacaggaagatcaagaagctggccgagagccaccccaagatcctgtatgacacagtgcctgtgatgtggctgaagccctgcaagagagctgacatccccaagaggcccagctatgtggcccccctgtacaagaccagcgagcggcggggcgtgctgagcaccaccggccacagcaccaactttgtgattgccatgaccctgcccagcgaccagcccaaggagcactggattggccggggcgtggccctgctgtgccagctgaacagctag

SEQ ID NO: 20720 - DNA, 1683 bp, synthetic construct
  source 1..1683: mol_type = other DNA; note = Synthetic coding sequence
atggccgccagcgccaagaggaagcaggaggagaagcacctgaagatgctgcgggacatgacaggcctgccccacaacaggaagtgctttgactgtgaccagaggggccccacctacgtgaacatgacagtgggcagctttgtgtgcaccagctgcagcggcagcctgcggggcctgaaccccccccaccgggtgaagagcatctccatgaccaccttcacccagcaggagattgagttcctgcagaagcacggcaatgaggtgtgcaagcagatctggctgggcctgtttgatgacaggagcagcgccatcccagacttccgggacccccagaaggtgaaggagttcctgcaggagaagtatgagaagaagcgctggtacgtgcccccagagcaggccaaggtggtggcctctgtgcacgccagcatcagcggcagcagcgccagcagcaccagcagcaccccagaggtgaagcccctgaagagcctgctgggggacagcgcccccaccctgcacctgaacaagggcacccccagccagagccctgtggtgggccgcagccagggccagcagcaggagaagaagcagtttgacctgctgagtgacctgggcagtgacatctttgctgccccagccccccagagcacagccacagccaactttgccaactttgcccacttcaacagccatgctgcccagaacagcgccaatgctgactttgccaactttgatgccttcggccagagcagcggcagcagcaactttggaggcttccccacagccagccacagccccttccagccccagaccactggaggcagcgctgcctctgtgaatgccaactttgcccactttgacaacttccccaagagcagcagcgctgactttggcaccttcaacaccagccagagccaccagacagccagcgctgtgtccaaggtgtccaccaacaaggccggcctgcagacagctgacaagtatgctgccctggccaacctggacaacatcttctctgctggccagggcggggaccagggcagcggcttcggcaccaccgggaaggcccctgtgggctctgtggtgtctgtgcccagccagagcagcgccagcagtgacaagtatgctgccctggccgagctggacagcgtcttcagcagcgctgccaccagcagcaatgcctacaccagcaccagcaatgccagcagcaatgtgtttggaacagtgcctgtggtggccagcgcccagacccagcctgccagcagctctgtgcctgccccctttggagccacccccagcaccaacccctttgtggccgccgccggccccagcgtggccagcagcaccaaccccttccagaccaatgcccggggggccacagctgccacctttggaacagcctccatgtccatgcccaccggcttcggcaccccagccccctacagcctgcccaccagcttcagcggcagcttccagcagcctgccttccctgcccaggccgccttcccccagcagacagccttcagccagcagcccaacggctttgctgccttcggccagaccaagcctgtggtgaccccatttggccaggtggccgctgctggggtgagcagcaaccccttcatgaccggggcccccaccggccagttccccaccggcagcagcagcaccaaccccttcctgtag

SEQ ID NO: 20721 - DNA, 2403 bp, synthetic construct; identical to SEQ ID NO: 20015
  source 1..2403: mol_type = other DNA; note = Synthetic coding sequence

SEQ ID NO: 20722 - DNA, 144 bp, synthetic construct
  source 1..144: mol_type = other DNA; note = Synthetic coding sequence
atggatgaccagcaggccctgaacagcatcatgcaggacctggccgtgctgcacaaggccagcaggcctgccctgagcctgcaggagaccaggaaggccaagagcagcagccccaagaagcagaatgatgtgcgggtgaagtag

SEQ ID NO: 20723 - DNA, 1272 bp, synthetic construct
  source 1..1272: mol_type = other DNA; note = Synthetic coding sequence
atggtgtccttcatgaacaaccagaagcagcagaagcccaccctgagcggccagcgcttcaagaccaggaagagagatgagaaggagagatttgaccccacccagttccaggactgcatcatccagggcctgacagaaacaggaacagacctggaggccgtggccaagttcctggatgccagcggggccaagctggactaccgccgctatgcagagaccctgtttgacatcctggtggccggcggcatgctggcccctgggggcaccctggctgatgacatgatgaggacagatgtgtgtgtgtttgctgcccaggaggacctggagaccatgcaggcctttgcccaggtgttcaacaagctgatccgccgctacaagtacctggagaagggctttgaagatgaggtgaagaagctgctgctcttcctgaagggcttcagcgagagcgagaggaacaagctggccatgctgactggagtgctgctggccaacggcaccctgaatgccagcatcctgaacagcctgtacaatgaaaacctggtgaaggagggcgtgtctgctgcctttgctgtgaagctgttcaagtcctggatcaatgagaaggacatcaatgctgtggccgccagcctgaggaaggtgtccatggacaaccggctgatggagctgtttcctgccaacaagcagagcgtggagcacttcaccaagtacttcacagaggccggcctgaaggagctgtctgaatatgtgaggaaccagcagaccatcggggccaggaaggagctgcagaaggagctgcaggagcagatgagcagaggagaccccttcaaggacatcatcctgtatgtgaaggaggagatgaagaagaacaacatccctgagcctgtggtgattggaattgtgtggagctctgtgatgagcacagtggagtggaacaagaaggaggagctggtggccgagcaggccatcaagcacctgaagcagtacagccccctgctggccgccttcaccacccagggccagagcgagctgaccctgctgctgaagatccaggagtactgctatgacaacatccacttcatgaaggccttccagaagatcgtggtgctcttctacaaggccgaggtgctgtctgaggagcccatcctgaagtggtacaaggatgcccacgtggccaagggcaagtctgtgttcctggagcagatgaagaagtttgtggagtggctgaagaatgctgaggaggagagcgagagcgaggccgaggagggggactag

SEQ ID NO: 20724 - DNA, 1119 bp, synthetic construct; identical to SEQ ID NO: 18490
  source 1..1119: mol_type = other DNA; note = Synthetic coding sequence

SEQ ID NO: 20725 - DNA, 912 bp, synthetic construct
  source 1..912: mol_type = other DNA; note = Synthetic coding sequence
atgatggatgtgtctggagtgggcttccccagcaaggtgccctggaagaagatgtctgctgaggagctggagaaccagtactgccccagccgctgggtggtgcggctgggcgctgaggaggccctgcggacctacagccagatcggcatcgaggccaccacccgggcccgggccaccaggaagagcctgctgcacgtgccctatggagatggagagggggagaaggtggacatctacttcccagatgagagcagcgaggccctgcccttcttcctgttcttccatggaggctactggcagagcggcagcaaggatgaaagtgccttcatggtgcaccccctgacagcccagggcgtggccgtggtgattgtggcctacggcatcgcccccaagggcaccctggaccacatggtggaccaggtgaccaggtctgtggcctttgtgcagaagcgctaccccagcaacaagggcatctacctgtgtggccacagcgctggggcccacctggccgccatgatgctgctggccgactggaccaagcatggagtgacccccaacctgcggggcttcttcctggtgtctggagtgtttgacctggagcccatcgtgtacaccagccagaatgtggccctgcagctgaccctggaggatgcccagaggaacagcccccagctgaaggtggcccaggcccagcctgtggaccccacctgccgggtgctggtggtggtgggccagtttgacagccctgagttccaccggcagagctgggagttctaccagaccctgtgccagggcgagtggaaggccagctttgaggagctgcatgatgtggaccactttgagatcgtggagaacctgacccagaaggacaacgtgctgacccagatcatcctgaagaccatcttccagtag

SEQ ID NO: 20726 - DNA, 684 bp, synthetic construct
  source 1..684: mol_type = other DNA; note = Synthetic coding sequence
atggccctgcatgacatggaggacttcacctttgatggcaccaagaggctgtctgtgaactacgtgaagggcatcctgcagcccacagacacctgtgacatctgggacaagatctggaacttccaggccaagccagatgacctgctgatcagcacctaccccaaggccggcaccacctggacccaggagatcgtggagctgatccagaatgaaggagatgtggagaagagcaagagggcccccacccaccagcgcttccccttcctggagatgaagatccccagcctgggctctgtgtgctggggctcctggcatgaacatgtgaagggctggtgggaggccaaggacaagcaccgcatcctgtacctgttctatgaggacatgaagaagaaccccaagcatgagatccagaagctggccgagttcatcggcaagaagctggatgacaaggtgctggacaagatcgtgcactacaccagctttgatgtgatgaagcagaaccccatggccaactacagcagcatcccagctgagatcatggaccacagcatcagccccttcatgaggaaaggagctgtgggggactggaagaagcacttcaccgtggcccagaatgaaagatttgatgaggactacaagaagaagatgacagacacccggctgaccttccacttccagttctag

SEQ ID NO: 20727 - DNA, 366 bp, synthetic construct
  source 1..366: mol_type = other DNA; note = Synthetic coding sequence
atggccccagccaagaagggcggggagaagaagaagggccgcagcgccatcaatgaggtggtgacccgggagtacaccatcaacatccacaagaggatccacggcgtgggcttcaagaagagggccccccgggccctgaaggagatcaggaagtttgccatgaaggagatgggcaccccagatgtgagaattgacacccggctgaacaaggctgtgtgggccaagggcatcagaaatgtgccctaccgcatccgggtgcggctgagcaggaagagaaatgaagatgaggacagccccaacaagctgtacaccctggtgacctacgtgcctgtgaccaccttcaagagcaagttcagcatcccctag

SEQ ID NO: 20728 - DNA, 267 bp, synthetic construct
  source 1..267: mol_type = other DNA; note = Synthetic coding sequence
ctgtccttccgggctgacagcgcccacgcctccatggtgaatgtgcccaagaccaggaggaccttctgcaagaagtgtgggaagcaccagccccacaaggtgacccagtacaagaagggcaaggacagcctgtatgcccagggcaagagaagatatgacaggaagcagagcggctatggaggccagaccaagcccatcttcaggaagaagctgcaccagaactgcatcgagcccaacctgcccccccgggcccagcagagcccctag

SEQ ID NO: 20729 - DNA, 582 bp, synthetic construct
  source 1..582: mol_type = other DNA; note = Synthetic coding sequence
atggacagcaccctggccgtgcagcagtacatccagcagaacatccgggctgactgcagcaacatcgacaagatcctggagcccccagagggccaggatgaaggagtgtggaagtatgagcacctgcggcagttctgcctggagctgaatggcctggccgtgaagctgcagagcgagtgccacccagacacctgcacccagatgacagccacagagcagtggatcttcctgtgtgccgcccacaagacccccaaggagtgcccagccatcgactacaccaggcacaccctggatggagctgcctgcctgctgaacagcaacaagtacttccccagccgggtgtccatcaaggagagctctgtggccaagctgggctctgtgtgccgccgcatctaccgcatcttcagccacgcctacttccaccaccggcagatctttgatgaatatgaaaatgagaccttcctgtgccaccgcttcaccaagtttgtgatgaagtacaacctgatgagcaaggacaacctgattgtgcccatcctggaggaggaggtgcagaacagcgtgtctggagagagcgaggcctag

SEQ ID NO: 20730 - DNA, 4137 bp, synthetic construct
  source 1..4137: mol_type = other DNA; note = Synthetic coding sequence
atgagcctggagcgggagctgcggcagctgagcaaggccaaggccaaggcccagagagctggccagaggcgggaggaggccgccctgtgccaccagctgggggagctgctggccggccacggccgctatgcagaggccctggagcagcactggcaggagctgcagctgcgggagcgggcagatgaccccctgggctgtgctgtggcccacaggaagattggagagcggctggccgagatggaggactacccagctgccctgcagcaccagcaccagtacctggagctggcccacagcctgaggaaccacacagagctgcagagggcctgggccaccatcggccgcacccacctggacatctatgaccactgccagagcagagatgccctgctgcaggcccaggccgcctttgagaagagcctggccatcgtggatgaggagctggagggcaccctggcccagggcgagctgaatgagatgaggacccggctgtacctgaacctgggcctgacctttgagagcctgcagcagacagccctgtgcaatgactacttcaggaagagcatcttcctggccgagcagaaccacctgtatgaagatctcttccgggcccgctacaacctgggcaccatccactggagggctggccagcacagccaggccatgcgctgcctggagggcgcccgggagtgtgcccacaccatgaggaagcgcttcatggagagcgagtgctgcgtggtgattgcccaggtgctgcaggacctgggggacttcctggccgccaagagggccctgaagaaggcctaccgcctgggcagccagaagcctgtgcagagagctgccatctgccagaacctgcagcacgtgctggccgtggtgcggctgcagcagcagctggaggaggccgagggccgggacccccagggcgccatggtgatctgtgagcagctgggggacctcttcagcaaggccggggacttccccagggctgctgaggcctaccagaagcagctgcgctttgctgagctgctggacaggcctggagctgagcgggccatcatccacgtgtccctggccaccaccctgggggacatgaaggaccaccacggggctgtgcgccactatgaggaggagctgcggctgcggtctggaaatgtgctggaggaggccaagacctggctgaacatcgccctgagccgggaggaggccggagatgcctatgagctgctggccccctgcttccagaaggccctgagctgtgcccagcaggcccagaggccccagctgcagaggcaggtgctgcagcacctgcacacagtgcagctgcggctgcagccccaggaggcccctgagacagagacccggctgcgggagctgtctgtggctgaagatgaagatgaggaggaggaggccgaggaggccgccgccacagctgagagcgaggccctggaggccggggaggtggagctgtctgagggggaggatgacacagatggcctgaccccccagctggaggaggatgaggagctgcagggccacctgggccgcaggaagggcagcaagtggaacagaagaaatgacatgggagagaccctgctgcaccgggcctgcatcgagggccagctgcggcgggtgcaggacctggtgcggcagggccaccccctgaacccccgggactactgcggctggacccccctgcacgaggcctgcaactacggccacctggagatcgtgcgcttcctgctggaccacggggctgctgtggatgatcctgggggccagggctgtgagggcatcacccccctgcatgatgccctgaactgtggccactttgaggtggccgagctgctgctggagcggggggcctctgtgaccctgcggaccaggaagggcctgagccccctggagaccctgcagcagtgggtgaagctgtaccgccgggacctggacctggagacccggcagaaggcccgggccatggagatgctgctgcaggccgccgccagcggccaggacccccacagcagccaggccttccacacccccagcagcctgctgtttgatcctgagaccagcccccccctgagcccctgcccagagccccccagcaacagcacccggctgcctgaggccagccaggcccacgtgcgggtgtccccaggccaggccgccccagccatggcccggcccaggaggagcagacatggccctgccagcagcagcagcagcagtgaaggagaagattctgctggccctgcccggcccagccagaagaggccccgctgcagcgccacagcccagagggtggccgcctggaccccaggccctgccagcaaccgggaggccgccacagccagcaccagccgggccgcctaccaggccgccatccggggcgtgggcagcgcccagagccggctgggccctggccccccccggggccacagcaaggccctggccccccaggccgccctgatccctgaggaggagtgcctggccggggactggctggagctggacatgcccctgaccaggagccggcggccccggccccggggcactggagacaacagaagacccagcagcaccagcggcagtgacagcgaggagagccggccccgggcccgggccaagcaggtgcggctgacctgcatgcagagctgcagcgcccctgtgaatgccggccccagcagcctggccagcgagcccccaggcagccccagcaccccccgggtgtctgagcccagcggggacagcagcgctgctggccagcccctgggccctgcccctcctccacccatccgggtgcgggtgcaggtgcaggaccacctgttcctgatccctgtgccccacagcagtgacacccacagcgtggcctggctggccgagcaggccgcccagcgctactaccagacctgtggcctgctgccccggctgaccctgaggaaggagggcgccctgctggccccccaggacctgatcccagatgtgctgcagagcaatgatgaggtgctggccgaggtgacctcctgggacctgccccccctgacagaccgctaccgccgggcctgccagagcctgggccagggcgagcaccagcaggtgctgcaggccgtggagctgcagggcctgggcctgtccttcagcgcctgcagcctggccctggaccaggcccagctgacccccctgctgcgggccctgaagctgcacacagccctgcgggagctgcggctggccggcaaccggctgggggacaagtgtgtggccgagctggtggccgccctgggcaccatgcccagcctggccctgctggacctgagcagcaaccacctgggccctgagggcctgcggcagctggccatgggcctgcccggccaggccaccctgcagagcctggaggagctggacctgtccatgaaccccctgggagatggctgcggccagagcctggccagcctgctgcacgcctgccccctgctgagcaccctgcggctgcaggcctgtggcttcggccccagcttcttcctgagccaccagacagccctgggcagcgccttccaggatgctgagcacctgaagaccctgagcctgagctacaatgccctgggcgccccagccctggcccggaccctgcagagcctgcctgctggcaccctgctgcacctggagctgagctctgtggccgccggcaagggggacagcgacctgatggagcccgtcttccgctacctggccaaggagggctgtgccctggcccacctgaccctgagcgccaaccacctgggggacaaggctgtgcgggacctgtgccgctgcctgagcctgtgccccagcctcatcagcctggacctgagcgccaaccctgagatcagctgtgccagcctggaggagctgctgagcaccctgcagaagaggccccagggcctgtccttcctgggcctgagcggctgtgctgtgcagggccccctgggcctgggcctgtgggacaagattgctgcccagctgcgggagctgcagctgtgcagccggcggctgtgtgctgaagatagagatgccctgcggcagctgcagcccagccggcccggccctggagagtgcaccctggaccacggcagcaagctgttcttccggcggctgtag

SEQ ID NO: 20731 - DNA, 1218 bp, synthetic construct
  source 1..1218: mol_type = other DNA; note = Synthetic coding sequence
atgaactaccagcagcagctggccaacagcgctgccatccgggcagagatccagagatttgagagcgtgcaccccaacatctacagcatctatgagctgctggagcgggtggaggagcctgtgctgcagaaccagatccgggagcacgtgattgccattgaagatgcctttgtgaacagccaggagtggaccctgagccgctctgtgcctgagctgaaggtgggcatcgtgggcaacctggccagcggcaagagcgccctggtgcaccgctacctgaccggcacctacgtgcaggaggagagccctgagggcggccgcttcaagaaggagatcgtggtggatggccagagctacctgctgctgatcagagatgagggcggccccccagaggcccagtttgccatgtgggtggatgctgtgatctttgtgttcagcctggaggatgagatctccttccagacagtgtaccactactacagcaggatggccaactacagaaacaccagcgagatccccctggtgctggtgggcacccaggatgccatcagcagcgccaacccccgggtgattgatgatgcccgggccaggaagctgagcaatgacctgaagcgctgcacctactatgagacctgtgccacctacggcctgaatgtggagagggtcttccaggatgtggcccagaagatcgtggccaccaggaagaagcagcagctgagcatcggcccctgcaagagcctgcccaacagccccagccacagctctgtgtgcagcgcccaggtgtctgctgtgcacatcagccagaccagcaatggaggcggcagcctgagtgactacagcagctctgtgcccagcacccccagcaccagccagaaggagctgagaattgatgtgcccccaacagccaacacccccacccctgtgaggaagcagagcaagagaagaagcaacctcttcaccagcaggaagggcagtgaccctgacaaggagaagaagggcctggagagcagagctgacagcatcggcagcggccgggccatccccatcaagcagggcctgcccttctttgtgctggccctgacagccagcacctacctgcggcctgctggggcccgggcccggcagagcagcccctggccaggcccccggggcggccagaccagcccccactgtgccgagggcccccagagcgcccagctgagcggggccatgatgaactag

SEQ ID NO: 20732 - DNA, 1245 bp, synthetic construct; identical to SEQ ID NO: 18327
  source 1..1245: mol_type = other DNA; note = Synthetic coding sequence

SEQ ID NO: 20733 - DNA, 645 bp, synthetic construct
  source 1..645: mol_type = other DNA; note = Synthetic coding sequence
atgggccccctgcccaggacagtggagctgttctatgatgtgctgagcccctacagctggctgggctttgagatcctgtgccgctaccagaacatctggaacatcaacctgcagctgcggcccagcctcatcaccggcatcatgaaggacagcggcaacaagcccccaggcctgctgcccaggaagggcctgtacatggccaatgacctgaagctgctgcggcaccacctgcagatccccatccacttccccaaggacttcctgtctgtgatgctggagaagggcagcctgagcgccatgaggttcctgacagctgtgaacctggagcaccctgagatgctggagaaggccagccgggagctgtggatgagggtgtggagcagagctgctgagaaggccggcatgtctgctgagcaggcccagggcctgctggagaagatcgccacccccaaggtgaagaaccagctgaaggagaccacagaggccgcctgccgctacggggccttcggcctgcccatcaccgtggcccacgtggatggccagacccacatgctgtttggaagtgacaggatggagctgctggcccacctgctgggggagaagtggatgggccccatccccccagctgtgaatgcccggctgtag

SEQ ID NO: 20734 - DNA, 4206 bp, synthetic construct
  source 1..4206: mol_type = other DNA; note = Synthetic coding sequence
atggctgacacagacctcttcatggagtgtgaggaggaggagctggagccctggcagaagatcagtgatgtgattgaggacagcgtggtggaggactacaacagcgtggacaagaccaccaccgtgtctgtgtcccagcagcctgtgtctgcccctgtgcccatcgccgcccacgcctctgtggccggccacctgagcaccagcaccaccgtgagcagcagcggggcccagaacagcgacagcaccaagaagaccctggtgaccctcatcgccaacaacaatgccggcaaccccctggtgcagcagggcggccagcccctcatcctgacccagaacccagcccctggcctgggcaccatggtgacccagcctgtgctgcggcctgtgcaggtgatgcagaatgccaaccacgtgaccagcagccctgtggccagccagcccatcttcatcaccacccagggcttccctgtgagaaatgtgcggcctgtgcagaatgccatgaaccaggtgggcatcgtgctgaatgtgcagcagggccagacagtgcggcccatcaccctggtgcctgcccctggcacccagtttgtgaagcccaccgtgggcgtgccccaggtgttcagccagatgacccctgtgcggcccggcagcaccatgcctgtgcggcccaccaccaacaccttcaccaccgtcatcccagccaccctgaccatccgcagcacagtgccccagagccagagccagcagaccaagagcacccccagcaccagcaccacccccacagccacccagcccaccagcctgggccagctggccgtgcagagccctggccagagcaaccagaccaccaaccccaagctggtgtccatcgccagctttgtgacagtgaagaggcctggggtgactggagagaacagcaatgaggtggccaagctggtgaacaccctgaacaccatccccagcctgggccagagccctggccctgtggtggtgagcaacaacagcagcgcccacggcagccagaggaccagcggccctgagagctccatgaaggtgaccagcagcatccctgtgtttgacctgcaggacggcggcaggaagatctgcccccgctgcaatgcccagttccgggtgacagaggccctgcggggccacatgtgctactgctgcccagagatggtggagtaccagaagaagggcaagagcctggacagcgagcccagcgtgcccagcgctgccaagccacccagccctgagaagacagcccctgtggccagcacccccagcagcacccccatcccagccctgagcccccccaccaaggtgcctgagcccaatgaaaatgtgggagatgctgtgcagaccaagctgatcatgctggtggatgacttctactacggcagagatggcggcaaggtggcccagctgaccaacttccccaaggtggccaccagcttccgctgcccccactgcaccaagaggctgaagaacaacatccgcttcatgaaccacatgaagcaccacgtggagctggaccagcagaatggagaggtggatggccacaccatctgccagcactgctaccggcagttcagcacccccttccagctgcagtgccacctggagaatgtgcacagcccctatgagagcaccaccaagtgcaagatctgtgagtgggcctttgagagcgagcccctcttcctgcagcacatgaaggacacccacaagccaggagagatgccctacgtgtgccaggtgtgccagtaccgcagcagcctgtacagcgaggtggatgtgcacttcaggatgattcatgaggacaccaggcacctgctgtgcccctactgcctgaaggtgttcaagaatggaaatgccttccagcagcactacatgaggcaccagaagagaaatgtgtaccactgcaacaagtgccgcctgcagttcctgtttgccaaggacaagattgagcacaagctgcagcaccacaagaccttcaggaagcccaagcagctggagggcctgaagccaggcaccaaggtgaccatccgggccagccggggccagcccaggacagtgcctgtgagcagcaatgacaccccaccttctgccctgcaggaggccgcccccctgaccagctccatggaccccctgcctgtgttcctgtacccacctgtgcagaggagcatccagaagagagctgtgaggaagatgtctgtgatgggccggcagacctgcctggagtgcagctttgagatcccagacttccccaaccacttccccacctacgtgcactgcagcctgtgccgctacagcacctgctgcagccgggcctatgccaaccacatgatcaacaaccacgtgcccaggaagagccccaagtacctggccctcttcaagaacagcgtgtctggcatcaagctggcctgcaccagctgcacctttgtgacctctgtgggagatgccatggccaagcacctggtgttcaaccccagccacaggagcagcagcatcctgccccggggcctgacctggatcgcccacagcagacatggccagacccgggacagagtgcatgacagaaatgtgaagaacatgtacccacctccttccttccccaccaacaaggccgccaccgtgaagtctgctggggccaccccagctgagcctgaggagctgctgacccccctggccccagccctgcccagccctgccagcacagccaccccaccacccacccccacccacccccaggccctggccctgccccccctggccacagaaggagcagaatgtctgaatgtggatgaccaggatgagggcagccctgtgacccaggagcctgagctggccagcggcggcggcggcagcggaggagtgggcaagaaggagcagctgtctgtgaagaagctgcgggtggtgctgtttgccctgtgctgcaacacagagcaggccgctgagcacttcaggaacccccagaggcgcatccgccgctggctgcggcgcttccaggccagccagggcgagaacctggagggcaagtacctgagctttgaggccgaggagaagctggccgagtgggtgctgacccagcgggagcagcagctgcctgtgaatgaggagaccctcttccagaaggccaccaagattggccgcagcctggagggcggcttcaagatctcctatgagtgggccgtgcgcttcatgctgcggcaccacctgacccctcatgccaggagagctgtggcccacaccctgcccaaggatgtggccgagaatgccggcctcttcatcgactttgtgcagaggcagatccacaaccaggacctgcccctgtccatgattgtggccattgatgagatcagcctcttcctggacacagaggtgctgagcagtgatgacagaaaagaaaatgccctgcagacagtgggcactggagagccctggtgtgatgtggtgctggccatcctggctgatggcaccgtgctgcccaccctggtgttctaccggggccagatggaccagcctgccaacatgccagacagcatcctgctggaggccaaggagagcggctacagtgatgatgagatcatggagctgtggagcaccagggtgtggcagaagcacacagcctgccagaggagcaagggcatgctggtgatggactgccacaggacccacctgtctgaggaggtgctggccatgctgagcgccagcagcaccctgcctgctgtggtgcctgctggctgcagcagcaagatccagcccctggatgtgtgcatcaagaggacagtgaagaacttcctgcacaagaagtggaaggagcaggcccgggagatggctgacacagcctgtgacagtgatgtgctgctgcagctggtgctggtgtggctgggggaggtgctgggcgtgattggagactgcccagagctggtgcagaggagcttcctggtggcctctgtgctgcccggcccagatggcaacatcaacagccccaccagaaatgctgacatgcaggaggagctgattgccagcctggaggagcagctgaagctgtctggagagcacagcgagagcagcaccccccggcccaggagcagccctgaggagaccatcgagcctgagagcctgcaccagctgtttgaaggagagagcgagacagagagcttctacggctttgaggaggccgacctggacctgatggagatctag

SEQ ID NO: 20735 - DNA, 1398 bp, synthetic construct; identical to SEQ ID NO: 18495
  source 1..1398: mol_type = other DNA; note = Synthetic coding sequence

SEQ ID NO: 20736 - DNA, 3210 bp, synthetic construct
  source 1..3210: mol_type = other DNA; note = Synthetic coding sequence
atgtacctgctggatggcagcggggagcccgccagccccccagcagatgccatgccccggggcaccccacccaggaagacagtgtaccgcatctctgtgaccatggtgaggaaggagcagctggccgcccctggcagcggcggccctgaccccaggcctgtgagaagacccaggcctgcccggagcccagatgcccctggccgcctggaggaggaggccgaggaggccgagggcgctgaggagcctgagggcccccggccccgggcctgggacttccgcaccttccgcaccaggagcacaggccagctggagctgggccgcctgcggccctgtgcccggggcctggagcctgctgacctggccggcagcgccccagctgaggaggagggccggggcagccctgccagcggcagcccagatgtggagggcgcccgggccgcccccctgcggcgcagcctgtccttccgccactggagcggccctgaggccccccagggccgcaccctgggcggcggcagaagacacagcagcagcggcagcctggcctgggccccctgtgatgaagctgctgctggcaccaccctggagcccgccacagccacccagcctgccagcgagaagaggaacaccctggatgtgggggaggtgctgagcaagaatgatgccctgagtgacctggagcgctgggagaggagcaagagcaagaacagaaccctggacaacagcgacctgcagaggctggagcgggcccgggctgctgctggggccggggccgccagcgagcaccggctgctgcgcttcttcagcggcatctttgccaggagagatggcggccctgggggcggccccagccccaggtctggggccagccggccccggggctacttcagcctgcggcgggccccagctgaggcccacagcagcagcgctgagagcattgatggcagccccaggagagatgcctttgtgaacagccaggagtggaccctgagccgctctgtgcctgagctgaaggtgggcatcgtgggcaacctggccagcggcaagagcgccctggtgcaccgctacctgaccggcacctacgtgcaggaggagagccctgagggcggccgcttcaagaaggagatcgtggtggatggccagagctacctgctgctgatcagagatgaaggaggccccccagaggcccagtttgccatgtgggtggatgctgtgatctttgtgttcagcctggaggatgagatctccttccagacagtgtaccactactacagcaggatggccaactacagaaacaccagcgagatccccctggtgctggtgggcacccaggatgccatcagcagcgccaacccccgggtgattgatgatgcccgggccaggaagctgagcaatgacctgaagcgctgcacctactatgagacctgtgccacctacggcctgaatgtggagagggtcttccaggatgtggcccagaagatcgtggccaccaggaagaagcagcagctgagcatcggcccctgcaagagcctgcccaacagccccagccacagctctgtgtgcagcgcccaggtgtctgctgtgcacatcagccagaccagcaatggaggcggcagcctgagtgactacagcagctctgtgcccagcacccccagcaccagccagaaggagctgagaattgatgtgcccccaacagccaacacccccacccctgtgaggaagcagagcaagaggaggagcaacctcttcaccagcaggaaaggaagtgaccctgacaaggagaagaagggcctggagagcagagctgacagcatcggcagcggccgggccatccccatcaagcagggcatgctgctgaagaggtctgggaagagcctgaacaaggagtggaagaagaagtatgtgaccctgtgtgacaacggggtgctgacctaccaccccagcctgcatgactacatgcagaatgtgcacggcaaggagattgacctgctgcggaccaccgtgaaggtgcctgggaagaggcctccccgggccaccagcgcctgtgcccccatcagcagccccaagaccaacggcctgagcaaggacatgagcagcctgcacatcagccccaacagcgacaccggcctgggggacagcgtgtgcagcagccccagcatcagcagcaccaccagccccaagctggaccccccacccagcccccacgccaacaggaagaagcacaggaggaagaagagcaccagcaacttcaaggcagatggcctgagcggcacagctgaggagcaggaggagaactttgagttcatcatcgtgtccctgaccggccagacctggcactttgaggccaccacctatgaggagagagatgcctgggtgcaggccatcgagagccagatcctggccagcctgcagagctgtgagagcagcaagaacaagagccggctgaccagccagagcgaggccatggccctgcagagcatccggaacatgaggggcaacagccactgtgtggactgtgagacccagaaccccaactgggccagcctgaacctgggcgccctgatgtgcatcgagtgcagcggcatccacaggaacctgggcacccacctgagccgggtgcgcagcctggacctggatgactggcctgtggagctgatcaaggtgatgagcagcattggaaatgagctggccaacagcgtgtgggaggagagcagccagggccgcaccaagcccagcgtggacagcacccgggaggagaaggagcgctggatccgggccaagtatgagcagaagctgttcctggcccccctgccctgcacagagctgagcctgggccagcacctgctgcgggccacagcagatgaggacctgaggacagccatcctgctgctggcccacggcagcagagatgaggtgaatgagacctgtggggagggagatggccgcacagccctgcacctggcctgcaggaaaggaaatgtggtgctggcccagctgctgatctggtatggagtggatgtgacagccagagatgcccacggcaacacagccctggcctatgcccggcaggccagcagccaggagtgcattgatgtgctgctgcagtatggctgcccagatgaaagatttgtgctgatggccacccccaacctgagcagaagaaacaacaacagaaacaacagcagcggccgggtgcccaccatcatctag

SEQ ID NO: 20737 - DNA, 1260 bp, synthetic construct
  source 1..1260: mol_type = other DNA; note = Synthetic coding sequence
atgaacaaccagaagcagcagaagcccaccctgagcggccagcgcttcaagaccaggaagagagatgagaaggagagatttgaccccacccagttccaggactgcatcatccagggcctgacagaaacaggaacagacctggaggccgtggccaagttcctggatgccagcggggccaagctggactaccgccgctatgcagagaccctgtttgacatcctggtggccggcggcatgctggcccctgggggcaccctggctgatgacatgatgaggacagatgtgtgtgtgtttgctgcccaggaggacctggagaccatgcaggcctttgcccaggtgttcaacaagctgatccgccgctacaagtacctggagaagggctttgaagatgaggtgaagaagctgctgctcttcctgaagggcttcagcgagagcgagaggaacaagctggccatgctgactggagtgctgctggccaacggcaccctgaatgccagcatcctgaacagcctgtacaatgaaaacctggtgaaggagggcgtgtctgctgcctttgctgtgaagctgttcaagtcctggatcaatgagaaggacatcaatgctgtggccgccagcctgaggaaggtgtccatggacaaccggctgatggagctgtttcctgccaacaagcagagcgtggagcacttcaccaagtacttcacagaggccggcctgaaggagctgtctgaatatgtgaggaaccagcagaccatcggggccaggaaggagctgcagaaggagctgcaggagcagatgagcagaggagaccccttcaaggacatcatcctgtatgtgaaggaggagatgaagaagaacaacatccctgagcctgtggtgattggaattgtgtggagctctgtgatgagcacagtggagtggaacaagaaggaggagctggtggccgagcaggccatcaagcacctgaagcagtacagccccctgctggccgccttcaccacccagggccagagcgagctgaccctgctgctgaagatccaggagtactgctatgacaacatccacttcatgaaggccttccagaagatcgtggtgctcttctacaaggccgaggtgctgtctgaggagcccatcctgaagtggtacaaggatgcccacgtggccaagggcaagtctgtgttcctggagcagatgaagaagtttgtggagtggctgaagaatgctgaggaggagagcgagagcgaggccgaggagggggactag

SEQ ID NO: 20738 - DNA, 2769 bp, synthetic construct; identical to SEQ ID NO: 19914
  source 1..2769: mol_type = other DNA; note = Synthetic coding sequence

SEQ ID NO: 20739 - DNA, 363 bp, synthetic construct
  source 1..363: mol_type = other DNA; note = Synthetic coding sequence
atggccccagccaagaagggcggggagaagaagaagggccgcagcgccatcaatgaggtggtgacccgggagtacaccatcaacatccacaagaggatccacggcgtgggcttcaagaagagggccccccgggccctgaaggagatcaggaagtttgccatgaaggagatgggcaccccagatgtgagaattgacacccggctgaacaaggctgtgtgggccaagggcatcagaaatgtgccctaccgcatccgggtgcggctgagcaggaagagaaatgaagatgaggacagccccaacaagctgtacaccctggtgacctacgtgcctgtgaccaccttcaagaactgccaccaccagtag

SEQ ID NO: 20740 - DNA, 378 bp, synthetic construct; identical to SEQ ID NO: 18771
  source 1..378: mol_type = other DNA; note = Synthetic coding sequence

SEQ ID NO: 20741 - DNA, 1500 bp, synthetic construct
  source 1..1500: mol_type = other DNA; note = Synthetic coding sequence
atgagcaccccatctggcatcagcacctggctgagcctgcctgtgtccaccccagccagcatcaccagcatccgggtgacccagaagagcagcggcccctgggccttcagcagctgcacctacgtgtctggccctggggtgtgcatcagcagcctgagctgcagccgggtgggcagcagcagcttccggggcggcctgggcggcggctacggcggggccagcggcatgggcggcatcatcgccatcatggtgaaccagagcctgctgagccccctgaacctggaggtggaccccaacatccaggccgtgtgcacccaggagaaggagcagatcaagaccctgaacaacaagtttgccagcttcatcgacaaggtgtggttcctggagcagcagaacaaggtgctggagaccaagtggagcctgctgcagcagcagaagatggcccggagcaacatggacaacatgctggagagctacatcaacaacctgcggcggcagctggagaccctgggccaggagaagctgaagctggaggccgagctgggcaacatgcagggcctgggggaggacttcaagaacaagtatgaagatgagatcaacaagcacacagaggtggagaatgaatttgtgctgatcaagaaggatgtggatgaggcctacatgaacaaggccgagctggagagcctgctggagggcctgacagatgagatcaacttcctgcggcagctgtatgaggaggagatccgggagctgcagagccagatcagtgacatgtccatggtgctgtccatggactacagctgcagccgggacatggacagcatcatccctgaggtgaaggtgcagtatgaggagatcgccaactgcagcagagctgaggccgagagcatgtaccagatcaagtatgaggagctgcagaccctggccggcaagtatggagatgacctgagcaggaccaagacagagatcagcgagatgaacagaaacatctcctggctgcaggccgagacagagggcctgaagggccagagggccagcctggaggccgccatcacagatgctgagcagagaggagagctggccgtgaaggatgccaatgccaagctgtctgagctggaggccgccctgcagagggccaagcaggacatgatgggccagctgcgggagtaccaggagctgatgaatgtgggcctgaccctggacatcgagatcgccacctacaggaagctgctggagggggaggagagccggctggagagcggcatgcagaatgtgtccatccacaccaagaccaccagcagctatgctgggggcctgagcagcgcctatggaggcctgaccagccctggcatcatctaccgcctgggcagcagctttggatctgctgctggcagcagcagcttcagcaggaccagcagcaccagggctgtggtggtgaggaagattgagacccatgatggcaagctggagagcgagagcagtgatgtgctgagcaagtag

SEQ ID NO: 20742 - DNA, 504 bp, synthetic construct
  source 1..504: mol_type = other DNA; note = Synthetic coding sequence
atgtacatgggcatgatgtgcacagccaagaagtgtggcatccgcttccagcccccagccatcatcctgatctatgaaagtgagatcaagggcaagatccggcagaggatcatgcctgtgaggaacttcagcaagttcagtgactgcaccagggctgctgagcagctgaagaacaaccccaggcacaagagctacctggagcaggtgtccctgcggcagctggagaagctgttctccttcctgcggggctacctgagcggccagagcctggccgagaccatggagcagatccagcgggagaccaccattgatcctgaggaggacctgaacaagctggatgacaaggagctggccaagaggaagagcatcatggatgagctgtttgagaagaaccagaagaagaaggatgaccccaactttgtgtatgacatcgaggtggagttcccccaggatgaccagctgcagagctgtggctgggacacagaatctgcagatgagttctag

SEQ ID NO: 20743 - DNA, 378 bp, synthetic construct; identical to SEQ ID NO: 18497
  source 1..378: mol_type = other DNA; note = Synthetic coding sequence

SEQ ID NO: 20744 - DNA, 1005 bp, synthetic construct
  source 1..1005: mol_type = other DNA; note = Synthetic coding sequence
atgaccaggagcctcttcaagggcaacttctggagcgctgacatcctgagcaccatcggctatgacaacatcatccagcacctgaacaacggcaggaagaactgcaaggagtttgaggacttcctgaaggagcgggccgccatcgaggagagatatggcaaggacctgctgaacctgagcaggaagaagccctgtggccagagcgagatcaacaccctgaagagggccctggaggtgttcaagcagcaggtggacaacgtggcccagtgccacatccagctggcccagagcctgcgggaggaggccaggaagatggaggagttccgggagaagcagaagctgcagaggaagaagacagagctgatcatggatgccatccacaagcagaagagcctgcagttcaagaagaccatggatgccaagaagaactatgagcagaagtgccgggacaaggatgaggccgagcaggccgtgagccgcagcgccaacctggtgaaccccaagcagcaggagaagctgtttgtgaagctggccaccagcaagacagctgtggaggacagcgacaaggcctacatgctgcacatcggcaccctggacaaggtgcgggaggagtggcagagcgagcacatcaaggcctgtgaggcctttgaggcccaggagtgtgagcgcatcaacttcttcagaaatgccctgtggctgcacgtgaaccagctgagccagcagtgtgtgaccagtgatgagatgtatgagcaggtgaggaagagcctggagatgtgcagcatccagagggacatcgagtactttgtgaaccagaggaagacaggccagatccccccagcccccatcatgtatgagaacttctacagcagccagaagaatgctgtgcctgctgggaaggccaccggccccaacctggcccggcggggccccctgcccatccccaagagcagcccagatgaccccaactacagcctggtggatgactacagcctgctgtaccagtag

SEQ ID NO: 20745 - DNA, 597 bp, synthetic construct
  source 1..597: mol_type = other DNA; note = Synthetic coding sequence
atgaagaaggtgcggctgaaggagctggagagccggctgcagcaggtggatggctttgagaagcccaagctgctgctggagcagtaccccacccggccccacatcgccgcctgcatgctgtacaccatccacaacacctatgatgacatcgagaacaaggtggtggccgacctgggctgcggctgcggcgtgctgagcattggaacagccatgctgggcgccggcctgtgtgtgggctttgatattgatgaagatgccctggagatcttcaacagaaatgctgaggagtttgagctgaccaacatcgacatggtgcagtgtgatgtgtgcctgctgagcaacaggatgagcaagagctttgacaccgtcatcatgaaccccccatttggcaccaagaacaacaagggcacagacatggccttcctgaagacagccctggagatggccaggacagctgtgtacagcctgcacaagagcagcacccgggagcacgtgcagaagaaggctgctgagtggaagatcaagattgacatcatcgccgagctgcgctatgacctgcctgccagctacaagttccacaagaagaagtctgtgtag

SEQ ID NO: 20746 - DNA, 1125 bp, synthetic construct
  source 1..1125: mol_type = other DNA; note = Synthetic coding sequence
atgctggcccctggctgtgagctggaccctgaccaggaggtggtgaggaccaggccagaagatgtgcctgccagccccagcaccagcaccatgattgtgtctgtgctgcggccccccagccacgccagctgcacagcctgtggcaccgtgaccttccacatcgtggagaggatggccagcgtcatcccagccagcaacagatccatgagaagtgacaggaacacctacgtgggcaagagatttgtgcacgtgaagaacccctacctggacctgatggatgaggacatcctgtaccacctggacctgggcaccaagacccacaacctgcctgccatgtttggagatgtgaagtttgtgtgtgtgggcggcagccccaacaggatgaaggcctttgccctcttcatgcacaaggagctgggctttgaggaggccgaggaggacatcaaggacatctgtgccggcacagaccgctactgcatgtacaagacaggccctgtgctggccatcagccacggcatgggcatccccagcatcagcatcatgctgcacgagctgatcaagctgctgcaccacgcccgctgctgtgatgtgaccatcatccgcatcggcaccagcggcggcatcggcatcgcccctggcaccgtggtgatcacagacattgctgtggacagcttcttcaagcccaggtttgagcaggtgatcctggacaacatcgtgaccaggagcacagagctggacaaggagctgtctgaggagctgttcaactgcagcaaggagatccccaacttccccaccctggtgggccacaccatgtgcacctatgacttctatgagggccagggccgcctggatggagccctgtgcagcttcagccgggagaagaagctggactacctgaagagggccttcaaggccggcgtgaggaacatcgagatggagagcacagtgtttgctgccatgtgtggcctgtgtggcctgaaggctgctgtggtgtgtgtgaccctgctggaccggctggactgtgaccagatcaacctgccccatgatgtgctggtggagtaccagcagaggccccagctgctgatcagcaacttcatcagaagaaggctgggcctgtgtgactag

SEQ ID NO: 20747 - DNA, 4149 bp, synthetic construct
  source 1..4149: mol_type = other DNA; note = Synthetic coding sequence
atgctgaggaagctgaccatcgagcagatcaatgactggttcaccatcggcaagacagtgaccaacgtggagctgctgggcgcccccccagccttccctgctggggccgcccgggaggaggtgcagaggcaggatgtggcccctggggccggccctgctgcccaggccccagccctggcccaggccccagcccggcctgctgctgcctttgagaggagcctgagccagaggagcagcgaggtggagtacatcaacaagtaccggcagctggaggcccaggagctggatgtgtgccgctctgtgcagcccaccagcggccctggcccccggcccagcctggccaagctgagctctgtgacctgcatccctggcaccacctacaagtacccagacctgcccatcagccgctacaaggaggaggtggtgtccctgattgagagcaacagcgtggtgatcatccacggggccactggaagtggcaagagcacccagctgccccagtacatcctggaccactacgtgcagaggtctgcctactgcagcatcgtggtgacccagcccaggaagatcggggccagcagcatcgcccgctggatcagcaaggagcgggcctggaccctgggcggcgtggtgggctaccaggtgggcctggagaagatcgccacagaggacaccaggctcatctacatgaccaccggggtgctgctgcagaagatcgtgtctgccaagagcctgatggagttcacccacatcatcattgatgaggtgcatgagaggacagaggagatggacttcctgctgctggtggtgaggaagctgctgcggaccaacagcagatttgtgaaggtggtgctgatgtctgccaccatcagctgcaaggagtttgctgactactttgctgtgcctgtgcagaacaagatgaacccagcctacatctttgaggtggagggcaagccccacagcgtggaggagtactacctgaatgacctggagcacatccaccacagcaagctgagcccccacctgctggaggagcccgtcatcaccaaggacatctatgaggtggccgtgtccctcatccagatgtttgatgacctggacatgaaggagagcggcaacaaggcctggagcggggcccagtttgtgctggagaggagctctgtgctggtgttcctgcccggcctgggggagatcaactacatgcatgagctgctgaccagcctggtgcacaagaggctgcaggtgtaccccctgcacagctctgtggccctggaggagcagaacaacgtgttcctgagccctgtgcccggctacaggaagatcatcctgagcaccaacattgctgagagctctgtgacagtgcctgatgtgaagtatgtgattgacttctgcctgaccaggaccctggtgtgtgatgaggacaccaactaccagagcctgcggctgtcctgggccagcaagaccagctgcaaccagaggaagggccgggccggccgggtgtcccggggctactgctaccgcctggtgcacaaggacttctgggacaacagcatcccagaccacgtggtgcctgagatgctgcgctgccccctgggcagcaccatcctgaaggtgaagctgctggacatgggagagccccgggccctgctggccacagccctgagccccccaggcctgagtgacatcgagaggaccatcctgctgctgaaggaggtgggcgccctggccgtgtctggccagcgggaggatgagaacccccatgatggagagctgaccttcctgggccgggtgctggcccagctgcctgtgaaccagcagctgggcaagctgattgtgctgggccacgtgtttggctgcctggatgagtgcctgatcatcgccgccgccctgagcctgaagaacttctttgccatgcccttccggcagcacctggatggctacagaaacaaggtgaacttcagcggcagcagcaagagtgactgcatcgccctggtggaggccttcaagacctggaaggcctgccggcagacaggagagctgcgctaccccaaggatgagctgaactggggccgcctgaactacatccagatcaagaggatccgggaggtggccgagctgtatgaggagctgaagacccgcatcagccagttcaacatgcacgtggacagccggcggcctgtgatggaccaggagtacatctacaagcagcgcttcatcctgcaggtggtgctggccggggccttctaccccaactacttcaccttcggccagccagatgaggagatggctgtgcgggagctggccggcaaggaccccaagaccaccgtggtgctgaagcacatccccccctacggcttcctgtactacaagcagctgcagagcctcttccggcagtgtggccaggtgaagagcatcgtgtttgatggagccaaggcctttgtggagttcagcaggaaccccacagagcgcttcaagaccctgcctgctgtgtacatggccatcaagatgagccagctgaaggtgtccctggagctgtctgtgcacagcgctgaggagattgagggcaaggtgcagggcatgaatgtgtccaagctgaggaacaccagggtgaatgtggacttccagaagcagacagtggaccccatgcaggtgtccttcaacaccagtgacaggagccagacagtgacagacctgctgctgaccattgatgtgacagaggtggtggaggtgggccacttctggggctacagaattgatgagaacaacagcgagatcctgaagaagctgacagctgagatcaaccagctgaccctggtgcccctgcccacccacccccacccagacctggtgtgcctggccccctttgctgactttgacaagcagcgctacttccgggcccaggtgctgtatgtgtctggcaacagcgctgaggtgttctttgtggactatggcaacaagagccacgtggacctgcacctgctgatggagatcccctgccagttcctggagctgcccttccaggccctggagttcaagatctgcaagatgaggccttctgccaagagcctggtgtgtgggaagcactggagcgatggagccagccagtggtttgccagcctggtgtctggctgcaccctgctggtgaaggtgttttctgtggtgcacagcgtgctgcacgtggatgtgtaccagtacagcggcgtgcaggatgccatcaacatcagagatgtgctgatccagcagggctacgccgagctgacagaggagagctatgagagcaagcagagccatgaggtgctgaagggcctcttcagcaagtctgtggagaacatgacagatggctctgtgcccttccccatgaaggatgatgagaagtacctgatccgcatcctgctggagagcttcagcaccaacaagctgggcacccccaactgcaaggccgagctgcacggccccttcaacccctatgagctgaagtgccacagcctgacccgcatcagcaagttccgctgtgtgtggattgagaaggagagcatcaacagcgtcatcatcagtgatgcccctgaggacctgcaccagaggatgctggtggccgccagcctgagcatcaatgccaccggcagcaccatgctgctgcgggagaccagcctgatgccccacatccctggcctgcctgccctgctgtccatgctgtttgcccctgtgattgagctgagaattgaccagaatggcaagtactacacaggagtgctgtgtggcctgggctggaacccagccaccggggccagcatcctgcctgagcatgacatggagctggcctttgatgtgcagttctctgtggaggatgtggtggaggtgaacatcctgcgggccgccatcaacaagctggtgtgtgatggccccaacggctgcaagtgcctgggccctgagcgggtggcccagctgcaggacatcgcccggcagaagctgctgggcctcttctgccagagcaagccccgggagaagatcgtgcccaagtggcatgagaagccctatgagtggaaccaggtggaccccaagctggtgatggagcaggccgaccgggagagcagccggggcaagaacaccttcctgtaccagctgcacaagctggtggtgctgggcacctag

SEQ ID NO: 20748 - DNA, 357 bp, synthetic construct
  source 1..357: mol_type = other DNA; note = Synthetic coding sequence
atggatgtgttcctgatgatccgccgccacaagaccaccatcttcacagatgccaaggagagcagcacagtgtttgagctgaagagaattgtggagggcatcctgaagaggcccccagatgagcagaggctgtacaaggatgaccagctgctggatgatggcaagaccctgggagaatgtggcttcaccagccagacagcccggccccaggccccagccaccgtgggcctggccttccgggcagatgacacctttgaggccctgtgcatcgagcccttcagcagccccccagagctgcctgatgtgatgaagccccaggacagcggcagcagcgccaatgagcaggccgtgcagtag

SEQ ID NO: 20749 - DNA, 3228 bp, synthetic construct; identical to SEQ ID NO: 19483
  source 1..3228: mol_type = other DNA; note = Synthetic coding sequence

SEQ ID NO: 20750 - DNA, 381 bp, synthetic construct
  source 1..381: mol_type = other DNA; note = Synthetic coding sequence
atgacagccacagagcagtggatcttcctgtgtgccgcccacaagacccccaaggaatgtcctgccatcgactacaccaggcacaccctggatggagctgcctgcctgctgaacagcaacaagtacttccccagccgggtgtccatcaaggagagctctgtggccaagctgggctctgtgtgccgccgcatctaccgcatcttcagccacgcctacttccaccaccggcagatctttgatgaatatgaaaatgagaccttcctgtgccaccgcttcaccaagtttgtgatgaagtacaacctgatgagcaaggacaacctgattgtgcccatcctggaggaggaggtgcagaacagcgtgtctggagagagcgaggcctag

SEQ ID NO: 20751 - DNA, 2811 bp, synthetic construct; identical to SEQ ID NO: 18319
  source 1..2811: mol_type = other DNA; note = Synthetic coding sequence

SEQ ID NO: 20752 - DNA, 1860 bp, synthetic construct; identical to SEQ ID NO: 19332
  source 1..1860: mol_type = other DNA; note = Synthetic coding sequence

SEQ ID NO: 20753 - DNA, 513 bp, synthetic construct
  source 1..513: mol_type = other DNA; note = Synthetic coding sequence
atgacccggggcaaccagcgggagctggcccggcagaagaacatgaagaagcagagcgacagcgtgaagggcaagagaagagatgatggcctgtctgctgctgccaggaagcagagggtgggcgtgcagcagcccaatgctgagctgagccccatccacttccacctgatcctgtgtgccctgcaccccccagccagctgccccttctgccccctggtgccccccagcgcccccagcagcctgcccccaggcacccggcgcagctgcagccgcagcaggaagaggcagaccaggagaagaagaaaccccagcagctttgtggccagctgccccaccctgctgccctttgcctgtgtgcctggggccagccccaccaccctggccttcccccctgtggtgctgaccggccccagcacagatggcatcccctttgccctgagcctgcagagggtgccctttgtgctgcccagcccccaggtggccagcctgcccctgggccacagccggggctag

SEQ ID NO: 20754 - DNA, 630 bp, synthetic construct; identical to SEQ ID NO: 18435
  source 1..630: mol_type = other DNA; note = Synthetic coding sequence

SEQ ID NO: 20755 - DNA, 1755 bp, synthetic construct
  source 1..1755: mol_type = other DNA; note = Synthetic coding sequence
atggccgccagcgccaagaggaagcaggaggagaagcacctgaagatgctgcgggacatgacaggcctgccccacaacaggaagtgctttgactgtgaccagaggggccccacctacgtgaacatgacagtgggcagctttgtgtgcaccagctgcagcggcagcctgcggggcctgaaccccccccaccgggtgaagagcatctccatgaccaccttcacccagcaggagattgagttcctgcagaagcacggcaatgaggtgtgcaagcagatctggctgggcctgtttgatgacaggagcagcgccatcccagacttccgggacccccagaaggtgaaggagttcctgcaggagaagtatgagaagaagcgctggtacgtgcccccagagcaggccaaggtggtggcctctgtgcacgccagcatcagcggcagcagcgccagcagcaccagcagcaccccagaggtgaagcccctgaagagcctgctgggggacagcgcccccaccctgcacctgaacaagggcacccccagccagagccctgtggtgggccgcagccagggccagcagcaggagaagaagcagtttgacctgctgagtgacctgggcagtgacatctttgctgccccagccccccagagcacagccacagccaactttgccaactttgcccacttcaacagccatgctgcccagaacagcgccaatgctgactttgccaactttgatgccttcggccagagcagcggcagcagcaactttggaggcttccccacagccagccacagccccttccagccccagaccacagccttcaggatgctgagcagcagctgcagctttggagagttcaccagcgccttccccctgcaggccacccacagcggcagcgctgcctctgtgaatgccaactttgcccactttgacaacttccccaagagcagcagcgctgactttggcaccttcaacaccagccagagccaccagacagccagcgctgtgtccaaggtgtccaccaacaaggccggcctgcagacagctgacaagtatgctgccctggccaacctggacaacatcttctctgctggccagggcggggaccagggcagcggcttcggcaccaccgggaaggcccctgtgggctctgtggtgtctgtgcccagccagagcagcgccagcagtgacaagtatgctgccctggccgagctggacagcgtcttcagcagcgctgccaccagcagcaatgcctacaccagcaccagcaatgccagcagcaatgtgtttggaacagtgcctgtggtggccagcgcccagacccagcctgccagcagctctgtgcctgccccctttggagccacccccagcaccaacccctttgtggccgccgccggccccagcgtggccagcagcaccaaccccttccagaccaatgcccggggggccacagctgccacctttggaacagcctccatgtccatgcccaccggcttcggcaccccagccccctacagcctgcccaccagcttcagcggcagcttccagcagcctgccttccctgcccaggccgccttcccccagcagacagccttcagccagcagcccaacggctttgctgccttcggccagaccaagcctgtggtgaccccatttggccaggtggccgctgctggggtgagcagcaaccccttcatgaccggggcccccaccggccagttccccaccggcagcagcagcaccaaccccttcctgtag

SEQ ID NO: 20756 - DNA, 795 bp, synthetic construct; identical to SEQ ID NO: 19367
  source 1..795: mol_type = other DNA; note = Synthetic coding sequence

SEQ ID NO: 20757 - DNA, 1506 bp, synthetic construct
  source 1..1506: mol_type = other DNA; note = Synthetic coding sequence
atgagcagcgagcaggacaagagcgccagcaaggagaagagcaagaagcctgtgcgcttcctgccccagctgtccatggagaagctggccagcaaggagaagttcaaggccccagcccgggccctgccccagctgtccatggtgtccaccaagccccactggcagcaggccgcccccagcttccacctgtctgtgaagcaggatgatgagagccctgagcccttctctgtgaagaatgagcagagccacgccgagtacatggagagatttgggaagaagggcaagctgccccaccaggtggatgacagctatgtgggccccagcaccagcaagagcaagggcaagagcccccacaaggagcgggagaacttccgcagcaccctggtgaatgtcatcatgcagcaggatgctgacctggacagcgctgtgcctgatggcagcaccatccccaagcccacagccagcgccatcgagaaggacatcctgcgctactactactacatccaccacggcatcgacacagaccacgtggcccccatggaggacagctggctggagcacgtgctggacctggtgccccagcacctgaaggtgttcacagacagcatcgtgaccctgagtgatgagatgagggaggactacctgctgtctgtgaggaagagcatcgtggactttgtgctgaaggacccccgggagaagggagatgacaagaagacagatgagctgcctgcccacagagctgagatggagatcctgcccaagccctggaggaagagcttcctggccgccagcagctacatccgggaccacctgaatgccatgaaccccaccatgctggccgtgctggacctgtggcacaccaacttcaagaagctgcggctggtggacatcaaggagttccacaactgccaggatgccctggagctgagcagcttccagaacatcatcatgaggcacatggacagcgccaaggagaccctgctgaagatgtggttccctgaggtgcagaacatctactaccagggcaacaagaagaagcagctgcccaccggggacagcagcgccaagctggagagcttcttcaactgtgccgccgccctgatgaccctgcagctgcaggacctgaccctggtgtccatgcaggacttcacagacctgattgcccagcccccagattctgtgcgggcctttgagcaccctggcttcatcatgaggctcatcctggacaatgacaccatcaagtttgagcctgagctgagtgactacatcgacatcttcctgaatgtgtatgatgtgatgatcaaggctgtgtcctttgtgccccgggtggagaccaagctgtacagcaagtggaggaacaaggccaagccaggccacttctacttcagccacatccagaggtctgtgaccttccagcacagcgaggtgagcagcccccagaacagccacttcaagatcgtgagccccttctctgtgctgggcttcacctggcgctgccagctgtag

SEQ ID NO: 20758 - DNA, 855 bp, synthetic construct
  source 1..855: mol_type = other DNA; note = Synthetic coding sequence
atgacagatgtgcctgccaccttcacccaggccgagtgcaatggagacaagcccccagaaaatggccagcagaccatcaccaagatcagcgaggagctgacagatgtggacagccccctgccccactacagagtggagcccagcctggagggcgccctgaccaagggcagccaggaggagaggaggaagctgcagggcaacatgctgctgaacagctccatggaggacaagatgctgaaggaaaatcctgaggagaagctgttcatcgtgcacaaggccatcacagacctgagcctgcaggagaccagcgcagatgagatgaccttccgggagggccaccagtgggagaagatccccctgagcggcagcaaccaggagatccggcggcagaaggagcgcatcacagagcagcccctgaaggaggaggaggatgaggacaggaagaacaagggccaccaggccgctgagattgagtggctgggcttcaggaagcccagccaggccgacatgctgcacagcaagcatgatgaggagcagaaggtgtgggatgaggagattgatgatgatgatgatgacaactgcaacaatgatgaagatgaggtgcgggtcatcgagttcaagaagaagcatgaggaggtgtcccagttcaaggaggagggagatgccagcgaggacagccccctgagcagcgccagcagccaggccgtgaccccagatgagcagcccaccctgggcaagaagagtgacatcagcagaaatgcctacagccgctacaacaccatctcctacaggaagatcaggaagggcaacaccaagcagagaattgatgaatttgagagcatgatgcacctgtag

SEQ ID NO: 20759 - DNA, 735 bp, synthetic construct
  source 1..735: mol_type = other DNA; note = Synthetic coding sequence
atgaagaaggtgcggctgaaggagctggagagccggctgcagcaggtggatggctttgagaagcccaagctgctgctggagcagtaccccacccggccccacatcgccgcctgcatgctgtacaccatccacaacacctatgatgacatcgagaacaaggtggtggccgacctgggctgcggctgcggcgtgctgagcattggaacagccatgctgggcgccggcctgtgtgtgggctttgatattgatgaagatgccctggagatcttcaacagaaatgctgaggagtttgagctgaccaacatcgacatggtgcagtgtgatgtgtgcctgctgagcaacaggatgagcaagagctttgacaccgtcatcatgaaccccccatttggcaccaagaacaacaagggcacagacatggccttcctgaagacagccctggagatggccaggacagctgtgtacagcctgcacaagagcagcacccgggagcacgtgcagaagaaggctgctgagtggaagatcaagattgacatcatcgccgagctgcgctatgacctgcctgccagctacaagttccacaagaagaagtctgtgtccctgctgatcctggccggcctgcacagcgtgctgaagagcttcctgggccgcatgtggtggttcatgcctgtgatcccagccacccgggaggccgaggcccgggagagcctggagctgcggcggcagaggctgcagtag

SEQ ID NO: 20760 - DNA, 885 bp, synthetic construct
  source 1..885: mol_type = other DNA; note = Synthetic coding sequence
atgaacaaccagaagcagcagaagcccaccctgagcggccagcgcttcaagaccaggaagagagatgagaaggagagatttgaccccacccagttccaggactgcatcatccagggcctgacagaaacaggaacagacctggaggccgtggccaagttcctggatgccagcggggccaagctggactaccgccgctatgcagagaccctgtttgacatcctggtggccggcggcatgctggcccctgggggcaccctggctgatgacatgatgaggacagatgtgtgtgtgtttgctgcccaggaggacctggagaccatgcaggcctttgcccaggtgttcaacaagctgatccgccgctacaagtacctggagaagggctttgaagatgaggtgaagaagctgctgctcttcctgaagggcttcagcgagagcgagaggaacaagctggccatgctgactggagtgctgctggccaacggcaccctgaatgccagcatcctgaacagcctgtacaatgaaaacctggtgaaggagggcgtgtctgctgcctttgctgtgaagctgttcaagtcctggatcaatgagaaggacatcaatgctgtggccgccagcctgaggaaggtgtccatggacaaccggctgatggagctgtttcctgccaacaagcagagcgtggagcacttcaccaagtacttcacagaggccggcctgaaggagctgtctgaatatgtgaggaaccagcagaccatcggggccaggaaggagctgcagaaggagctgcaggagcagatgagcagaggagaccccttcaaggacatcatcctgtatgtgaaggaggagatgaagaagaacaacatccctgagcctgtggtgattggatag

SEQ ID NO: 20761 - DNA, 1374 bp, synthetic construct; identical to SEQ ID NO: 20588
  source 1..1374: mol_type = other DNA; note = Synthetic coding sequence

SEQ ID NO: 20762 - DNA, 1638 bp, synthetic construct
  source 1..1638: mol_type = other DNA; note = Synthetic coding sequence
atgagcagcagcggctacccacccaaccagggcgccttcagcacagagcagagccgctacccaccccacagcgtgcagtacaccttccccaacaccaggcaccagcaggagtttgctgtgcctgactaccgcagcagccacctggaggtgtcccaggccagccagctgctgcagcagcagcagcagcagcagctgcggcggcggcccagcctgctgtctgagttccaccctggcagtgaccggccccaggagaggaggaccagctatgagcccttccaccctggccccagccctgtggaccatgacagcctggagagcaagaggccccggctggagcaggtgtctgacagccacttccagagggtgtctgctgctgtgctgcccctggtgcaccccctgcctgagggcctgcgggccagcgcagatgccaagaaggaccctgcctttggaggcaagcatgaggcccccagcagccccatcagcggccagccctgtggagatgaccagaatgccagccccagcaagctgagcaaggaggagctgatccagagcatggacagagtggaccgggagatcgccaaggtggagcagcagatcctgaagctgaagaagaagcagcagcagctggaggaggaggccgccaagcccccagagcctgagaagcctgtgtccccacctcctgtggagcagaagcacaggagcatcgtgcagatcatctatgatgagaacaggaagaaggccgaggaggcccacaagatctttgagggcctgggccccaaggtggagctgcccctgtacaaccagcccagcgacaccaaggtgtaccacgagaacatcaagaccaaccaggtgatgaggaagaagctgatcctcttcttcaagagaagaaaccacgccaggaagcagcgggagcagaagatctgccagagatatgaccagctgatggaggcctgggagaagaaggtggacagaattgagaacaaccccaggaggaaggccaaggagagcaagacccgggagtactatgagaagcagtttcctgagatcaggaagcagcgggagcagcaggagcgcttccagagggtgggccagagaggagctggcctgagcgccaccatcgcccggtctgagcacgagatcagcgagatcattgatggcctgtctgagcaggagaacaatgagaagcagatgaggcagctgagcgtcatcccccccatgatgtttgatgctgagcagaggagagtgaagttcatcaacatgaatggcctgatggaggaccccatgaaggtgtacaaggaccggcagttcatgaatgtgtggacagaccacgagaaggagatcttcaaggacaagttcatccagcaccccaagaactttggcctcatcgccagctacctggagaggaagtctgtgcctgactgtgtgctgtactactacctgaccaagaagaatgaaaactacaaggccctggtgagaagaaattatggcaagaggcggggcaggaaccagcagcagatcgcccggcccagccaggaggagaaggtggaggagaaggaggaggacaaggccgagaagacagagaagaaggaggaggagaagaaggatgaggaggagaaggatgagaaggaggacagctag

SEQ ID NO: 20763 - DNA, 480 bp, synthetic construct
  source 1..480: mol_type = other DNA; note = Synthetic coding sequence
atgacccactgctgcagcccctgctgccagcccacctgctgcaggaccacctgctggcagcccaccaccgtgaccacctgcagcagcaccccctgctgccagcccagctgctgcgtgagcagctgctgccagccctgctgccaccccacctgctgccagaacacctgctgcaggaccacctgctgccagcccatctgtgtgaccagctgctgccagcccagctgctgcagcaccccctgctgccagcccacctgctgcggcagcagctgtggccagagcagcagctgtgcccctgtgtactgcaggaggacctgctaccaccccacctctgtgtgcctgcccggctgcctgaaccagagctgtggcagcaactgctgccagccctgctgcaggcctgcctgctgtgagaccacctgctgcaggaccacctgcttccagcccacctgtgtgtacagctgctgccagcccagctgctgctag

SEQ ID NO: 20764 - DNA, 1071 bp, synthetic construct
  source 1..1071: mol_type = other DNA; note = Synthetic coding sequence
atggagggccatgaccccaaggagcctgagcagctgaggaagctgttcatcggcggcctgagctttgagaccacagatgacagcctgcgggagcactttgagaagtggggcaccctgacagactgtgtggtgatgagggacccccagaccaagaggagccggggcttcggctttgtgacctacagctgtgtggaggaggtggatgctgccatgtgtgcccggccccacaaggtggatggccgggtggtggagcccaagagagctgtgtcccgggaggacagcgtgaagccaggggcccacctgactgtgaagaagatctttgtgggcggcatcaaggaggacacagaggagtacaacctgcgggactactttgagaagtatggcaagattgagaccatcgaggtgatggaggaccggcagagcggcaagaagaggggctttgcctttgtgacctttgatgaccatgacacagtggacaagatcgtggtgcagaagtaccacaccatcaatggccacaactgtgaggtgaagaaggccctgagcaagcaggagatgcagagcgctggcagccagaggggccggggcggcggcagcggcaacttcatgggccggggcggcaactttggaggcggcggcggcaactttggccggggcggcaactttggaggccggggcggctatggaggcggcggcggcggcagccggggcagctatggaggaggagatggcggctacaacggctttggaggagatggcggcaactatggaggcggccctggctacagcagcagaggaggctatggaggcggcggccctggctacggcaaccagggcggcggctatggaggcggcggcggctatgatggctacaatgaaggaggcaactttggaggcggcaactatggaggcggcggcaactacaatgactttggaaactacagcggccagcagcagagcaactacggccccatgaagggcggcagctttggaggccgcagcagcggcagcccctacggcggcggctacggcagcggcggcggcagcggcggctacggcagccgccgcttctag

SEQ ID NO: 20765 - DNA, 186 bp, synthetic construct
  source 1..186: mol_type = other DNA; note = Synthetic coding sequence
atgcccttcttcggcaacaccttcagccccaagaagaccccacccaggaagagcgccagcctgagcaacctgcacagcctggacaggagcacccgggaggtggagctgggcctggagtatggcagccccaccatgaacctggccggccagagcctgaagtttgaaaatggccagtggatcgcctag

SEQ ID NO: 20766 - DNA, 981 bp, synthetic construct
  source 1..981: mol_type = other DNA; note = Synthetic coding sequence
atgccccacctgcccctggccagcttccggccccccttctggggcctgcggcacagccggggcctgccccgcttccacagcgtgtccacccagagcgagccccacggcagccccatcagcagaagaaaccgggaggccaagcagaagaggctgcgggagaagcaggccaccctggaggccgagattgctggggagagcaagagccctgctgagagcatcaaggcctggaggcccaaggagctggtgctgtatgagatccccaccaagccaggagagaagaaggatgtgtctggccccctgcccccagcctacagcccccgctacgtggaggccgcctggtacccctggtgggtgcgggagggcttcttcaagccagagtaccaggcccggctgccccaggccactggagagaccttctccatgtgcatccccccaccaaatgtgacaggcagcctgcacatcggccacgccctgactgtggccatccaggatgccctggtgcgctggcacaggatgagaggagaccaggtgctgtgggtgcccggcagtgaccacgccggcatcgccacccaggccgtggtggagaagcagctgtggaaggagcggggcgtgagaagacatgagctgagccgggaggccttcctgcgggaggtgtggcagtggaaggaggccaagggcggggagatctgtgagcagctgcgggccctgggcgccagcctggactgggaccgggagtgcttcaccatggatgtgggcagctctgtggccgtgacagaggcctttgtgcggctgtacaaggccggcctgctgtacagaaaccaccagctggtgaactggagctgtgccctgcggagcgccatcagtgacatcgaggtggagaaccggcccctgcccggccacacccagctgcggctgcccggctgccccacccctgtgtcctttggcctgctcttctctgtggccttccctgtggatggatag

SEQ ID NO: 20767 - DNA, 2031 bp, synthetic construct
  source 1..2031: mol_type = other DNA; note = Synthetic coding sequence
atgatccccccccaggaggccagcgccaggagaagagaaattgaggacaagctgaagcaggaggaggagaccctgtccttcatccgggacagcctggagaagagtgaccagctgaccaagaacatggtgtccatcctgagcagctttgagagccggctgatgaagctggagaacagcatcatccctgtgcacaagcagacagagaacctgcagaggctgcaggagaatgtggagaagaccctgagctgcctggaccacgtgatctcctactaccacgtggccagtgacacagagaagatcatccgggagggccccaccggccgcctggaggagtacctgggctccatggccaagatccagaaggctgtggagtacttccaggacaacagcccagacagccctgagctgaacaaggtgaagctgctgtttgagcggggcaaggaggccctggagagcgagttccgcagcctgatgaccaggcacagcaaggtggtgtcccctgtgctgatcctggacctgatctctggagatgatgacctggaggcccaggaggatgtgaccctggagcacctgcctgagagcgtgctgcaggacgtcatccgcatcagccgctggctggtggagtatggaagaaaccaggacttcatgaatgtgtactaccagatccgcagcagccagctggacaggagcatcaagggcctgaaggagcacttccacaagagcagcagcagcagtggagtgccctacagccctgccatccccaacaagaggaaggacacccccaccaagaagcctgtgaagaggcctggccatgaacatgacttccgggtgaagcacctgtctgaggccctgaatgacaagcacggccccctggccggcagagatgacatgctggatgtggagacagatgcctacatccactgtgtgtctgcctttgtgaagctggcccagagcgagtaccagctgctggccgacatcatccctgagcaccaccagaagaagacctttgacagcctcatccaggatgccctggatggcctgatgctggagggggagaacatcgtgtctgctgccaggaaggccatcgtgagacatgacttcagcacagtgctgaccgtcttccccatcctgcggcacctgaagcagaccaagccagagtttgaccaggtgctgcagggcacagctgccagcaccaagaacaagctgcccggcctcatcacctccatggagaccatcggggccaaggccctggaggactttgctgacaacatcaagaatgaccctgacaaggagtacaacatgcccaaggatggcaccgtgcatgagctgaccagcaatgccatcctcttcctgcagcagctgctggacttccaggagacagctggggccatgctggccagccaggagaccagcagcagcgccaccagctacagcagcgagttcagcaagaggctgctgagcacctacatctgcaaggtgctgggcaacctgcagctgaacctgctgagcaagagcaaggtgtatgaagatcctgccctgagcgccatcttcctgcacaacaactacaactacatcctgaagagcctggagaagtctgagctgatccagctggtggccgtgacccagaagacagctgagaggagctaccgggagcacatcgagcagcagatccagacctaccagaggtcctggctgaaggtgacagactacatcgccgagaagaacctgcctgtgttccagcccggggtgaagctgcgggacaaggagcggcagatcatcaaggagcgcttcaagggcttcaatgatggcctggaggagctgtgcaagatccagaaggcctgggccatcccagacacagagcagagggaccgcatccggcaggcccagaagaccatcgtgaaggagacctatggagccttcctgcagaagtttggatctgtgcccttcaccaagaaccctgagaagtacatcaagtatggagtggagcaggtgggggacatgattgaccggctgtttgacaccagcgcctag

SEQ ID NO: 20768 - DNA, 459 bp, synthetic construct
  source 1..459: mol_type = other DNA; note = Synthetic coding sequence
atgacagatgtgcctgccaccttcacccaggccgagtgcaatggagacaagcccccagaaaatggccagcagaccatcaccaagatcagcgaggagctgacagatgtggacagccccctgccccactacagagtggagcccagcctggagggcgccctgaccaagggcagccaggaggagaggaggaagctgcagggcaacatgctgctgaacagctccatggaggacaagatgctgaaggaaaatcctgaggagaagctgttcatcgtgcacaaggccatcacagacctgagcctgcaggagaccagcgcagatgagatgaccttccgggagggccaccagtgggagaagatccccctgagcggcagcaaccaggagatccggcggcagaaggagcgcatcacagagcagcccctgaaggaggaggaggatgaggacaggaagaacaagggccactag

SEQ ID NO: 20769 - DNA, 768 bp, synthetic construct
  source 1..768: mol_type = other DNA; note = Synthetic coding sequence
atgtggcccttccccagccgcagcctcttccccccacccacccaggcctggctgcagacagtgtccagtgaccctgaggcccagggctggggcgcctggaatgagaccaaggagatcctgggccctgagggcggggagggcaaggaggagaaggaggaggaggaggatgctgaggaggaccaggatggagatgctggcttcctgctgagcctgctggagcaggagaacctggctgaatgtcccctgcctgaccaggagctggaggccatcaagatgaaggtgtgtgccatggagcaggccgagggcaccccccggcccccaggagtgcagcagcaggccgaggaggaggagggcacagctgctggccagctgctgagccctgagaccgtgggctgccccctgagcggcaccccagaggagaaggtggaggccgaccacaggtctgtgtatgtgggcaatgtggactatggaggcagcgctgaggagctggaggcccacttcagccgctgtggggaggtgcaccgggtgaccatcctgtgtgacaagttcagcggccaccccaagggctgctgcaggaaggagcccaccagcctgggcagcgccccccagacagctggggcctttgaggacacccaggcccctgggggccaccccagccccacagctgccagccgggccggccctggcagtgaccacaagggccgcacaggccctgtggagaacagccaccacggcttccaccgcatcaagggcaagacccgcttctag

SEQ ID NO: 20770 - DNA, 3561 bp, synthetic construct
  source 1..3561: mol_type = other DNA; note = Synthetic coding sequence
atggagaaggccaccgtgcctgtggccgccgccacagctgctgagggggagggcagccccccagctgtggccgctgtggccggccccccagctgctgctgaggtgggcggcggcgtgggcggcagcagccgggcccggagcgccagcagcccccggggcatggtgcgggtgtgtgacctgctgctgaagaagaagccaccccagcagcagcaccacaaggccaagaggaacagaacctgccggccccccagcagcagcgagagcagcagtgacagcgacaacagcggcggcggcggcggcggcggcggcggcggcggcggcggcggcggcaccagcagcaacaacagcgaggaggaggaggatgatgatgatgaggaggaggaggtgtctgaggtggagagcttcatcctggaccaggatgacctggagaaccccatgctggagacagccagcaagctgctgctgagcggcacagcagatggagctgacctgaggacagtggaccctgagacccaggcccggctggaggccctgctggaggccgccggcatcggcaagctgagcacagcagatggcaaggcctttgctgaccctgaggtgctgcggcggctgaccagctctgtgtcctgtgccctggatgaagctgctgctgccctgaccaggatgagagctgagagcacagccaatgccggccagagcgacaacagaagcctggccgaggcctgcagtgaaggagatgtgaatgctgtgaggaagctgctgattgagggccgctctgtgaatgagcacacagaggagggggagagcctgctgtgcctggcctgcagcgctggctactatgagctggcccaggtgctgctggccatgcacgccaacgtggaggaccggggcatcaagggggacatcacccccctgatggccgccgccaacggcggccacgtgaagatcgtgaagctgctgctggcccacaaggcagatgtgaatgcccagagcagcactggaaacacagccctgacctacgcctgtgccggcggctacgtggatgtggtgaaggtgctgctggagagcggggccagcattgaggaccacaatgaaaatggccacacccccctgatggaggccggcagcgctggccacgtggaggtggcccggctgctgctggagaatggagctggcatcaacacccacagcaatgagttcaaggagagcgccctgaccctggcctgctacaagggccacctggagatggtgcgcttcctgctggaggccggggctgaccaggagcacaagacagatgagatgcacacagccctgatggaggcctgcatggatggccacgtggaggtggcccggctgctgctggacagcggggcccaggtgaacatgcctgctgacagctttgagagccccctgaccctggccgcctgtggcggccacgtggagctggccgccctgctgattgagcggggggccagcctggaggaggtgaatgatgagggctacacccccctgatggaggccgcccgggagggccacgaggagatggtggccctgctgctgggccagggcgccaacatcaatgcccagacagaggagacccaggagacagccctgaccctggcctgctgcggcggcttcctggaggtggccgacttcctgatcaaggccggggctgacatcgagctgggctgcagcacccccctgatggaggccgcccaggagggccacctggagctggtgaagtacctgctggccgccggggccaacgtgcacgccaccacagccaccggggacacagccctgacctacgcctgtgaaaatggccacacagatgtggctgatgtgctgctgcaggccggggctgacctggagcatgaaagtgaaggaggccgcacccccctgatgaaggccgcccgggccggccacgtgtgcaccgtgcagttcctgatcagcaagggggccaacgtgaacagaaccacagccaacaatgaccacacagtgctgagcctggcctgtgccggcggccacctggccgtggtggagctgctgctggcccacggggctgaccccacccaccggctgaaggatggcagcaccatgctgattgaggccgccaagggcggccacacctctgtggtgtgctacctgctggactaccccaacaacctgctgagcgcccctcctccagatgtgacccagctgaccccacccagccatgacctgaacagagccccccgggtgcctgtgcaggccctgcccatggtggtgcccccccaggagccagacaagcccccagccaacgtggccaccaccctgcccatccggaacaaggccgccagcaagcagaagagcagcagccacctgcctgccaacagccaggatgtgcagggctacatcaccaaccagagccctgagagcatcgtggaggaggcccagggcaagctgacagagctggagcagaggatcaaggaggccatcgagaagaatgcccagctgcagagcctggagctggcccacgccgaccagctgaccaaggagaagattgaggagctgaacaagacccgggaggagcagatccagaagaagcagaagatcctggaggagctgcagaaggtggagcgggagctgcagctgaagacccagcagcagctgaagaagcagtacctggaggtgaaggcccagaggatccagctgcagcagcagcagcagcagagctgccagcacctgggcctgctgacccctgtgggcgtgggggagcagctgtctgagggggactatgcccggctgcagcaggtggaccctgtgctgctgaaggatgagccccagcagacagctgcccagatgggctttgcccccatccagcccctggccatgccccaggccctgcccctggccgccggccccctgcccccaggcagcatcgccaacctgacagagctgcagggcgtcatcgtgggccagcctgtgctgggccaggcccagctggccggcctgggccagggcatcctgacagagacccagcagggcctgatggtggccagccctgcccagaccctgaatgacaccctggatgacatcatggctgctgtgtctggccgggccagcgccatgagcaacacccccacccacagcattgctgccagcatcagccagccccagacccccacccccagccccatcatcagccccagcgccatgctgcccatctacccagccattgatattgatgcccagacagagagcaaccacgacacagccctgaccctggcctgtgccggcggccacgaggagctggtgcagaccctgctggagcggggggccagcattgagcaccgggacaagaagggcttcacccccctcatcctggccgccacagctggccacgtgggcgtggtggagatcctgctggacaacggggctgacatcgaggcccagagcgagaggaccaaggacacccccctgagcctggcctgcagcggcggccggcaggaggtggtggagctgctgctggcccggggggccaacaagagcacaggcatgttcctgatcacccacctgtag

SEQ ID NO: 20771 - DNA, 2682 bp, synthetic construct
  source 1..2682: mol_type = other DNA; note = Synthetic coding sequence
atggccgccaccgtggagggccctgagctggaggccgctgctgctgctggagatgcctctgaagattctgatgctggcagccgggccctgcccttcctgggcggcaaccggctgagcctggacctgtacccaggcggctgccagcagctgctgcacctgtgtgtgcagcagcccctgcagctgctgcaggtggagttcctgcggctgagcacccatgaggacccccagctgctggaggccaccctggcccagctgccccagagcctgagctgcctgcggagcctggtgctgaagggcggccagaggcgggacaccctgggcgcctgcctgcggggggccctgaccaacctgcctgctggcctgagcggcctggcccacctggcccacctggacctgtccttcaacagcctggagaccctgcctgcctgtgtgctgcagatgaggggcctgggcgccctgctgctgagccacaactgcctgtctgagctgcctgaggccctgggcgccctgcctgccctgaccttcctgactgtgacccacaaccggctgcagaccctgcccccagccctgggcgccctgagcaccctgcagaggctggacctgagccagaacctgctggacaccctgcccccagaaattggaggcctgggcagcctgctggagctgaacctggccagcaaccggctgcagagcctgcctgccagcctggccggcctgcggagcctgcggctgctggtgctgcacagcaacctgctggcctctgtgcctgctgacctggcccggctgcccctgctgacccggctggacctgcgggacaaccagctgcgggacctgcccccagagctgctggatgccccctttgtgcggctgcagggcaaccccctgggggaggccagcccagatgcccccagcagccctgtggccgccctgatccctgagatgcccaggctcttcctgaccagtgacctggacagcttccctgtgaccccccagggctgcagcgtgaccctggcctgtggggtgcggctgcagtttcctgctggggccacagccacccccatcaccatccgctaccgcctgctgctgcctgagcccggcctggtgcccctgggcccccatgatgccctgctgagccacgtgctggagctgcagccccacggcgtggccttccagcaggatgtgggcctgtggctgctcttcaccccaccccaggcccggcgctgccgggaggtggtggtgaggaccagaaatgacaacagctggggagacctggagacctacctggaggaggaggccccccagaggctgtgggcccactgccaggtgccccacttctcctggttcctggtggtgtccaggcctgtgtccaatgcctgcctggtgcccccagagggcaccctgctgtgcagcagcggccaccctggggtgaaggtgatcttccccccaggggccacagaggagcccaggagagtgtccatgcaggtggtgaggatggccggccgggagctgcaggccctgctgggggagcctgaggccgctgtgagccccctgctgtgcctgagccagagcggccccccatccttcctgcagcctgtgacagtgcagctgcccctgcccagcggcatcaccggcctgagcctggacaggagccggctgcacctgctgtactgggcccctcctgctgccacctgggatgacatcacagcccaggtggtgctggagctgacccacctgtatgcccgcttccaggtgacccacttctcctggtactggctgtggtacaccaccaagaactgtgtgggcggcctggccaggaaggcctgggagcggctgcggctgcaccgggtgaacctgattgccctgcagaggcggcgggaccctgagcaggtgctgctgcagtgcctgcccaggaacaaggtggatgccaccctgcggcggctgctggagcgctaccggggccctgagcccagcgacacagtggagatgtttgaaggagaggagttctttgctgcctttgagcggggcattgatgtggatgctgacagaccagactgtgtggagggccgcatctgctttgtgttctacagccacctgaagaatgtgaaggaggtgtccttctacagaggagctgtgcctgtgcgggtgcctgaggaggccgaggccgcccggcagaggaaaggagcagatgccctgtggatggccaccctgcccatcaagctgccccggctgcggggcagcgagggccccaggagaggagctggcctgagcctggcccccctgaacctgggagatgctgagaccggcttcctgacccagagcaacctgctgtctgtggccggccgcctgggcctggactggccagctgtggccctgcacctgggcgtgtcctaccgggaggtgcagaggatcagacatgagttcagagatgacctggatgagcagatccgccacatgctgttctcctgggccgagcggcaggccggccagcccggggctgtgggcctgctggtgcaggccctggagcagagcgaccggcaggatgtggccgaggaggtgcgggctgtgctggagctgggccgcaggaagtaccaggacagcatccggaggatgggcctggcccccaaggaccctgccctgcccggcagcagcgccccccagcccccagagcccgcccaggcctag

SEQ ID NO: 20772 - DNA, 1482 bp, synthetic construct
  source 1..1482: mol_type = other DNA; note = Synthetic coding sequence
atggacttcctgctgggcaaccccttcagcagccctgtgggccagagaattgagaaggccacagatggcagcctgcagagcgaggactgggccctgaacatggagatctgtgacatcatcaatgaaacagaggagggccccaaggatgccctgcgggctgtgaagaagagaattgtgggcaacaagaacttccacgaggtgatgctggccctgactgtgctggagacctgtgtgaagaactgtggccaccgcttccacgtgctggtggccagccaggactttgtggagagcgtgctggtgaggaccatcctgcccaagaacaacccccccaccatcgtgcatgacaaggtgctgaacctgatccagagctgggcagatgccttccgcagcagcccagacctgactggagtggtgaccatctatgaggacctgcggaggaagggcctggagttccccatgacagacctggacatgctgagccccatccacaccccccagaggacagtgttcaacagcgagacccagagcggccaggacagcgtgggcacagacagcagccagcaggaggacagcggccagcacgccgcccccctgcctgccccacccatcctgagcggggacacccccatcgcccccaccccagagcagatcggcaagctgcggtctgagctggagatggtgtctggaaatgtgcgggtgatgtctgagatgctgacagagctggtgcccacccaggccgagcctgctgacctggagctgctgcaggagctgaacagaacctgccgggccatgcagcagagggtgctggagctgatcccccagatcgccaatgagcagctgacagaggagctgctgattgtgaatgacaacctgaacaacgtgttcctgcggcatgaaagatttgagcgcttcagaacaggccagaccaccaaggcccccagcgaggccgagcctgctgctgacctgattgacatgggccctgaccctgctgccaccggcaacctgagcagccagctggccggcatgaacctgggcagcagctctgtgcgggccggcctgcagagcctggaggccagcggccgcctggaggatgaatttgacatgtttgccctgacccggggcagcagcctggccgaccagaggaaggaggtgaagtatgaggccccccaggccacagatggcctggccggggccctggatgcccggcagcagagcactggagccatccctgtgacccaggcctgcctgatggaggacatcgagcagtggctgagcacagatgtgggcaatgatgctgaggagcccaagggcgtgaccagcgagggcaagtttgacaagttcctggaggagcgggccaaggctgctgaccggctgcccaacctgagcagccccagcgctgagggccccccaggcccccccagcggccctgcccccaggaagaagacccaggagaaggatgatgacatgctgtttgccctgtag

SEQ ID NO: 20773 - DNA, 663 bp, synthetic construct
  source 1..663: mol_type = other DNA; note = Synthetic coding sequence
atgaacagccagccccagaccaggagcccccccagcaggacagtgcccatccactgcacagacaactggaagaggaggaaggtgctggagcagacccctgtgtaccgcagcctggccggccggggctggatcaagtactgcatcttcttccagaggccccagatccagcccccccgggccaccatccccaacagcagccccagcatccggcctggggcccagacccccacagctgtgtaccaggccaaccagcacatcatgatggtgaaccacctgcccatgccctaccctgtgccccagggcccccagtactgcatcccccagtaccgccacagcggccccccctacgtgggccccccccagcagtaccctgtgcagcccccaggccctggccccttctacccaggccctggccctggggacttccccaatgcctacggcacccccttctaccccagccagcctgtgtaccagagcgcccccatcatcgtgcccacccagcagcagcccccaccagccaagcgggagaagaagaccatccgcatccgggaccccaaccagggcggcaaggacatcacagaggagatcatgtctgggggcggcagcaggaaccccaccccacccatcggccggcccaccagcacccccaccccaccccagtag

SEQ ID NO: 20774 - DNA, 414 bp, synthetic construct
  source 1..414: mol_type = other DNA; note = Synthetic coding sequence
atgagcctgtttggcaccaccagcggcttcggcaccagcggcacctccatgtttggcagcgccaccacagacaaccacaaccccatgaaggacatcgaggtgaccagcagcccagatgacagcatcggctgcctgtccttcagcccccccaccctgcccggcaacttcctgattgctggctcctgggccaatgatgtgcgctgctgggaggtgcaggacagcggccagaccatccccaaggcccagcagatgcacacaggccctgtgctggatgtgtgctggagcgatgatggcagcaaggtgttcaccgccagctgtgacaagacagccaagatgtgggacctgagcagcaaccaggccatccagatcgcccagcatgatgcccctgtgaagaccatccactggatcaagtag

SEQ ID NO: 20775 - DNA, 7809 bp, synthetic construct
  source 1..7809: mol_type = other DNA; note = Synthetic coding sequence
atgaagaggaaggtggtgaacacccacaagctgcggctgagccccaatgaggaggccttcatcctgaaggaggactatgaaagaagaaggaagctgcggctgctgcaggtgcgggagcaggagcgggacatcgccctgcagatccgggaggacatcaagcagaggaggaaccagcagttcacccggctggccgaggagctgcgggcagagtgggaggagagccagacccagaagatccagaacctggagaagctgtacctggccagcctgcgctccatgggagagggccaccggcaggccaaggaaaatgaaccagacctggatgccctggcccagagagctgctgagaggaagaggaaggctgacctgcggcacaaggaggccctgaaggtgcagaagaaccagaaggagatcctgctgaagcagaagacctggcacatcaaggccaggaaggaggccctgctggtggagaaggagaggtctgccaagatcaccagcctgcccccacctccacccaccctgtttgagaacatcgaggtgaagaggatctctgctgtgaagaccaacagcagcacctaccaccacctgcacacctttgtgaaccgggagacagacaccaagaggccagatgcccggctggccgctgaggaggaggccaagaggctggaggagctgcagaagcaggccgcccaggagaggatggagagatttgagaaggcccacgtgcggggcttccaggccatgaagaagatccacctggcccagaaccaggagaagctgatgaaggagctgaagcagctgcagcaggaggacctggcccggcggcggcagacagtggcccagatgccaccccagctggtggagctgccctacaagaggtctgagatgaaggaggactggcagcgggagctggagtttgcctttgaggacatgtacaatgctgacaggaaggtgaagggcaacctgatcctgcacctggagcctgagcccctgcccaccgtgaccaaccagatccaggatgaggagctggacctgtccatggagcaggagaacctgggcgctgctgaggacctgcctgtgacagaagctgagatctgcagcagcgagacagatgtgcccctggtgatgaagacccagcagatccccagcaaggtgctcttcaagaagctgctgaacaagatccgcagccagaagagcctgtggaccatcaagtccatgtctgaagatgaaagtgagatgatcaccaccgtgtctgaaattgagagcaaggcccccaccgtggagagcggcaccatcgccagcaaggagaggaccctgagcagcggccaggagcaggtggtggagagtgacaccctgaccatcgagagcggccccctggccagcgaggacaagcccctgagctgtggcaccaacagcggcaaggagcaggagatcaatgagaccctgcccatcaccaccgtggcccagagctctgtgctgctgcacccccaggaggccgccgcccgcatccgcatgtctgcccggcagaagcagatcatggagattgaggagcagaagcagaagcagctggagctgctggagcagatcgagcagcagaagctgcggctggagacagactgcttccgggcccagctggaggaggagaagaggaagaagacccagcccaccggggtgggcatcgccccagccagctgccctgtgatcagtgatgaggacagccaccggcagatgatccggaactaccagcaccagctgctgcagcagaaccggctgcaccggcagagcgtggagacagccaggaagcagctgctggagtaccagaccatgctgaagggccgctgccccagcgtgtctgcccccagcctcatcacagacagcgtcatctctgtgcccagctggaagtctgagcggcccacagccatcagcgagcactgggaccagggccagaggctgaagctgagccccaacaagtaccagcccatccagcccatccagaccagcaagctggagcaggaccacttccaggtggcccggcagaaccacttcccccagaggcaggtggagaccacagagaccctgcgggccagtgacatcctgaccaaccaggccctggagagccaggagcacctgcggcagttcagccagacagagacccagcagagggactacaagctggtgcccaaggacagcgagaccctgagccgggccctgagccatgaccggcagctgatcagccaggatgccaggaagatcagcgagacctttggagccaccaccttccagagcctggagagccagcagctgttctctgaaaattctgagaacatctcctaccacctgacagagcccagcagctttgtgcccctggtgccccagcacagcttcagcagcctgcctgtgaaggtggagagcggcaagatccaggagcccttcagcgccatgagcaagagcacagtgtccaccagccacagcatcatcagccagatgcatgaccggcccctgctgcccagcgagaacatcacagcccagcagggcaacatgaaggccctgcaggagcagctggacctgcagaagaaggtgctgcaggccacccaggaggcccaggagcagctgctgctgtgcaagcagaaggaggtggagcagcagacaggcctgagcgtcttcctgcccctggtgaccccagacagcagcgccctgctgcccagcgccaaggctgacctgggccgcatccaggagagcagccccaccaagaacaacattgctgtgtccagtgaccaccacgtgatcagccagctgcaggacaagaggctgagcctgagccagcccatcctgagccagcagaacaacttcaagttcctgcaggagcagctgaacatccagaaggacagcctgcaggcccggcgggaggcccaggaggtgctgtatgtgcacaagcagagcgagctggaccggcgggtgtgcagcgagcaggccgagcccagcttccccttccaggtggcccagcacaccttcaccagcctgcccagcgctgacaccaagagcggcaagatccaggagcagcacagcagcaagtctgagaagggcctggtgtcctgccagagcgacatccccatcagccaggacggcagcctgtccttcctgcagcagttcctgcccctgcatgacagcctgaagctgctgcaggagcagctgaccaagcagagggacaccctgcaggcccggcatgaggcccaggtggagctgctgctgcaccggcagagggacctgggggacagcaagagcggcctggtgagcagcagcagcagccctgtggtggtgcagcacagcgtggccagccaggccagcgccaaggccgagccccggcgcatccaggagctgtacctgtctgagaaggaaaatgtgggccccagctgccacctgatcatccccaccttccaggacaagagcctgtccttcccccagcacagcctggcccagcaggagaacctgaccatcctgcaggagcagagccagatccagagggtcatcctgggcgccaaggagggcacccaggagtttgtgcacacagaaagtgagctggagaagaggatcagcagcgagcagacaggcaccagcagcagcctgagccaggtggatgagagcgagcgcttccaggagtgcatcagcatcaagagtgacagcaccatccccctgagccaccccaagatcccccgctgccaggagcggctgctgcgggtgtcccagcacatgctgcccctgcaggacaacctggaggagcaccaggcctggctggacacagagaaggaggccttccacttcagccagaagacccaggagaacaccagcagcgagcagacaggcagcagcagcttcatcccccagctggtgcagctgtccttcaccagcctggccagcgctgagagcggcaccatcctggagcccctcttcacagaaagtgagagcaagatcttcagcagccacctgcagatcccccagctgcaggaccggctgctgcgcatcagccagctgatccagccccagcaggacaacctgaaggccctgcaggagcagctggccacccagcgggaggccatcatcctggcccggcaggaggcccgggaggagctgctgctgcaccagagcgagtgggagggccgcatcagccctgagcaggtggacaccagcagcctgcccctggtgccccagcacagctttgccagcctgcccctgaatgaaagtgaaagaaaccaggagccctgcagcatcaacagcgacaacatcgtgagcagcggccacagcgagatccccaccctgcctgatggcctgctgggcctgagccacctggtgctgccccagcaggacaacctgattgccctggaggagcacctgcacgcccagacagacttcctgcccagcattgagaagacccagaaggagctggtgctgagcaagccctgcaagtttgaggagaaggtgagcagcgagcacttcatccagagccaccacggggacctgcaggccctgcagcagcagctggacacccagaagaaggccatccgcagcatccaggaggtgcaggaggagctgctgctgcagaggctgtctgagctggagaagagggtgtcctctgagcaggtgtgcagcagcagctttgtgtcccaggtgcctgtggccgacagcgagaggacccagaagagcttccccaccaagagcaatgacaccctgcccagcagccaccgggagatcccccggctgcaggaccggctgctgagcctgagcaagcccatcctgccccagcaggacaacatgacagcccagctggatgcccagcgggaggtgatgtacagctatgagaagccccaggaggagctgagcctgaacaagcagaggaagctgaacaagtctgagagcgctgagcacaccatccccagcctcttcctgcccaaggagacagagcacagcttcatccccctgccctttgctgaggccaagcccaagagcacctgtgagctgtacagcagccagaatgagcacgccgccccacccagcaaccctgtgattcctggcttccaggaccggctgctgtccttcagccagagcgtgctgacccagcaggacaacctgggcctgcagaagcagctggacctgcagcgggaggtgctgcactacagccagaaggcccaggagaagctgctggtgcagaggcagacagccctgcagcagcagatccagaagcatgaggagaccctgaaggacttcttcaaggacagccagatcagcaagcccaccgtggagaatgacctgaagacccagaagatgggccagctgcgggactggttccccaacacccaggacctggccggaaatgaccaggagaacatcagacatgctgacaggaacaacagtgatgacaaccacctggccagcgaggacaccagcgccaagcagagcggggagcacctggagaaggacctgggcagaagaagcagcaagccccctgtggccaaggtgaagtgtggcctggacctgaaccagcacgagctgagcgccatccaggaggtggagagccctgccatcggccgcaccagcatcctgggcaagccaggcatctatgaggaccgggaccccctgcgggtgtccatcagccgggagcagagcttcttcggcagccccctggcccatgaccccttcagctgcctgcagctggtgggccaggagaatgtgtgtggagatgattatgatgaggccgtgaagctgaaggagagcgtggtggagaaccacgctgtgctgtcctatgctgtggaggaggagcacgcctacctgggccccaccgtgaagccagatgacaaggccaagaccctgtcctatgagcccctgagcagcgccaccgtgtccacaggcagcctgctgtcctatgaaaatacagacctgagcctgacagatcctgagagcttcagcgagcacatggatgacagcaagcaggagagcaccaccagcaaggaggaggagaccaacatcatcagcagcatcgtgcccagcacccaggacatctaccagaggcagaacagcagtgatgtgcacaagagcctgctgcctgctgtggatgagaccacctgtggccacacccacttccagcagatgattgacaagtacatcaatgaggccaacctgatccctgagaagacagacctgcaggagctggagcacatcttccccaacctgcaccaccagctgttcaagcccctggagccccacccagactttgacctgagcagcagcagcagcggcatcagcccagacaacagagacttctaccagaggagtgacagcagcagcgagagccactgtgccaccggcctgagcaagagcacagtgtacttcaccgccctgcggaggacctccatgcacagcagcctgaacaccagccccaaccagcagcctgacaccaacctggcccacgtgggcgcccacagctttgccacagagaacatcattggaggcagcgagcagtgctttgagcagctgcagcctgagtacagcagccaggaggagagccagcacgccgacctgcccagcatcttcagcattgaggcccgggacagcagccagggcatgaagaaccagaactaccccagcgaggagcacacagagatcctgcagaacaagaagaagatcgtgcacttccagctgagcatcggcaacctgagctctgtgtacagcagcagtgatgaggccaacgtgtttgaccagctgaatgtgcagcacagcaccccctgtggcagcaacagcagtgaatgttccaccaagcaccagctggagagcaggaaggagagcatgggctttgaggagctgagcaagaggggcgtggtgaccatgctgcagagccagggcctgattgaggacaacaagaatgagacctgccgggtgctggacatcaacccccaggtggaggagacagacagccggctgtgtgtgaggacagtggagatgggcaccagcatccaggccccctacagcctgaccacccagaatgagaagtactttgaaaattctgctgagacagacatccccaagatcaccaagaagctgagccagctgggggagagcgagctgtttgccagcagcggcagcttcagcctgcagagcagcatccctgtgtgggagacagaaacaggccacggcatcatggaggagcctgagctgaccctcatcagcaccacagacaccagcattgctgagatggactttgccaacctgaccctggaggagaagtcagaaaatgaggccaagtgcttcttccaggtgtctgagttcctgcccctggtgtctgccacagaggccagtgactacccagctgtgtctgagctgagcattgagaagcccaggacagccagcacagctgagaccccccggcggctgacccctgtgcccggcagcctgcaggaggccttcatcaagaggaagaagagcttcatggagaggagccaccagaggcagaaggagatccggaacaagatccacgtgtctgagaacagccagatcaagacagtgaaggagaagcccagcatcagcagctctgtgtcccggctgaagggcgtgaacaaggtgcgggccagcttccctgaggacaggaagaccacccaggccctgcggcaccagaggggcctgcggctgtacaaccagctggccgaggtgaagcagcagaaggaggagaagaccaagcaggaggcctatgcccagaacagagcccgggccaaggagttccacaagaagaccctggagaagctgcgggccaagaacacctgctag

SEQ ID NO: 20776 - DNA, 1602 bp, synthetic construct
  source 1..1602: mol_type = other DNA; note = Synthetic coding sequence
tctgcccccagcgtgggcaatgacatgggaaatgatgatgccatcggcggcaatgtgtccaagtacatcgtgctgcccaccggctactgcggccagcccaagaagggccacctgatctttgatgcctgctttgagagcggcaacctgggccgggtggaccaggtgtctgaatttgaatatgacctcttcatccggccagacacctgcaacccccgcttccgggtgtggttcaacttcaccgtggagaatgtgaaggagagccagagggtcatcttcaacatcgtgaacttcagcaagaccaagagcctgtacagagatggcatggcccccatggtgaagagcaccagccggcccaagtggcagaggctgccccccaagaatgtgtactactaccgctgcccagaccacaggaagaactacgtgatgagctttgccttctgctttgaccgggaggaggacatctaccagtttgcctactgctacccctacacctacacccgcttccagcactacctggacagcctgcagaagaggaacatggactacttcttccgggagcagctgggccagagcgtgcagcagaggaagctggacctgctgaccatcaccagcccagacaacctgcgggagggcgctgagcagaaggtggtgttcatcaccggccgggtgcaccctggagagacccccagcagctttgtgtgccagggcatcatcgacttcctggtgtcccagcaccccatcgcctgtgtgctgcgggagtacctggtgttcaagatcgcccccatgctgaacccagatggagtgtacctgggcaactaccgctgcagcctgatgggctttgacctgaacagacactggctggaccccagcccctgggtgcaccccaccctgcacggcgtgaagcagctgattgtgcagatgtacaatgaccccaagaccagcctggagttctacatcgacatccacgcccacagcaccatgatgaatggcttcatgtatggcaacatctttgaagatgaggagcgcttccagaggcaggccatcttccccaagctgctgtgccagaatgctgaggacttctcctacagcagcaccagcttcaacagagatgctgtgaaggccggcaccggccgccgcttcctgggcggcctgctggaccacaccagctactgctacaccctggaggtgtccttctacagctacatcatcagcggcaccacagctgctgtgccctacacagaggaggcctacatgaagctgggcagaaatgtggcccggaccttcctggactactaccgcctgaaccctgtggtggagaaggtggccatccccatgccccggctgaggaacaaggagattgaggtgcagaggaggaaggagaagagccccccctacaagcaccccctgctgcggggccctgccagcaactaccccaacagcaaaggagacaagaagagctctgtgaaccacaaggaccccagcacccccttcaagaccaggagccctggccgctcctatggagaccgctccatgcacttcctgctgggcaatgagatcaaccacagcagcctggccagcaaggacctgtggatcaatgcctag

SEQ ID NO: 20777 - DNA, 1509 bp, synthetic construct
  source 1..1509: mol_type = other DNA; note = Synthetic coding sequence
atgcctgagatccgggtgacccccctgggcgcctgccctgtgctgtcctggaacctggtgctgcccccaggccggggcagccgggcccccagcagcacagacaccaggacaggcttccacgtgctgccccacggcgtggatgatgagctggagatcaaggcctactatgccggccacgtgctgggcgccgccatgttccagatcaaggtgggcagcgagagcgtggtgtacaccggggactacaacatgaccccagacagacacctgggcgccgcctggattgacaagtgccggcccaacctgctgatcacagagagcacctacgccaccaccatccgggacagcaagcgctgccgggagcgggacttcctgaagaaggtgcatgagaccgtggagcggggcggcaaggtgctgatccctgtgtttgccctgggccgggcccaggagctgtgcatcctgctggagaccttctgggagaggatgaacctgaaggtgcccatctacttcagcacaggcctgacagagaaggccaaccactactacaagctgttcatcccctggaccaaccagaagatcaggaagacctttgtgcagaggaacatgtttgagttcaagcacatcaaggcctttgaccgggcctttgctgacaaccctggccccatggtggtgtttgccaccccaggcatgctgcacgccggccagagcctgcagatcttcaggaagtgggccggaaatgagaagaacatggtgatcatgcctggctactgtgtgcagggcaccgtgggccacaagatcctgagcggccagaggaagctggagatggagggccggcaggtgctggaggtgaagatgcaggtggagtacatgtccttcagcgcccatgctgatgccaagggcatcatgcagctggtgggccaggccgagcctgagagcgtgctgctggtgcacggggaggccaagaagatggagttcctgaagcagaagattgagcaggagctgcgggtgaactgctacatgcctgccaacggggagaccgtgaccctgcccaccagccccagcatccctgtgggcatcagcctgggcctgctgaagcgggagatggcccagggcctgctgcctgaggccaagaagccccggctgctgcacggcaccctcatcatgaaggacagcaacttccggctggtgtcctctgagcaggccctgaaggagctgggcctggccgagcaccagctgcgcttcacctgccgggtgcacctgcatgacaccaggaaggagcaggagacagccctgcgggtgtacagccacctgaagtctgtgctgaaggaccactgtgtgcagcacctgcctgatggctctgtgacagtggagagcgtgctgctgcaggccgccgcccccagtgaagatcctggcaccaaggtgctgctggtgtcctggacctaccaggatgaggagctgggcagcttcctgaccagcctgctgaagaagggcctgccccaggcccccagctag

SEQ ID NO: 20778 - DNA, 1371 bp, synthetic construct
  source 1..1371: mol_type = other DNA; note = Synthetic coding sequence
atggctgacagcctggagagcacccccctgcccagccctgaggaccggctggccaagctgcaccccagcaaggagctgctggagtactaccagaagaagatggccgagtgtgaggccgagaatgaagacctgctgaagaagctggagctgtacaaggaggcctgtgagggccagcacaagctggagtgtgacctgcagcagcgggaggaggagattgctgagctgcagaaggccctgagtgacatgcaggtgtgcctcttccaggagcgggagcacgtgctgcggctgtacagtgaaaatgaccggctgcgcatccgggagctggaggacaagaagaagatccagaacctgctggccctggtgggcacagatgctggggaggtgacctacttctgcaaggagcccccccacaaggtgaccatcctgcagaagaccatccaggccgtgggagaatgtgagcagagcgagagcagcgccttcaaggctgaccccaagatcagcaagagaagacccagccgggagaggaaggagagcagcgagcactaccagagggacatccagaccctcatcctgcaggtggaggccctgcaggcccagctgggggagcagaccaagctgagccgggagcagatcgagggcctgattgaggaccggcgcatccacctggaggagatccaggtgcagcaccagaggaaccagaacaagatcaaggagctgaccaagaacctgcaccacacccaggagctgctgtatgagagcaccaaggacttcctgcagctgcggtctgagaaccagaacaaggagaagtcctggatgctggagaaggacaacctgatgagcaagatcaagcagtacagagtgcagtgcaagaagaaggaggacaagattggcaaggtgctgcctgtgatgcatgagagccaccacgcccagagcgagtacatcaagagcctgaaggacaagctggtgcaggagaagaagctgagcaacatgtaccaggagcagtgcatcagcctggaggaggagctggcccgcatccgggaggaggagggcatgaggcgggagatcttcaaggacaggaccaacaagatgggcaagaggctgcagatcatgaccaagagatatgaggccctggagcggcggcgcatcctggaggtggagggcttcaagacagacatcaaggtgctgcggcagaagctgaaggacctggagcagatgctgtacaaggccaccgtgaatgcccgggccaaccaggacctggccctgctgtgtgaggtgcgggacagcaacagaagagcccacaagatccagggcgagctgaagaacctgaagagcaaggtgtttggcctggagaatgagctgcggctgtgctag

SEQ ID NO: 20779 - DNA, 270 bp, synthetic construct; identical to SEQ ID NO: 20498
  source 1..270: mol_type = other DNA; note = Synthetic coding sequence

SEQ ID NO: 20780 - DNA, 453 bp, synthetic construct
  source 1..453: mol_type = other DNA; note = Synthetic coding sequence
atgcaccctgaggacagcgtggtgagcagcaaggtgctgggctgcagccacttccctgtggccagcaggcctgctggcagccatgacccccagcccggccaccggggccgggtgctgggccctgcccgggcccctggctgggtgcgctatgcagagcgggtgctgggccggcccatcacagcccacctgtgcacagccaagagcccccagcaggtgatgggcagcctggtgaaggactactttgcccggcagcagaacctgagccctgagaagatcttccacgtgattgtggccccctgctatgacaagaagctggaggccctgcaggagagcctgcccccagccctgcacggcagcagaggagctgactgtgtgctgaccagcggggagatcgcccagatcatggagcagggcgacctgtctgtgagagatgctgctgtggacaccctgtag

SEQ ID NO: 20781 - DNA, 534 bp, synthetic construct
  source 1..534: mol_type = other DNA; note = Synthetic coding sequence
atgggctgctgcggctgcagccggggctgcggcagcggctgcggcggctgcggcagcagctgtggcggctgcggcagcggctgcggcggctgcggcagcggccggggcggctgcggcagcggctgcggcggctgcagcagcagctgtggcggctgcggcagccgctgctacgtgcctgtgtgctgctgcaagcctgtgtgctcctgggtgcctgcctgcagctgcaccagctgtggcagctgtggcggcagcaaaggaggctgcggcagctgtggcggcagcaaaggaggctgcggcagctgtggcggcagcaaaggaggctgcggcagctgtggctgcagccagagcagctgctgcaagccctgctgctgcagcagcggctgcggcagcagctgctgccagagcagctgctgcaagccctgctgctgccagagcagctgctgcgtgcctgtgtgctgccagagcagctgctgcaagccctgctgctgccagagcaactgctgcgtgcctgtgtgctgccagtgcaagatctag

SEQ ID NO: 20782 - DNA, 294 bp, synthetic construct
  source 1..294: mol_type = other DNA; note = Synthetic coding sequence
atgcctgctgagctgtggctgaccagctatggagtgcgggaggtggaccaggtgaagaggctgaccggccctggcctgtctgagggccctgagcccagcatctctgtgatggtgactggaggcccctggcccacccggctgagcaggacctgcctgcactacctgggggagtttggagaggaccagatctatgaggcccaccagcagggccgcggggccctggaggccctgctgtgtggcggcccccagggcgcctgcagcgagaaggtgtctgccacccgggaggagctgtag

SEQ ID NO: 20783 - DNA, 264 bp, synthetic construct
  source 1..264: mol_type = other DNA; note = Synthetic coding sequence
atggagaaccagctggccaagagcacagaggagaggaccttccagtaccaggacagcctgcccagcctgcctgtgcccagcctggaggagagcctgaagaagtacctggagagcgtgaagccctttgccaaccaggaggagtacaagaagacagaggagatcgtgcagaagttccagagcggcatcggggagaagctgcaccagaagctgctggagcgggccaagggcaagaggaactgggtgtttgtggtgatcatcgagtag

SEQ ID NO: 20784 - DNA, 1881 bp, synthetic construct; identical to SEQ ID NO: 19875
  source 1..1881: mol_type = other DNA; note = Synthetic coding sequence

SEQ ID NO: 20785 - DNA, 2940 bp, synthetic construct
  source 1..2940: mol_type = other DNA; note = Synthetic coding sequence
atgctgtgctggggcaatgccagctttggccagctgggcctgggcggcattgatgaggagatcgtgctggagcccaggaagagtgacttcttcatcaacaagagggtgagagatgtgggctgcggcctgcggcacacagtgtttgtgctggatgatggcaccgtgtacacctgtggctgcaatgacctgggccagctgggccacgagaagagcaggaagaagccagagcaggtggtggccctggatgcccagaacatcgtggccgtgtcctgtggggaggcccacaccctggccctgaatgacaagggccaggtgtatgcctggggcctggacagtgatggccagctgggcctggtgggcagcgaggagtgcatccgggtgcccaggaacatcaagagcctgagtgacatccagatcgtgcaggtggcctgtggctactaccacagcctggccctgagcaaggccagcgaggtgttctgctggggccagaacaagtatggccagctgggcctgggcacagactgcaagaagcagaccagcccccagctgctgaagagcctgctgggcatccccttcatgcaggtggccgccggcggggcccacagctttgtgctgaccctgagcggggccatcttcggctggggcaggaacaagtttggccagctgggcctgaatgatgaaaatgacagatatgtgcccaacctgctgaagagcctgcggagccagaagatcgtgtacatctgctgcggggaggaccacacagctgccctgaccaaggagggcggcgtcttcaccttcggggccggcggctacggccagctgggccacaacagcaccagccatgagatcaaccccaggaaggtgtttgagctgatgggcagcatcgtgacagaaattgcctgtggccggcagcacaccagcgcctttgtgcccagcagcggccgcatctacagctttggcctgggcggcaatggccagctgggcaccggcagcaccagcaacaggaagagccccttcaccgtgaagggcaactggtacccctacaacggccagtgcctgcctgacatcgacagcgaggagtacttctgtgtgaagaggatcttctctggaggagaccagagcttcagccactacagcagcccccagaactgtggccccccagatgacttccgctgccccaaccccaccaagcagatctggacagtgaatgaggccctgatccagaagtggctgagctaccccagcggccgcttccctgtggagatcgccaatgaaattgatggcaccttcagcagcagcggctgcctgaatggcagcttcctggccgtgtccaatgatgaccactacagaacaggcacccgcttcagcggcgtggacatgaatgctgcccggctgctcttccacaagctgatccagcctgaccacccccagatcagccagcaggtggccgccagcctggagaagaacctgatccccaagctgaccagcagcctgcctgatgtggaggccctgcgcttctacctgaccctgcctgagtgccccctgatgtctgacagcaacaacttcaccaccatcgccatcccctttggaacagccctggtgaacctggagaaggcccccctgaaggtgctggagaactggtggagcgtgctggagcccccactcttcctgaagatcgtggagctgttcaaggaggtggtggtgcacctgctgaagctgtacaagattggcatccccccatctgaaagacgcatcttcaacagcttcctgcacacagccctgaaggtgctggagatcctgcaccgggtgaatgagaagatgggccagatcatccagtatgacaagttctacatccacgaggtgcaggagctgattgacatcagaaatgactacatcaactgggtgcagcagcaggcctacggcatggatgtgaaccacggcctgacagagctggccgacatccctgtgaccatctgcacctacccctttgtgtttgatgcccaggccaagaccaccctgctgcagacagatgctgtgctgcagatgcagatggccatcgaccaggcccaccggcagaatgtgagcagcctcttcctgcccgtcatcgagagcgtgaacccctgcctgatcctggtggtgcggcgggagaacatcgtgggagatgccatggaggtgctgaggaagaccaagaacatcgactacaagaagcccctgaaggtgatctttgtgggagaagatgctgtggatgctgggggcgtgaggaaggagttcttcctgctgatcatgagggagctgctggaccccaagtatggcatgttccgctactatgaggacagccgcctcatctggttcagtgacaagatcaccgtggagaactttggagccacagaggtgaaggagctggtgctgaatggagctgacacagctgtgaacaagcagaaccggcaggagtttgtggatgcctacgtggactacatcttcaacaagtctgtggccagcctgtttgatgccttccacgccggcttccacaaggtgtgtggcggcaaggtgctgctgctcttccagcccaatgagctgcaggccatggtgattggcaacaccaactatgactggaaggagctggagaagaacacagagtacaagggggagtactgggccgagcaccccaccatcaagatcttctgggaggtgttccacgagctgcccctggagaagaagaagcagttcctgctcttcctgaccggcagtgaccgcatccccatcctgggcatgaagagcctgaagctggtgatccagagcactggaggaggagaggagtacctgcctgtgagccacacctgcttcaacctgctggacctgcccaagtacacagagaaggagaccctgcggagcaagctgatccaggccatcgaccacaatgaaggcttcagcctcatctag

SEQ ID NO: 20786 - DNA, 1020 bp, synthetic construct
  source 1..1020: mol_type = other DNA; note = Synthetic coding sequence
atgaagatctttgtgggcaatgtggatggagctgacaccaccccagaggagctggccgccctgtttgccccctatggaacagtgatgagctgtgctgtgatgaagcagtttgcctttgtgcacatgagagaaaatgctggggccctgcgggccatcgaggccctgcacggccacgagctgcggcccggccgggccctggtggtggagatgagccggccccggcccctgaacacctggaagatctttgtgggcaatgtgtctgctgcctgcaccagccaggagctgcggagcctgtttgaaagaagaggccgggtgattgaatgtgatgtggtgaagggcaagaggatgcacgtgcagctgagcaccagccggctgaggacagcccctggcatgggagaccagagcggctgctaccgctgtgggaaggagggccactggagcaaagaatgtcccatcgacagaagtggccgggtggccgacctgacagagcagtacaatgagcagtatggagctgtgaggaccccctacaccatgtcctatggagacagcctgtactacaacaatgcctacggggccctggatgcctactacaagcgctgccgggccgcccggagctatgaggccgtggccgctgctgctgcctctgtgtacaactatgcagagcagaccctgagccagctgccccaggtgcagaacacagccatggccagccacctgaccagcaccagcctggacccctatgacagacacctgctgcccaccagcggggccgccgccacagctgctgctgctgctgctgctgctgctgctgtgacagctgccagcaccagctactacggccgggacaggagccccctgcggcgggccacagcccctgtgcccaccgtgggggagggctacggctacggccacgagagcgagctgagccaggccagcgctgctgccaggaacagcctgtatgacatggcccgctatgagcgggagcagtatgctgaccgggcccgctacagcgccttctag

SEQ ID NO: 20787 - DNA, 390 bp, synthetic construct; identical to SEQ ID NO: 19988
  source 1..390: mol_type = other DNA; note = Synthetic coding sequence

SEQ ID NO: 20788 - DNA, 1695 bp, synthetic construct
  source 1..1695: mol_type = other DNA; note = Synthetic coding sequence
atgagctacccagcagatgattatgagagcgaggccgcctatgacccctatgcctaccccagcgactatgacatgcacactggagaccccaagcaggacctggcctatgaaaggcagtatgagcagcagacctaccaggtgattcctgaggtgatcaagaacttcatccagtacttccacaagacagtgtctgacctgattgaccagaaggtgtatgagctgcaggccagccgggtgtccagtgatgtgattgaccagaaggtgtatgagatccaggacatctatgagaacagctggaccaagctgacagagcgcttcttcaagaacaccccctggccagaggccgaggccatcgccccccaggtgggcaatgatgctgtgttcctgatcctgtacaaggagctgtactaccgccacatctatgccaaggtgtctgggggccccagcctggagcagagatttgagagctactacaactactgcaacctcttcaactacatcctgaatgctgatggccctgcccccctggagctgcccaaccagtggctgtgggacatcattgatgagttcatctaccagttccagagcttcagccagtaccgctgcaagacagccaagaagtctgaggaggagattgacttcctgcggagcaaccccaagatctggaatgtgcacagcgtgctgaatgtgctgcacagcctggtggacaagagcaacatcaaccggcagctggaggtgtacaccagcggcggggaccctgagagcgtggccggggagtatggccgccacagcctgtacaagatgctgggctacttcagcctggtgggcctgctgcggctgcacagcctgctgggggactactaccaggccatcaaggtgctggagaacatcgagctgaacaagaagtccatgtacagccgggtgcctgagtgccaggtgaccacctactactacgtgggctttgcctacctgatgatgaggcgctaccaggatgccatccgggtgtttgccaacatcctgctgtacatccagaggaccaagtccatgttccagaggaccacctacaagtatgagatgatcaacaagcagaatgagcagatgcacgccctgctggccatcgccctgaccatgtaccccatgagaattgatgagagcatccacctgcagctgcgggagaagtacggggacaagatgctgaggatgcagaagggggacccccaggtgtatgaggagctgttctcctacagctgccccaagttcctgagccctgtggtgcccaactatgacaacgtgcaccccaactaccacaaggagcccttcctgcagcagctgaaggtgttcagtgatgaggtgcagcagcaggcccagctgagcaccatccgctccttcctgaagctgtacaccaccatgcctgtggccaagctggccggcttcctggacctgacagagcaggagttccgcatccagctgctggtgttcaagcacaagatgaagaacctggtgtggaccagcggcatcagcgccctggatggagagttccagagcgccagcgaggtggacttctacatcgacaaggacatgatccacatcgctgacaccaaggtggccaggagatatggagacttcttcatccggcagatccacaagtttgaggagctgaacagaaccctgaagaagatgggccagaggccctag

SEQ ID NO: 20789 - DNA, 789 bp, synthetic construct; identical to SEQ ID NO: 19488
  source 1..789: mol_type = other DNA; note = Synthetic coding sequence

SEQ ID NO: 20790 - DNA, 1626 bp, synthetic construct; identical to SEQ ID NO: 19205
  source 1..1626: mol_type = other DNA; note = Synthetic coding sequence

SEQ ID NO: 20791 - DNA, 303 bp, synthetic construct
  source 1..303: mol_type = other DNA; note = Synthetic coding sequence
atgagcaccatcggcagctttgagggcttccaggccgtgtccctgaagcaggagggagatgaccagcccagcgagacagaccacctgtccatggaggaggaggaccccatgccccggcagatcagccggcagagctctgtgacagagagcaccctgtaccccaacccctaccaccagccctacatcagcaggaagtactttgccaccaggcctggggccatcgagacagccatggaggacctgaagggccacgtggccgagaccagcggggagaccatccagggcttctggctgctgacctag

SEQ ID NO: 20792 - DNA, 1425 bp, synthetic construct
  source 1..1425: mol_type = other DNA; note = Synthetic coding sequence
atggagaggagcggccagagggtgaccacctgggactgtgaccagggcaagcacagcgacagcgactacagagaagatggcatggacctgggcagtgatgctggcagcagcagcagcagcagccgggccagcagccagagcaacagcaccaaggtgaccccctgcagcgagtgcaagagcagcagcagccctgggggcagcctggacctggtgtctgccctggaggactatgaggagcccttccctgtgtaccagaagaaggtgattgatgagtgggcccctgaggaggatggagaggaggaggaggaggaggatgagcgggaccagaggggctacagagatgacaggagccctgcccgggagcctggagatgtgtctgcccggaccaggtctgggggcggcggcggccgcagcgccaccacagccatgcctcctcctgtgcccaatggaaacctgcaccagcacgacccccaggacctgcggcacaatggaaatgtggtggtggccggccggcccagctgcagccggggcccccggcgggccatccagaagccccagcctgctgggggcagaagaagtggccggggccctgctgctgggggcctgtgcctgcagcccccagatggcggcacctgtgtgcctgaggagccccctgtgccccccatggactgggaggccctggagaagcacctggccggcctgcagttccgggagcaggaggcccagaagaatgaaagagagagcatccggcagaagctggccctgggcagcttctttgatgatggccctggcatctacaccagctgcagcaagagcggcaagcccagcctgagcagccggctgcagagcggcatgaacctgcagatctgctttgtgaatgattctggcagtgacaaggacagtgatgctgatgacagcaagacagagaccagcctggacacccccctgagccccatgagcaagcagagcagcagctacagcgaccgggacaccacagaggaggagagcgagagcctggatgacatggacttcctgacccggcagaagaagctgcaggccgaggccaagatggccctggccatggccaagcccatggccaagatgcaggtggaggtggagaagcagaacaggaagaagagccctgtggccgacctgctgccccacatgccccacatcagcgagtgcctgatgaagaggagcctgaagcccacagacctgcgggacatgaccatcggccagctgcaggtgattgtgaatgacctgcacagccagatcgagagcctgaatgaggagctggtgcagctgctgctgatcagagatgagctgcacacagagcaggatgccatgctggtggacatcgaggacctgaccaggcatgctgagagccagcagaagcacatggccgagaagatgcctgccaagtag

SEQ ID NO: 20793 - DNA, 690 bp, synthetic construct
  source 1..690: mol_type = other DNA; note = Synthetic coding sequence
atgcagcagagggtgctggagctgatcccccagatcgccaatgagcagctgacagaggagctgctgattgtgaatgacaacctgaacaacgtgttcctgcggcatgaaagatttgagcgcttcagaacaggccagaccaccaaggcccccagcgaggccgagcctgctgctgacctgattgacatgggccctgaccctgctgccactggaaacctgagcagccagctggccggcatgaacctgggcagcagctctgtgcgggccggcctgcagagcctggaggccagcggccgcctggaggatgaatttgacatgtttgccctgacccggggcagcagcctggccgaccagaggaaggaggtgaagtatgaggccccccaggccacagatggcctggccggggccctggatgcccggcagcagagcactggagccatccctgtgacccaggcctgcctgatggaggacatcgagcagtggctgagcacagatgtgggcaatgatgctgaggagcccaagggcgtgaccagcgaggagtttgacaagttcctggaggagcgggccaaggctgctgaccggctgcccaacctgagcagccccagcgctgagggccccccaggcccccccagcggccctgcccccaggaagaagacccaggagaaggatgatgacatgctgtttgccctgtag

SEQ ID NO: 20794 - DNA, 1650 bp, synthetic construct
  source 1..1650: mol_type = other DNA; note = Synthetic coding sequence
atgagccgggtggccaagtaccgccggcaggtgtctgaagatcctgacatcgacagcctgctggagaccctgagccctgaggagatggaggagctggagaaggagctggatgtggtggaccctgatggctctgtgcctgtgggcctgcggcagaggaaccagacagagaagcagagcactggagtgtacaaccgggaggccatgctgaacttctgtgagaaggagaccaagaagctgatgcagcgggagatgtccatggatgagagcaagcaggtggagaccaagacagatgccaaggaggagaagatcatccggggcatcgacaagggccgggtgcgggctgctgtggacaagaaggaggccggcaaggatggccgcggggaggagagagctgtggccaccaagaaggaggaggagaagaagggcagtgacaggaacacaggcctgagccgggacaaggacaagaagcgggaggagatgaaggaggtggccaagaaggaggatgatgagaaggtgaagggggagaggaggaacacagacaccaggaaggagggggagaagatgaagagagctgggggcaacacagacatgaagaaggaggatgagaaggtgaagaggggcaccggcaacacagacaccaagaaggatgatgagaaggtgaagaagaatgagcccctgcacgagaaggaggccaaggatgacagcaagaccaagaccccagagaagcagacccccagcggccccaccaagcccagcgagggccctgccaaggtggaggaggaggccgcccccagcatctttgatgagcccctggagcgggtgaagaacaatgaccctgagatgacagaggtgaatgtgaacaacagcgactgcatcaccaatgagatcctggtgcgcttcacagaggccctggagttcaacacagtggtgaagctgtttgccctggccaacaccagggcagatgaccacgtggcctttgccatcgccatcatgctgaaggccaacaagaccatcaccagcctgaacctggacagcaaccacatcaccgggaagggcatcctggccatcttccgggccctgctgcagaacaacaccctgacagagctgcgcttccacaaccagaggcacatctgtggcggcaagacagagatggagatcgccaagctgctgaaggagaacaccaccctgctgaagctgggctaccactttgagctggccggccccaggatgacagtgaccaacctgctgagcaggaacatggacaagcagaggcagaagaggctgcaggagcagaggcaggcccaggaggccaagggggagaagaaggacctgctggaggtgcccaaggccggggctgtggccaagggcagccccaagcccagcccccagcccagccccaagcccagccccaagaacagccccaagaagggcggggccccagctgcccctcctcctcctcctccacccctggccccacccctcatcatggagaacctgaagaacagcctgagccctgccacccagaggaagatgggagacaaggtgctgcctgcccaggagaagaacagccgggaccagctgctggccgccatccgcagcagcaacctgaagcagctgaagaaggtggaggtgcccaagctgctgcagtag

SEQ ID NO: 20795 - DNA, 231 bp, synthetic construct
  source 1..231: mol_type = other DNA; note = Synthetic coding sequence
atgtctgccagctgtgatggctgtgtgggcagcaggcctcctgtgcacctggccagcggctacagcctggccgacctgctggtgctggagatgggcatgggcacccagtgctggacagaggaccagaggcgctggagcagcctgtggccctggagccacctgagcagtgaccccagcctgcccaacgtgcaggtgacccggctgaccctgctgtctgagcaggccccctag

SEQ ID NO: 20796 - DNA, 1416 bp, synthetic construct
  source 1..1416: mol_type = other DNA; note = Synthetic coding sequence
atggccaacagctttgctgcccgcatcttcaccaccctgagtgacctgcagaccaacatggccaacctgaaggtgattggcatcgtcatcggcaagacagatgtgaagggcttcccagacaggaagaacatcggcagcgagcgctacaccttctccttcaccatccgggacagccctgcccactttgtgaatgctgcctcctggggcaatgaagactacatcaagagcctgagtgacagcttccgggtgggggactgtgtgatcatcgagaaccccctcatccagaggaaggagattgagcgggaggagaagttctccccagccacccccagcaactgcaagctgctgctgtctgagaaccacagcacagtgaaggtgtgcagcagctatgaggtggacaccaagctgctgagcctcatccacctgcctgtgaaggagagccatgactactacagcctgggggacatcgtggccaacggccacagcctgaatggccgcatcatcaacgtgctggccgctgtgaagtctgtgggggagcccaagtacttcaccaccagtgacaggaggaagggccagagatgtgaggtgcggctgtatgatgaaacagagagcagctttgccatgacctgctgggacaatgaaagcatcctgctggcccagagctggatgccccgggagaccgtcatctttgccagtgatgtgcgcatcaactttgacaagttcaggaactgcatgacagccaccgtcatcagcaagaccatcatcaccaccaacccagacatccctgaggccaacatcctgctgaacttcatccgggagaacaaggagaccaacgtgctggatgatgaaattgacagctacttcaaggagagcatcaacctgagcaccatcgtggatgtgtacacagtggagcagctgaagggcaaggccctgaagaatgaaggcaaggctgaccccagctatggcatcctgtatgcctacatcagcaccctgaacattgatgatgagaccaccaaggtggtgaggaaccgctgcagcagctgtggctacatcgtgaatgaggccagcaacatgtgcaccacctgcaacaagaacagcctggacttcaagtctgtgttcctgtccttccacgtgctgattgacctgacagaccacacaggcaccctgcacagctgcagcctgactggatctgtggccgaggagaccctgggctgcaccgtgcatgagttcctggccatgacagatgagcagaagacagccctgaagtggcagttcctgctggagaggagcaagatctacctgaagtttgtgctgagccaccgggcccggagcggcctgaagatctctgtgctgagctgcaagctggccgaccccacagaggccagcaggaacctgagcggccagaagcacgtgtag

SEQ ID NO: 20797 - DNA, 747 bp, synthetic construct
  source 1..747: mol_type = other DNA; note = Synthetic coding sequence
atggccaccagcgcccccctgcggagcctggaggaggaggtgacctgcagcatctgcctggactacctgcgggaccctgtgaccatcgactgtggccacgtgttctgccgcagctgcaccacagatgtgcggcccatcagcggcagcaggcctgtgtgccccctgtgcaagaagcccttcaagaaggagaacatccggcctgtgtggcagctggccagcctggtggagaacatcgagcggctgaaggtggacaagggccggcagcctggagaggtgacccgggagcagcaggatgccaagctgtgtgagcggcaccgggagaagctgcactactactgtgaagatgatggcaagctgctgtgtgtgatgtgccgggagagccgggagcaccggccccacacagctgtgctgatggagaaggccgcccagccccaccgggagaagatcctgaaccacctgagcaccctgcggcgggaccgggacaagatccagggcttccaggccaagggggaggccgacatcctggccgccctgaagaagctgcaggaccagaggcagtacatcgtggccgagtttgagcagggccaccagttcctgcgggagcgggaggagcacctgctggagcagctggccaagctggagcaggagctgacagagggccgggagaagttcaagagccggggcgtgggggagctggcccggctggccctggtgatcagcgagctggagggcaaggcccagcagtag

SEQ ID NO: 20798 - DNA, 2646 bp, synthetic construct
  source 1..2646: mol_type = other DNA; note = Synthetic coding sequence
atgttctggaagtttgacctgcacaccagcagccacctggacaccctgctggagcgggaggacctgagcctgcctgagctgctggatgaagaagatgtgctgcaggagtgcaaggtggtgaacaggaagctgctggacttcctgctgcagcccccccacctgcaggccatggtggcctgggtgacccaggagcccccagacagcggggaggagcggctgcgctacaagtaccccagcgtggcctgtgagatcctgaccagtgatgtgccccagatcaatgatgccctgggcgcagatgagagcctgctgaaccggctgtatggcttcctgcagagcacaggcagcctgaaccccctgctggccagcttcttcagcaaggtgatgggcatcctgatcaacaggaagacagaccagctggtgtccttcctgaggaagaaggatgactttgtggacctgctgctgcagcacatcggcaccagcgccatcatggacctgctgctgcggctgctgacctgtgtggagcggccccagctgcggcaggatgtggtgaactggctgaatgaggagaagatcgtgcagaggctcatcgagcagatccaccccagcaaggatgagaaccagcacagcaatgccagccagagcctgtgtgacatcatccggctgagccgggagcagatgatccaggtgcaggacagccctgagccagaccagctgctggccaccctggagaagcaggagaccatcgagcagctgctgagcaacatgtttgaaggagagcagagccagagcgtgattgtgtctggcatccaggtgctgctgaccctgctggagccccggcggcccaggtctgagagcgtgacagtgaacagcttcttcagctctgtggatggccagctggagctgctggcccagggcgccctggagagcacagtgtcctctgtgggcgccctgcacgccctgcggccccggctgagctgcttccaccagctgctgctggagccccccaagctggagcccctgcagatgacctggggcatgctggccccacccctgggcaacacccggctgcacgtggtgaagctgctggccagcgccctgagcgccaatgatgctgccctgacccatgagctgctggccctggatgtgcccaacaccatgctggacctcttcttccactacgtgttcaacaacttcctgcacgcccaggtggagggctgtgtgtccaccatgctgagcctgggccccccaccagacagcagccctgagacccccatccagaaccctgtggtgaagcacctgctgcagcagtgccgcctggtggagcgcatcctgacctcctgggaggagaatgacagagtgcagtgtgccggcggccccaggaagggctacatgggccacctgaccagggtggccggggccctggtgcagaacacagagaagggccccaatgctgagcagctgcggcagctgctgaaggagctgcccagcgagcagcaggagcagtgggaggcctttgtgtctggccccctggccgagaccaacaagaagaacatggtggacctggtgaacacccaccacctgcacagcagcagtgatgatgaagatgaccggctgaaggagttcaacttccctgaggaggccgtgctgcagcaggccttcatggacttccagatgcagaggatgaccagcgccttcatcgaccacttcggcttcaatgatgaggagtttggagagcaggaggagagcgtgaatgccccctttgacaagacagccaacatcaccttcagcctgaatgctgatgatgagaaccccaatgccaacctgctggagatctgctacaaggaccgcatccagcagtttgatgatgatgaggaggaggaggatgaggaggaggcccagggcagcggggagagtgatggagaagatggagcctggcagggcagccagctggcccggggggcccggctgggccagcccccaggagtgcgcagcggcggcagcacagacagtgaagatgaggaggaggaggatgaggaggaggaggaggatgaggagggcatcggctgtgccgcccggggcggggccacccccctgagctaccccagccctggcccccagcccccaggccccagctggacagccacctttgatcctgtgcccacagatgcccccaccagcccccgggtgtctggagaggaggagctgcacactggacctccagccccccagggccccctgtctgtgccccagggcctgcccacccagagcctggccagccccccagccagagatgccctgcagctgcggagccaggaccccaccccaccttctgccccccaggaggccacagagggcagcaaggtgacagagcccagcgccccctgccaggccctggtgtccattggagacctgcaggccaccttccacggcatccgcagcgcccccagcagcagtgacagcgccacccgggaccccagcacctctgtgcctgccagcggggcccaccagcccccccagaccacagaaggagagaagagccctgagcccctgggcctgccccagagccagagcgcccaggccctgaccccaccacccatccccaacggcagcgcccctgagggccctgccagccctggcagccagtag

SEQ ID NO: 20799 - DNA, 354 bp, synthetic construct
  source 1..354: mol_type = other DNA; note = Synthetic coding sequence
atgaagttccagtacaaggaggtgcacccctttgagtacaggaagaaggagggggagaagatcaggaagaagtacccagacagagtgcccctcatcgtggagaaggcccccaaggcccgggtgcctgacctggacaggaggaagtacctggtgcccagcgacctgacagatggccagttctacctgctgatcaggaagaggatccacctgcggccagaagatgccctcttcttctttgtgaacaacaccatcccccccaccagcgccaccatgggccagctgtatgaggacagccatgaagaagatgacttcctgtatgtggcctacagcaatgaatctgtgtatggcaagtag

SEQ ID NO: 20800 - DNA, 1089 bp, synthetic construct
  source 1..1089: mol_type = other DNA; note = Synthetic coding sequence
atgagggagatcgtgcacctgcaggccggccagtgtggcaaccagatcggggccaagttctgggaggtgatcagtgatgagcacggcatcgaccccaccggcacctaccatggagacagcgacctgcagctggagcgcatcaacgtgtactacaatgaggccactggaggcaactacgtgcccagggctgtgctggtggacctggagcccggcaccatggattctgtgcgcagcggccccttcggccagatcttccggccagacaactttgtgtttggccagagcggggccggcaacaactgggccaagggccactacacagaaggagctgagctggtggatgctgtgctggatgtggtgaggaaggaggccgagagctgtgactgcctgcagggcttccagctgaccacccccacctacggggacctgaaccacctggtgtctgccaccatgtctggagtgaccacctgcctgcgcttccctggccagctgaatgctgacctgaggaagctggccgtgaacatggtgcccttcccccggctgcacttcttcatgcctggctttgcccccctgaccagccggggcagccagcagtaccgggccctgactgtgcctgagctgacccagcagatgtttgatgccaagaacatgatggccgcctgtgaccccaggcatggccgctacctgactgtggccgctgtgttccggggccgcatgtccatgaaggaggtggatgagcagatgctgtctgtgcagagcaagaacagcagctactttgtggagtggatccccaacaacgtgaagacagctgtgtgtgacatccccccccggggcctgaagatggccgccaccttcatcggcaacagcacagccatccaggagctgttcaagaggatcagcgagcagttcaccgccatgttccggaggaaggccttcctgcactggtacacaggagagggcatggatgagatggagttcacagaagctgagagcaacatgaatgacctggtgtctgagtaccagcagtaccaggatgccacagctgaggagggggagtttgaggaggaggccgaggaggaggtggcctag

SEQ ID NO: 20801 - DNA, 654 bp, synthetic construct
  source 1..654: mol_type = other DNA; note = Synthetic coding sequence
atggaggagaccatgaagctggccaccatggaggacacagtggagtactgcctcttcctgatcccagatgagagccgggacagcgacaagcacaaggagatcctgcagaagtacatcgagcgcatcatcaccaggtttgcccccatgctggtgccctacatctggcagaaccagcccttcaacctgaagtacaagccaggcaagggcggcgtgcctgcccacatgtttggagtgaccaagtttggagacaacattgaagatgagtggttcatcgtgtatgtgatcaagcagatcaccaaggagttccctgagctggtggccagcaccaacagagtcttcttctgccacggggagctgtgcatcatcccagcccccaggaagagcggggctgagagctggctgcccaccaccccacccaccatcccccaggccctgaacatcatcacagcccacagcgagaagatcctggccagcgagagcatccgggctgctgtgaacagacgcatccggggctacccagagaagatccaggccagcctgcaccgggcccactgcttcctgcctgctggcatcgtggccgtgctgaagcagaggccccggctggtggccgctgctgtgcaggccttctacctgcgggaccccatcgacctgtag

SEQ ID NO: 20802 - DNA, 1188 bp, synthetic construct; identical to SEQ ID NO: 20054
  source 1..1188: mol_type = other DNA; note = Synthetic coding sequence

SEQ ID NO: 20803 - DNA, 102 bp, synthetic construct
  source 1..102: mol_type = other DNA; note = Synthetic coding sequence
atgagcatcagcagtgatgaggtgaacttcctggtgtaccgctacctgcaggagagcggcttcagccacagcgccttcaccttcggcatcgagagccactag

SEQ ID NO: 20804 - DNA, 1242 bp, synthetic construct
  source 1..1242: mol_type = other DNA; note = Synthetic coding sequence
atgtttgccagtgacctgctgcgggccctggactgctgccctggggccggcagcagcggcctgctgccccagctgggcccccggcagctgctggccttcaccgtgaactgcctgggcaaccaccgctacctgggcttctttgaggacctggagcagaggcacaaggcccaggtgctggtggaggacatcagtgacatcctggaggagcacgccgagaagcacttccacccctacatcgcctactgcagcaatgaggtgtaccagcagaggaccctgcagaagctgatcagcagcaatgctgccttccgggaggccctgcgggagattgaaagaagacctgcctgtggcggcctgcccatgctgtccttcctgatcctgcccatgcagagggtgacccggctgcccctgctgatggacaccctgtgcctgaagacccagggccacagcgagcgctacaaggccgccagccgggccctgaaggccatcagcaagctggtgcggcagtgcaatgaaggagcccacaggatggagaggatggagcagatgtacaccctgcacacccagctggacttcagcaaggtgaagagcctgcccctcatcagcgccagccgctggctgctgaagagaggagagctgttcctggtggaggagaccggcctcttcaggaagatcgccagccggcccacctgctacctgttcctgttcaatgatgtgctggtggtgaccaagaagaagtctgaggagagctacatggtgcaggactatgcccagatgaaccacatccaggtggagaagattgagcccagcgagctgcccctgcccggcggcggcaacagaagcagctctgtgccccaccccttccaggtgaccctgctgagaaattctgagggccggcaggagcagctgctgctgagcagtgacagcgccagtgaccgggcccgctggatcgtggccctgacccacagcgagcggcagtggcagggcctgagcagcaagggggacctgccccaggtggagatcaccaaggccttctttgccaagcaggctgatgaggtgaccctgcagcaggctgatgtggtgctggtgctgcagcaggaggatggctggctgtatggagagcggctgagagatggagagaccggctggttcccagaagattttgcccgcttcatcaccagccgggtggccgtggagggcaatgtgcggaggatggagcggctgcgggtggagacagatgtgtag

SEQ ID NO: 20805 - DNA, 1890 bp, synthetic construct
  source 1..1890: mol_type = other DNA; note = Synthetic coding sequence
atggaggagagccccctgagccgggcccccagcagaggaggagtgaacttcctgaatgtggcccggacctacatccccaacaccaaggtggagtgccactacaccctgcccccaggcaccatgcccagcgccagtgactggattggcatcttcaaggtggaggccgcctgtgtgcgggactaccacacctttgtgtggagctctgtgcctgagagcaccacagatggcagccccatccacacctctgtgcagttccaggcctgcaaccagctggatgagagccagcaggagagaaatgacctgatgcagctgaagctgcagctggagggccaggtgacagagctgcggagccgggtgcaggagctggagcgggccctggccacagcccggcaggagcacacagagctgatggagcagtacaagggcatcagccgcagccatggagagatcacagaggagcgggacatcctgagccggcagcagggcgaccacgtggcccgcatcctggagctggaggatgacatccagaccatcagcgagaaggtgctgaccaaggaggtggagctggaccggctgcgggacacagtgaaggccctgacccgggagcaggagaagctgctgggccagctgaaggaggtgcaggccgacaaggagcagagcgaggccgagctgcaggtggcccagcaggagaaccaccacctgaacctggacctgaaggaggccaagtcctggcaggaggagcagagcgcccaggcccagaggctgaaggacaaggtggcccagatgaaggacaccctgggccaggcccagcagagggtggccgagctggagcccctgaaggagcagctgcggggggcccaggagctggccgccagcagccagcagaaggccaccctgctgggggaggagctggccagcgctgctgctgcccgggacaggaccatcgccgagctgcacaggagccggctggaggtggccgaggtgaatggccgcctggccgagctgggcctgcacctgaaggaggagaagtgccagtggagcaaggagagagctggcctgctgcagagcgtggaggccgagaaggacaagatcctgaagctgtctgctgagatcctgcggctggagaaggctgtgcaggaggagaggacccagaaccaggtgttcaagacagagctggcccgggagaaggacagcagcctggtgcagctgtctgagagcaagcgggagctgacagagctgcggagcgccctgcgggtgctgcagaaggagaaggagcagctgcaggaggagaagcaggagctgctggagtacatgaggaagctggaggcccggctggagaaggtggctgatgagaagtggaatgaagatgccaccacagaagatgaggaggccgctgtgggcctgagctgcccagctgccctgacagattctgaagatgagagccctgaggacatgaggctgcccccctacggcctgtgtgagcggggggaccccggcagcagccctgctggcccccgggaggccagccccctggtggtgatcagccagcctgcccccatcagcccccacctgagcggccctgctgaggacagcagcagtgacagcgaggccgaggatgagaagtctgtgctgatggctgctgtgcagagcggcggggaggaggccaacctgctgctgcctgagctgggcagcgccttctatgacatggccagcggcttcaccgtgggcaccctgtctgagaccagcactggaggccctgccacccccacctggaaggaatgtcccatctgcaaggagcgcttccctgctgagagtgacaaggatgccctggaggaccacatggatggccacttcttcttcagcacccaggaccccttcacctttgaatag

SEQ ID NO: 20806 - DNA, 2451 bp, synthetic construct
  source 1..2451: mol_type = other DNA; note = Synthetic coding sequence
atgcccctgagcagccccaatgctgctgccacagccagtgacatggacaagaacagcggcagcaacagcagcagcgccagcagcggcagcagcaagggccagcagccccccaggtctgccagcgctggccctgctggggagagcaagcccaagagtgatggcaagaacagcagcggcagcaagcgctacaacaggaagcgggagctgagctaccccaagaatgaaagcttcaacaaccagagccgccgcagcagcagccagaagagcaagaccttcaacaagatgccaccccagaggggcggcggcagcagcaagctgttcagcagcagcttcaacggcggcagaagagatgaggtggccgaggcccagagagctgagttctccccagcccagttcagcggccccaagaagatcaacctgaaccacctgctgaacttcacctttgagccccggggccagacaggccactttgagggcagcggccacggctcctggggcaagaggaacaagtggggccacaagcccttcaacaaggagctgttcctgcaggccaactgccagtttgtggtgtctgaggaccaggactacacagcccactttgctgaccctgacaccctggtgaactgggactttgtggagcaggtgcgcatctgcagccatgaggtgcccagctgccccatctgcctgtacccacccacagctgccaagatcacccgctgtggccacatcttctgctgggcctgcatcctgcactacctgagcctgtctgagaagacctggagcaagtgccccatctgctacagctctgtgcacaagaaggacctgaagtctgtggtggccacagagagccaccagtatgtggtgggggacaccatcaccatgcagctgatgaagcgggagaagggcgtgctggtggccctgcccaagagcaagtggatgaatgtggaccaccccatccacctgggagatgagcagcacagccagtacagcaagctgctgctggccagcaaggagcaggtgctgcaccgggtggtgctggaggagaaggtggccctggagcagcagctggccgaggagaagcacaccccagagagctgcttcatcgaggccgccatccaggagctgaagacccgggaggaggccctgagcggcctggccggcagcagaagagaggtgactggagtggtggccgccctggagcagctggtgctgatggcccccctggccaaggagagcgtcttccagcccaggaagagcctgctgcagcagggcgtgctggagtacctgagcgcctttgatgaggagaccacagaggtgtgcagcctggacacccccagccggcccctggccctgcccctggtggaggaggaggaggccgtgtctgagcctgagcctgagggcctgcctgaggcctgtgatgacctggagctggctgatgacaacctgaaggagggcaccatctgcacagagagcagccagcaggagcccatcaccaagagcggcttcacccggctgagcagcagcccctgctactacttctaccaggctgaagatggccagcacatgttcctgcaccctgtgaatgtgcgctgcctggtgcgggagtatggcagcctggagaggagccctgagaagatcagcgccaccgtggtggagattgctggctacagcatgtctgaagatgtgcggcagaggcaccgctacctgagccacctgcccctgacctgtgagttcagcatctgtgagctggccctgcagccccctgtggtgtccaaggagaccctggagatgttcagtgatgacatcgagaagaggaagaggcagaggcagaagaaggcccgggaggagcggcggcgggagaggagaattgaaattgaggagaacaagaagcagggcaagtacccagaggtgcacatccccctggagaacctgcagcagtttcctgccttcaacagctacacctgcagcagtgacagcgccctgggccccaccagcacagagggccatggagccctgagcatcagccccctgagccgcagccctggcagccatgctgacttcctgctgacccccctgagccccacagccagccagggcagccccagcttctgtgtgggcagcctggaggaggacagccccttccccagctttgcccagatgctgcgggtgggcaaggccaaggcagatgtgtggcccaagacagcccccaagaaggatgagaacagcctggtgcccccagcccctgtggacagtgatggagagagtgacaacagcgacagagtgcctgtgcccagcttccagaacagcttcagccaggccatcgaggccgccttcatgaagctggacaccccagccaccagtgaccccctgtctgaggagaagggcggcaagaagaggaagaagcagaagcagaagctgctcttcagcacctctgtggtgcacaccaagtag

SEQ ID NO: 20807 - DNA, 429 bp, synthetic construct
  source 1..429: mol_type = other DNA; note = Synthetic coding sequence
atggccagccctgggaaggacaactacaggatgaagagctacaagaacaaggccctgaacccccaggagatgagaagaagaagagaggaggagggcatccagctgaggaagcagaagcgggaggagcagctgttcaagagaagaaatgtgtacctgcccagaaatgatgagagcatgctggagagccccatccaggaccctgacatcagcagcacagtgcccatccctgaggaggaggtggtgaccacagacatggtgcagatgatcttcagcaacaatgctgaccagcagctgacagccacccagaagttcaggaagctgctgagcaaggagcccaacccccccatcgaccaggtgatccagaagccaggagtggtgcagagatttgtgaagttcctggagagaaatgaaaactgcaccctgcagtag

SEQ ID NO: 20808 - DNA, 297 bp, synthetic construct
  source 1..297: mol_type = other DNA; note = Synthetic coding sequence
atgtctgagcagggcgacctgaaccaggccatcgccgaggagggcggcacagagcaggagacagccaccccagaaaatggcatcgtgaagtctgagagcctggatgaggaggagaagctggagctgcagaggcggctggaggcccagaaccaggagaggaggaagagcaagagcggggccggcaagggcaagctgaccaggagcctggccgtgtgtgaggagagcagcgcccggcctggaggagagagcctgcaggaccaggagagcatccacctgcagctgagcagcttctcctag

SEQ ID NO: 20809 - DNA, 1917 bp, synthetic construct
  source 1..1917: mol_type = other DNA; note = Synthetic coding sequence
atggagaacctgcagaccaacttcagcctggtgcagggcagcaccaagaagctgaatggcatgggagatgatggcagccccccagccaagaagatgatcacagacatccacgccaacgggaagaccatcaacaaggtgcccaccgtgaagaaggagcacctggatgattatggagaggcccctgtggagacagatggagagcacgtgaagaggacctgcacctctgtgcctgagaccctgcacctgaaccccagcctgaagcacaccctggcccagttccacctgagcagccagagcagcctgggcggccctgctgccttcagcgcccggcacagccaggagagcatgagccccaccgtcttcctgcccctgcccagcccccaggtgctgcccggccccctgctgatccccagcgacagcagcacagagctgacccagacagtgctggagggggagagcatcagctgcttccaggtgggcggggagaagaggctgtgcctgccccaggtgctgaacagcgtgctgcgggagttcaccctgcagcagatcaacacagtgtgtgatgagctgtacatctactgcagccgctgcaccagtgaccagctgcacatcctgaaggtgctgggcatcctgcccttcaatgcccccagctgtggcctcatcaccctgacagatgcccagaggctgtgcaatgccctgctgcggcccaggaccttcccccagaatggatctgtgctgcctgccaagagcagcctggcccagctgaaggagaccggcagcgcctttgaggtggagcatgaatgtctgggcaagtgccagggcctgtttgccccccagttctacgtgcagccagatgccccctgcatccagtgcctggagtgctgcggcatgtttgccccccagacctttgtgatgcacagccacaggagcccagacaagaggacctgccactggggctttgagagcgccaagtggcactgctacctgcacgtgaaccagaagtacctgggcaccccagaggagaagaagctgaagatcatcctggaggagatgaaggagaagttctccatgaggtctgggaagaggaaccagagcaagacagatgcccccagcggcatggagctgcagagctggtaccctgtgatcaagcaggagggggaccacgtgtcccagacccacagcttcctgcaccccagctactacctgtacatgtgtgacaaggtggtggcccccaacgtgtccctgaccagcgctgtgtcccagagcaaggagctgaccaagacagaggccaatgccagcatcagcaacaacagcaccagcaagaggaagtctgagagcgccacctgcaacctggtgcgggacatcaacaaggtgggcatcggcctggtggccgccgccagcagccccctgctggtgaaggatgtgatctgtgaagatgacaagggcaagatcatggaggaggtgatgaggacctacctgaagcagcaggagaagctgaacctgatcctgcagaagaagcagcagctgcagatggaggtgaagatgctgagcagcagcaagtccatgaaggagctgacagaggagcagcagaacctgcagaaggagctggagagcctgcagaatgaacatgcccagaggatggaggagttctacgtggagcagaaggacctggagaagaagctggagcagatcatgaagcagaagtgcacctgtgacagcaacctggagaaggacaaggaggccgagtatgccggccagctggccgagctgcggcagaggctggaccatgctgaggccgaccggcaggagctgcaggatgagctgcggcaggagcgggaggcccggcagaagctggagatgatgatcaaggagctgaagctgcagatcctgaagagcagcaagacagccaaggagtag

SEQ ID NO: 20810 - DNA, 1530 bp, synthetic construct
  source 1..1530: mol_type = other DNA; note = Synthetic coding sequence
atgaagaggggccgcctgcccagcagcagtgaagattctgatgacaatggcagcctgagcaccacctggagccagaacagccgcagccagcaccggcgcagcagctgcagcagacatgaggacaggaagcccagcgaggtgttcagaacagacctgatcacagccatgaagctgcatgacagctaccagctgaacccagatgagtactacgtgctggccgacccctggaggcaggagtgggagaagggcgtgcaggtgcctgtgtccccaggcaccatcccccagcctgtggcccgggtggtgtctgaggagaagagcctgatgttcatccggcccaagaagtacatcgtgagcagcggcagcgagcccccagagctgggctacgtggacatccgcaccctggccgacagcgtgtgccgctatgacctgaatgacatggatgctgcctggctggagctgaccaatgaggagttcaaggagatgggcatgcctgagctggatgagtacaccatggagcgggtgctggaggagtttgagcagcgctgctatgacaacatgaaccacgccatcgagacagaggagggcctgggcatcgagtatgatgaagatgtggtgtgtgatgtgtgccagagcccagatggagaagatggaaatgagatggtgttctgtgacaagtgcaacatctgtgtgcaccaggcctgctacggcatcctgaaggtgcctgagggctcctggctgtgcaggacctgtgccctgggcgtgcagcccaagtgcctgctgtgccccaagaagggcggggccatgaagcccaccaggagcggcaccaagtgggtgcacgtgtcctgtgccctgtggatccctgaggtgtccatcggcagccctgagaagatggagcccatcaccaaggtgagccacatccccagcagccgctgggccctggtgtgcagcctgtgcaatgagaagtttggagccagcatccagtgcagcgtgaagaactgcaggacagccttccacgtgacctgtgcctttgaccggggcctggagatgaagaccatcctggctgaaaatgatgaggtgaagttcaagagctactgccccaagcacagcagccacaggaagccagaggagagcctgggcaagggggccgcccaggagaatggagcccctgagtgcagccccaggaaccccctggagccctttgccagcctggagcagaaccgggaggaggcccaccgggtgtctgtgaggaagcagaagctgcagcagctggaggatgagttctacacctttgtgaacctgctggatgtggcccgggccctgcggctgcctgaggaggtggtggacttcctgtaccagtactggaagctgaagaggaaggtgaacttcaacaagcccctcatcacccccaagaaggatgaggaggacaacctggccaagcgggagcaggatgtgctcttccggcggctgcagctgttcacccacctgcggcaggacctggagcgggtgatgattgacacagacaccctgtag

SEQ ID NO: 20811 - DNA, 354 bp, synthetic construct
  source 1..354: mol_type = other DNA; note = Synthetic coding sequence
atggccttcagcggccgggcccggccctgcatcatcccagaaaatgaggagatccccagggctgccctgaacacagtgcatgaggccaacggcacagaagatgaaagagctgtgtccaagctgcagaggaggcacagtgatgtgaaggtgtacaaggagttctgtgacttctacgccaagttcaacatggccaatgccctggccagcgccacctgtgagcgctgcaagggcggctttgccccagctgagaccatcgtgaacagcaatggagagctgtaccacgagcagtgctttgtgtgtgcccagtgcttccagcagtttcctgagggcctcttctatgaggagaggacatag

SEQ ID NO: 20812 - DNA, 1110 bp, synthetic construct
  source 1..1110: mol_type = other DNA; note = Synthetic coding sequence
atgaaggacacccaggacatccaggaggccagcaaggccatgcagaacaaggtgcatgagcaggaggacaagaatgagaagcagaagcagcgggaggacaagctgggcgtgtacagcctggtgcacttcagccccaagatgctgggctctgtggccaccaccctgcccctgagcagcagcaacagcagcggcatgcccctgggctactacctgagcagcccccagatcagccgggtgaccatcagcaccaccggccagctgaccagcaaggccaccgtgggcagctgcagccgggtggagaacagcctggatgccagccccttctctgtgcccaagaagcaggatgagagccccatgattggagatggagaggactacttcctgagcctgtttggagacagcaagaagctgacagcccacagcaactacacccagaagaccctgaagtacttctccatgatcctggaggaggtgggccagttcaccagcagcagcctgggagatgtggagattgctgaggtgaatgtgaagggcctgtttgtgaagctgatcaacagcagcctggacaaggagatggccatcggggaccacatcctgcagcagaatgtgaatggccagaccatcagcctgtaccgcttcctgcccaacatcgtgatgcaggccaacagcacagtgacagccatcgcctggtacacccccatccactggaagcaggcctgggagaagctggatgctgatgtggagttcaaccgctgcagcgtggtgagccccaccttcaggaagagggtcttccagtggacagccagcacagccaccatcaccaaggagaagcaggaccagcccaagaaggacatcagcaactaccaggtggagcaggcccaggtgctgctgaagcgggagaaggagatcccccccaccgtcttccccaacagaagcccctggtgccagaacccctacgtgtctgcccacccctactgccccctgattgagccccacaacaccagcacagctgggggccgcctggaccggcagcccaggaccaggagcacccggcccaacagagccagcggcagcaagaagaagaagaccagcgagagccagaagcagtag

SEQ ID NO: 20813 - DNA, 681 bp, synthetic construct
  source 1..681: mol_type = other DNA; note = Synthetic coding sequence
atggaccagagccgggtgctgctgtgggtgaaggccgagcccttcatcgtgggcgccctgcaggtgcccccacccagcaagttcagcctgcactacctgaggaagatcagcacctacgtgcagatccgggccacagaaggagcctacccccggctgtactggagcacctggaggcacatcgcctgtgggaagctgcagctggccaaggacctggcctggctgtactttgagatctttgacagcctgtccatgaagaccccagaggagcggctggagtggagcgaggtgctgagcaactgcatgtctgaggaggaggtggagaagcagaggaaccagctgtctgtggacaccctgcagttcctgctcttcctgtacatccagcagctgaacaaggtgtccctgcggaccagcctgattggagaggagtggcccagccccaggaacaagagccagagcccagacctgacagagaagagcaactgccacaacaagaactggaatgactacagccaccaggcctttgtgtatgaccacctgagtgacctgctggagctgctgctggaccccaagcagctgacagccagcttccacagcacccacagcagcctggtgtcccgggaggccgtggtggccctgtccttcctgattgagggcaccatcagccgggccaggaagatctag

SEQ ID NO: 20814 - DNA, 747 bp, synthetic construct
  source 1..747: mol_type = other DNA; note = Synthetic coding sequence
atgaatgaccggctgggagaagatgagagcctgctgatgaagctgtacagcttcctgctgaatgacagccccctgaaccccctgctggccagcttcttcagcaaggtgctgagcatcctgatcagcaggaagccagagcagatcgtggacttcctgaagaagaagcatgactttgtggacctgatcatcaagcacatcggcaccagcgccatcatggacctgctgctgcggctgctgacctgcatcgagcccccccagccccggcaggatgtgctgaactggctgaatgaggagaagatcatccagaggctggtggagatcgtgcaccccagccaggaggaggacagacacagcaatgccagccagagcctgtgtgaaattgtgcggctgagccgggaccagatgctgcagatccagaacagcacagagccagacctgctgctggccagcggcctgcctgacctgaatggagtgggcccccggggcctgctggtggacaacatgctgtggagccggctggtggtgtcctttgccagccacggccagggcctggcccccctggtggcccacgtggcctctgtggtgtggacctggtggctgctgcaccccaccgtggcctctgtggtgtggacctggtggctgctgcaccccacccagggcaacagcgtgctgctgcaccccacagactgctgggagcgggccagcggcaccttcctgtggggcatcatcctcttctgcctgtcctag

SEQ ID NO: 20815 - DNA, 1869 bp, synthetic construct; identical to SEQ ID NO: 19023
  source 1..1869: mol_type = other DNA; note = Synthetic coding sequence

SEQ ID NO: 20816 - DNA, 4008 bp, synthetic construct
  source 1..4008: mol_type = other DNA; note = Synthetic coding sequence
atggaggagatccctgtgaaggtggccgtgcgcatccggcccctgctgtgcaaggaggccctgcacaaccaccaggtgtgtgtgcgggtcatccccaacagccagcaggtgatcatcggccgggacagagtcttcacctttgattttgtgtttgggaagaacagcacccaggatgaggtgtacaacacctgcatcaagcccctggtgctgagcctgattgagggctacaatgccaccgtgtttgcctacggccagacaggcagcggcaagacctacaccatcggcggcggccacatcgcctctgtggtggagggccagaagggcatcatcccccgggccatccaggagatcttccagagcatcagcgagcaccccagcattgacttcaacgtgaaggtgtcctacatcgaggtgtacaaggaggacctgcgggacctgctggagctggagacctccatgaaggacctgcacatccgggaggatgagaagggcaacacagtcatcgtgggcgccaaggaatgtcatgtggagagcgctggggaggtgatgagcctgctggagatgggaaatgctgcccggcacacaggcaccacccagatgaatgagcacagcagccgcagccacgccatcttcaccatcagcatctgccaggtgcacaagaacatggaggccgcagaagatggctcctggtacagccccaggcacatcgtgtccaagttccactttgtggacctggccggcagcgagcgggtgaccaagacaggcaacacaggagagcgcttcaaggagagcatccagatcaacagcggcctgctggccctgggcaatgtcatcagcgccctgggggaccccaggaggaagagcagccacatcccctacagagatgccaagatcacccggctgctgaaggacagcctgggcggcagcgccaagacagtgatgatcacctgtgtgagccccagcagcagcaactttgatgagagcctgaacagcctgaagtatgccaacagagccaggaacatccggaacaagcccaccgtgaacttcagccctgagagtgacagaattgatgagatggagtttgagatcaagctgctgcgggaggccctgcagagccagcaggccggcgtgtcccagaccacccagatcaaccgggagggcagcccagacaccaaccgcatccacagcctggaggagcaggtggcccagctgcagggagaatgtctgggctaccagtgctgcgtggaggaggccttcaccttcctggtggacctgaaggacacagtgcggctgaatgagaagcagcagcacaagctgcaggagtggttcaacatgatccaggaggtgaggaaggctgtgctgaccagcttccggggcatcggcggcacagccagcctggaggagggcccccagcacgtgacagtgctgcagctgaagcgggagctgaagaagtgccagtgtgtgctggccgcagatgaggtggtgttcaaccagaaggagctggaggtgaaggagctgaagaaccaggtgcagatgatggtgcaggagaacaagggccatgctgtgtccctgaaggaggcccagaaggtgaaccggctgcagaatgagaagatcatcgagcagcagctgctggtggaccagctgtctgaggagctgaccaagctgaacctgtctgtgaccagcagcgccaaggagaactgtggagatggcccagatgcccgcatccctgagcggcggccctacacagtgccctttgacacccacctgggccactacatctacatccccagccggcaggacagcaggaaggtgcacaccagcccccccatgtacagcctggaccgcatctttgctggcttccgcaccaggagccagatgctgctgggccacatcgaggagcaggacaaggtgctgcactgccagttcagtgacaacagtgatgatgaggagagcgagggccaggagaagagcggcacccgctgccgcagccgctcctggatccagaagccagacagcgtgtgcagcctggtggagctgagtgacacccaggatgagacccagaagagtgacctggagaatgaagacctgaagattgactgcctgcaggagagccaggagctgaacctgcagaagctgaagaacagcgagcgcatcctgacagaggccaagcagaagatgagggagctgaccatcaacatcaagatgaaggaggacctgatcaaggagctgatcaagacaggaaatgatgccaagtctgtgtccaagcagtacagcctgaaggtgaccaagctggagcatgatgctgagcaggccaaggtggagctgattgagacccagaagcagctgcaggagctggagaacaaggacctgagtgatgtggccatgaaggtgaagctgcagaaggagttcaggaagaagatggatgctgccaagctgcgggtgcaggagatccagctgaagacaggccaggaggagggcctgaagcccaaggccgaggacctggatgcctgcaacctgaagaggaggaagggcagctttggcagcattgaccacctgcagaagctggatgagcagaagaagtggctggatgaggaggtggagaaggtgctgaaccagaggcaggagctggaggagctggaggccgacctgaagaagcgggaggccatcgtgtccaagaaggaggccctgctgcaggagaagagccacctggagaacaagaagctgcggagcagccaggccctgaacacagacagcctgaagatcagcacccggctgaacctgctggagcaggagctgtctgagaagaatgtgcagctgcagaccagcacagctgaggagaagaccaagatcagcgagcaggtggaggtgctgcagaaggagaaggaccagctgcagaagagaagacacaacgtggatgagaagctgaagaatggccgggtgctgagccctgaggaggagcacgtgctcttccagctggaggagggcatcgaggccctggaggccgccatcgagtacagaaatgaaagcatccagaaccggcagaagagcctgcgggccagcttccacaacctgagcagaggagaggccaacgtgctggagaagctggcctgcctgagccctgtggagatccgcaccatcctcttccgctacttcaacaaggtggtgaacctgcgggaggccgagaggaagcagcagctgtacaatgaggagatgaagatgaaggtgctggagcgggacaacatggtgcgggagctggagagcgccctggaccacctgaagctgcagtgtgaccggcggctgaccctgcagcagaaggagcacgagcagaagatgcagctgctgctgcaccacttcaaggagcaggatggagagggcatcatggagaccttcaagacctatgaggacaagatccagcagctggagaaggacctgtacttctacaagaagaccagccgggaccacaagaagaagctgaaggagctggtgggggaggccatccggcggcagctggcccccagcgagtaccaggaggccggagatggagtgctgaagccagagggcggcggcatgctgtctgaggagctgaagtgggccagcaggcctgagagcatgaagctgagcggccgggagcgggagatggacagcagcgccagcagcctgcggacccagcccaacccccagaagctgtgggaggacatccctgagctgccccccatccacagcagcctggcccctccttctggccacatgctgggcaatgaaaacaagacagaaacagatgacaaccagttcaccaagagccacagccggctgagcagccagatccaggtggtgggcaatgtgggccgcctgcatggagtgacccctgtgaagctgtgcaggaaggagctgcggcagatcagcgccctggagctgagcctgcggcgcagcagcctgggcgtgggcatcggctccatggctgctgacagcattgaggtgtccaggaagccccgggacctgaagacctag

SEQ ID NO: 20817 - DNA, 2745 bp, synthetic construct
  source 1..2745: mol_type = other DNA; note = Synthetic coding sequence
atggaggagcgcatcaccaccctggagaagcgctacctggccgcccagcgggaggccaccagcatccatgacctgaatgacaagctggagaatgagctggccaacaaggagagcctgcaccggcagtgtgaggagaaggcccggcacctgcaggagctgctggaggtggccgagcagaagctgcagcagaccatgaggaaggccgagaccctgcctgaggtggaggccgagctggcccagagaattgctgccctgaccaaggccgaggagcggcacggcaacatcgaggagcacctgcggcagctggagggccagctggaggagaagaaccaggagctggcccgggtgcggcagcgggagaagatgaatgaagaccacaacaagaggctgagtgacacagtggaccggctgctgtctgagagcaatgaaaggctgcagctgcacctgaaggagaggatggccgccctggaggagaagaacaccctcatccaggagctggagagcagccagaggcagatcgaggagcagcaccaccacaagggccgcctgtctgaggagattgagaagctgcggcaggaggtggaccagctgaagggccggggcggcccctttgtggatggagtgcacagccgcagccacatgggcagcgctgctgatgtgcgcttcagcctgggcaccaccacccacgcccctcctggggtgcaccggcgctacagcgccctgcgggaggagagcgccaaggactgggagaccagccccctgcccggcatgctggccccagctgctggccctgcctttgacagcgaccctgagatcagtgatgtggatgaagatgagcccggcggcctggtgggcagcgcagatgtggtgagccccagcggccacagtgatgcccagaccctggccatgatgctgcaggagcagctggatgccatcaatgaggagatccgcatgatccaggaggagaaggagagcacagagctgcgggcagaggagattgagaccagggtgaccagcggctccatggaggccctgaacctgaagcagctgaggaagaggggcagcatccccaccagcctgacagccctgagcctggccagcgccagcccccccctgagcggccgcagcacccccaagctgaccagccgctctgctgcccaggacctggacaggatgggcgtgatgaccctgcccagcgacctgaggaagcacaggaggaagctgctgagccctgtgtcccgggaggagaaccgggaggacaaggccaccatcaagtgtgagaccagcccccccagcagccccaggaccctgcggctggagaagctgggccacccagccctgagccaggaggagggcaagagcgccctggaggaccagggcagcaaccccagcagcagcaacagcagccaggacagcctgcacaagggggccaagaggaagggcatcaagagcagcatcggccgcctgtttgggaagaaggagaagggccgcctcatccagctgagcagagatggagccactggacatgtgctgctgacagattctgagttctccatgcaggagcccatggtgcctgccaagctgggcacccaggccgagaaggaccggcggctgaagaagaagcaccagctgctggaggatgcccggaggaagggcatgccctttgcccagtgggatggccccaccgtggtgtcctggctggagctgtgggtgggcatgcctgcctggtacgtggccgcctgccgggccaacgtgaagagcggggccatcatgtctgccctgagtgacacagagatccagcgggagatcggcatcagcaatgccctgcaccggctgaagctgcggctggccatccaggagatggtgtccctgaccagccccagcgccccacccaccagcaggaccagcagtggaaatgtgtgggtgacccatgaggagatggagaccctggagaccagcaccaagacagacagcgaggagggctcctgggcccagaccctggcctatggagacatgaaccacgagtggattggaaatgagtggctgcccagcctgggcctgccccagtaccgcagctacttcatggagtgcctggtggatgccaggatgctggaccacctgaccaagaaggacctgcgggtgcacctgaagatggtggacagcttccacaggaccagcctgcagtatggcatcatgtgcctgaagaggctgaactatgacaggaaggagctggagaagagaagagaggagagccagcacgagatcaaggatgtgctggtgtggaccaatgaccaggtggtgcactgggtgcagagcatcggcctgcgggactatgccggcaacctgcatgaaagtggagtgcacggggccctgctggccctggatgagaactttgaccacaacaccctggccctgatcctgcagatccccacccagaacacccaggcccggcaggtgatggagcgggagttcaacaacctgctggccctgggcacagacaggaagctggatgatggagatgacaaggtgttcagaagagcccccagctggaggaagcgcttccggccccgggagcaccacggccggggcggcatgctgagcgccagcgctgagaccctgcctgctggcttccgggtgtccaccctgggcaccctgcagcccccaccagccccacccaagaagatcatgcctgaggcccacagccactacctgtatggccacatgctgagcgccttccgggactag

SEQ ID NO: 20818 - DNA, 1494 bp, synthetic construct
  source 1..1494: mol_type = other DNA; note = Synthetic coding sequence
gatgtgggcggggaccggccctgggacagcggcaacacccagctgccccccaggaaccctgtgaaggccaatgccatgtttggagctggagatgaagatgacacagacttcctgagccccagcggcggggcccggctggccagcctgtttggcctggaccaggccgctgctggccatggaaatgagttcttccagtacacagcccccaagcagcccaagaagggccagggcacagctgccactggaaaccaggccacccccaagacagccccagccaccatgagcacccccaccatcctggtggccacagctgtgcacgcctaccgctacaccaacggccagtatgtgaagcagggcaagtttggagctgctgtgctgggcaaccacacagcccgggagtaccgcatcctgctgtacatcagccagcagcagcctgtgacagtggcccgcatccacgtgaactttgagctgatggtgcggcccaacaactacagcaccttctatgatgaccagaggcagaactggagcatcatgtttgaaagtgagaaggctgctgtggagttcaacaagcaggtgtgcatcgccaagtgcaacagcaccagcagcctggatgctgtgctgagccaggacctgattgtggctgatggccctgctgtggaggtgggggacagcctggaggtggcctacacaggctggctgttccagaaccacgtgctgggccaggtgtttgacagcacagccaacaaggacaagctgctgcggctgaagctgggcagcggcaaggtgatcaagggctgggaggatggcatgctgggcatgaagaagggcggcaagaggctgctgattgtgcccccagcctgtgctgtgggcagcgagggcgtgattggctggacccaggccacagacagcatcctggtgtttgaggtggaggtgcggcgggtgaagtttgcccgggacagcggcagtgatggccacagcgtgagcagccgggacagcgctgcccccagccccatccctggagctgacaacctgtctgctgaccctgtggtgagcccccccaccagcatccccttcaagagcggggagcccgccctgcggaccaagagcaacagcctgtctgagcagctggccatcaacaccagcccagatgctgtgaaggccaagctgatcagcaggatggccaagatgggccagcccatgctgcccatcctgcccccccagctggacagcaatgattctgaaattgaagatgtgaacaccctgcagggcggcggccagcctgtggtgacccccagcgtgcagcccagcctgcacccagcccacccagccctgccccagatgaccagccaggccccccagcccagcgtgacaggcctgcaggcccccagcgctgccctgatgcaggtgagcagcctggacagccacagcgctgtgtctggaaatgcccagagcttccaggtgaccttctacaaccgcatcaactacatcctgtag

SEQ ID NO: 20819 - DNA, 462 bp, synthetic construct
  source 1..462: mol_type = other DNA; note = Synthetic coding sequence
atgaacctggccgagatctgtgacaatgccaagaagggccgggagtatgccctgctgggcaactatgacagctccatggtgtactaccagggcgtgatgcagcagatccagaggcactgccagagcgtgcgggaccctgccatcaagggcaagtggcagcaggtgcggcaggagctgctggaggagtatgagcaggtgaagagcatcgtgtccaccctggagagcttcaagattgacaagcccccagacttccctgtgtcctgccaggatgagcccttccgggaccctgctgtgtggcccccacctgtgcctgctgagcaccgggccccaccccagatccggcggcccaaccgggaggtgcggcccctgaggaaggagatggccggcgtgggcgcccggggccctgtgggccgggcccaccccatcagcaagtctgagaagcccagcaccagccgggactag

SEQ ID NO: 20820 - DNA, 627 bp, synthetic construct
  source 1..627: mol_type = other DNA; note = Synthetic coding sequence
atgttccaggtgcctgattctgagggcggccgggccggcagccgggccatgaagcccccaggaggagagagcagcaacctgtttggcagccctgaggaggccacccccagcagccggcccaacaggatggccagcaacatcttcggccccacagaggagccccagaacatccccaagaggaccaaccccccaggcggcaaaggaagtggcatctttgatgagagcacccctgtgcagacccggcagcacctgaaccccccaggcggcaagaccagtgacatcttcggcagccctgtgacagccaccagccggctggcccaccccaacaagcccaccaggaacagccgggacagagtggccatgttctccttcccctttgcccagatgtctggagtgggccggggcctggtgctgtgtgagcccggctgcagcgccagccctggaagacatgacagctgcctggagacccgggccttccagatggccggccgctgcctgtgtggagatgagatgggccacccctggcccagcctgatgtgcagccctggcctgcggggcaccggccggggcgtgcgggtgggccgctggggccgggcctggagcctggaccagcagcctgccagctag

SEQ ID NO: 20821 - DNA, 591 bp, synthetic construct
  source 1..591: mol_type = other DNA; note = Synthetic coding sequence
atgcccttcagcaaggagaagtacatcctggacagcagccctgagaagctgcacaaggagctggaggaggagctgaagctgagcagcacagacctgcggagccacgcctggtaccacggccgcatcccccgggaggtgtctgagaccctggtgcagagaaatggagacttcctgatccgggacagcctgaccagcctgggggactatgtgctgacctgccgctggaggaaccaggccctgcacttcaagatcaacaaggtggtggtgaaggccggggagagctacacccacatccagtacctgtttgagcaggagagctttgaccacgtgcctgccctggtgcgctaccacgtgggcagcaggaaggctgtgtctgagcagagcggggccatcatctactgccctgtgaacagaaccttccccctgcgctacctggaggccagctatggcctgggccagggcagcagcaagccagccagccctgtgagccccagcggccccaagggcagccacatgaagagaagatctgtgaccatgacagatggcctgacagctgacaaggtgaccaggagtgatggctgccccacctag

SEQ ID NO: 20822 - DNA, 1986 bp, synthetic construct
  source 1..1986: mol_type = other DNA; note = Synthetic coding sequence
atgcaggccaacggggccggcggcggcggcggcggcggcggcggcggcggcggcggcggcggcggcggcggcggccagggccagaccccagagctggcctgcctgagcgcccagaatggagagagcagccccagcagcagcagcagcgctggggacctggcccacgccaacggcctgctgcccagcgcccccagcgctgccagcaacaacagcaacagcctgaatgtgaacaacggggtgcctggaggagctgctgctgccagcagcgccaccgtggccgccgccagcgccaccacagctgccagcagcagcctggccaccccagagctgggcagcagcctgaagaagaagaagaggctgagccagagtgatgaagatgtgatccggctgattggccagcacctgaatggcctgggcctgaaccagacagtggacctgctgatgcaggagagcggctgccgcctggagcaccccagcgccaccaagttcaggaaccacgtgatggagggggactgggacaaggccgagaatgacctgaatgagctgaagcccctggtgcacagcccccacgccatcgtggtgcggggggccctggagatcagccagaccctgctgggcatcatcgtgaggatgaagttcctgctgctgcagcagaagtacctggagtacctggaggatggcaaggtgctggaggccctgcaggtgctgcgctgtgagctgacccccctgaagtacaacacagagcgcatccacgtgctgagcggctacctgatgtgcagccatgctgaggacctgcgggccaaggccgagtgggagggcaagggcacagccagccgcagcaagctgctggacaagctgcagacctacctgcccccatctgtgatgctgcccccccggcggctgcagaccctgctgcggcaggccgtggagctgcagagggaccgctgcctgtaccacaacaccaagctggacaacaacctggacagcgtgtccctgctgattgaccacgtgtgcagccggcggcagttcccctgctacacccagcagatcctgacagagcactgcaatgaggtgtggttctgcaagttcagcaatgatggcaccaagctggccaccggcagcaaggacaccaccgtcatcatctggcaggtggaccctgacacccacctgctgaagctgctgaagaccctggagggccacgcctacggcgtgtcctacatcgcctggagcccagatgacaactacctggtggcctgtggcccagatgactgcagcgagctgtggctgtggaatgtgcagacaggagagctgcggaccaagatgagccagagccatgaggacagcctgacctctgtggcctggaacccagatggcaagagatttgtgactggaggccagaggggccagttctaccagtgtgacctggatggcaacctgctggacagctgggagggcgtgcgggtgcagtgcctgtggtgcctgagtgatggcaagacagtgctggccagtgacacccaccagaggatccggggctacaactttgaggacctgacagacaggaacatcgtgcaggaggaccaccccatcatgtccttcaccatcagcaagaatggccgcctggccctgctgaatgtggccacccagggcgtgcacctgtgggacctgcaggacagagtgctggtgaggaagtaccagggcgtgacccagggcttctacaccatccacagctgcttcggcggccacaatgaagacttcatcgccagcggcagcgaggaccacaaggtgtacatctggcacaagaggtctgagctgcccatcgccgagctgaccggccacaccaggacagtgaactgtgtgtcctggaacccccagatccccagcatgatggccagcgccagtgatgatggcaccgtgcgcatctggggccctgcccccttcatcgaccaccagaacatcgaggaggagtgcagctccatggacagctag

SEQ ID NO: 20823 - DNA, 1113 bp, synthetic construct
  source 1..1113: mol_type = other DNA; note = Synthetic coding sequence
atggagaagaagaagatggtgacccagggcaaccaggagcccaccaccaccccagatgccatggtgcagcccttcaccaccatccccttccccccaccaccccagaatggcatccccacagaatatggagtgccccacacccaggactatgccggccagacaggagagcacaacctgaccctgtatggcagcacccaggcccacggggagcagagcagcaacagccccagcacccagaatggcagcctgaccacagaaggaggagcccagacagatggccagcagagccagacccagagcagcgagaacagcgagagcaagagcacccccaagaggctgcacgtgagcaacatccccttccgcttccgggaccctgacctgcggcagatgtttggccagtttgggaagatcctggatgtggagatcatcttcaatgaaagaggcagcaagggcttcggctttgtgacctttgagaacagcgcagatgctgaccgggcccgggagaagctgcatggaacagtggtggagggcaggaagattgaggtgaacaatgccacagcccgggtgatgaccaacaagaagatggtgaccccctatgccaacggctggaagctgagccctgtggtgggcgctgtgtatggccctgagctgtatgctgccagcagcttccaggctgatgtgtccctgggcaatgatgctgctgtgcccctgagcggccggggcggcatcaacacctacatccccctcatcagcctgcccctggtgcccggcttcccctaccccacagctgccaccacagctgctgccttccggggggcccacctgcggggccggggccgcacagtgtatggagctgtgcgggctgtgcccccaacagccatcccagcctacccaggagtggacatgcagcccacagacatgcacagcctgctgctgcagccccagccccccctgctgcagcccctgcagcccctgactgtgacagtgatggccggctgcacccagcccacccccaccatgcccctgcccctgcccctggccatggagctggccctgtggagggtgtacacagaggtggccacagctgacctgcccccaacagaggtgacctag

SEQ ID NO: 20824 - DNA, 348 bp, synthetic construct
  source 1..348: mol_type = other DNA; note = Synthetic coding sequence
atgccccacctgcccctggccagcttccggccccccttctggggcctgcggcacagccggggcctgccccgcttccacagcgtgtccacccagagcgagccccacggcagccccatcagcagaagaaaccgggaggccaagcagaagaggctgcgggagaagcaggccaccctggaggccgagattgctggggagagcaagagccctgctgagagcatcaaggcctggaggcccaaggagctggtgctgtatgagatccccaccaagccaggagagaagaaggatgtgtctggccccctgcccccagcctacagcccccgctacgtggaggccgcctggtacccctag

SEQ ID NO: 20825 - DNA, 3039 bp, synthetic construct
  source 1..3039: mol_type = other DNA; note = Synthetic coding sequence
atgctgctgaagagcatcttcatcgtgtacatcttcttctacagcatcagcgagctgagcctggacagcaccctgcatgctgtgaacctgcactgcaacaacatcagcaagattgaggccatcgaccacatctggaacctgcagcacctggacctgagcagcaaccagatcagccgcatcgagggcctgaacaccctgaccaagctgtgcaccctgaacctgagctgcaacctgatcaccaaggtggagggcctggaggagctgatcaacctgacccggctgaatgtgtcctacaaccacattgatgacctgagcggcctcatccccctgcacggcatcaagcacaagctgcgctacatcgacctgcacagcaacagaattgacagcatccaccacctgctgcagtgcatggtgggcctgcacttcctgaccaacctgatcctggagaaggatggagatgacaaccctgtgtgccgcctgcccggctacagagctgtgatcctgcagaccctgccccagctgcgcatcctggactgcaagaacatctttggagagcctgtgaacctgacagagatcaacagcagccagctgcagtgcctggagggcctgctggacaacctggtgtccagtgacagccccctgaacatcagtgaagatgagatcatcgacaggatgcctgtgatcacagcccccattgatgagctggtgcccctggagcagtttgccagcacccccagtgatgctgtgctgaccagcttcatgtctgtgtgccagagcagcgagcctgagaagaacaaccatgaaaatgacctgcagaatgagatcaagctgcagaagctggatgaccagatcctgcagctgctgaatgagaccagcaacagcattgacaacgtgctggagaaggacccccggcccaagagggacacagacatcaccagcgagagtgactatggcaacaggaaggagtgcaacaggaaggtgcccaggaggagcaagatcccctatgatgccaagaccatccagaccatcaagcaccacaacaagaactacaacagctttgtgtcctgcaacaggaagatgaagccaccctacctgaaggagctgtatgtgagcagcagcctggccaactgccccatgctgcaggagagcgagaagcccaagacagagatcatcaaggtggaccagagccacagcgaggacaacacctaccagagcctggtggagcagctggaccaggagcgggagaagcgctggagggctgagcaggccgagaacaagctgatggactacattgatgagctgcacaagcacgccaatgagaaggaggacatccacagcctggccctgctgaccacagaccggctgaaggagatcatcttccgggagaggaacagcaagggccagctggaggtgatggtgcacaagctgcagaatgagatcaagaagctgactgtggagctgatgaaggccaaggaccagcaggaggaccacctgaagcacctgcggaccctggagaagaccctggagaagatggagcggcagaagaggcagcagcaggccgcccagatccgcctcatccaggaggtggagctgaaggccagcgctgctgaccgggagatctacctgctgcggaccagcctgcaccgggagcgggagcaggcccagcagctgcaccagctgctggccctgaaggagcaggagcacaggaaggagctggagacccgggagttcttcacagatgctgacttccaggatgccctggccaaggagatcgccaaggaggagaagaagcatgagcagatgatcaaggagtaccaggagaagattgatgtgctgagccagcagtacatggacctggagaatgagttcagaattgccctgactgtggaggcccggcgcttccaggatgtgaaggatggctttgaaaatgtggccacagagctggccaagagcaagcacgccctgatctgggcccagaggaaagaaaatgaaagcagcagcctcatcaaggacctgacctgcatggtgaaggagcagaagaccaagctggccgaggtgtccaagctgaagcaggagacagctgccaacctgcagaaccagatcaacaccctggagatcctgattgaagatgacaagcagaagagcatccagatcgagctgctgaagcatgagaaggtgcagctgatcagcgagctggccgccaaggagagcctcatcttcggcctgaggacagagaggaaggtgtggggccacgagctggcccagcagggcagcagcctggcccagaacagaggcaagctggaggcccagatcgagagcctgagcagagaaaatgaatgtctgaggaagaccaatgaaagtgacagtgatgccctgcgcatcaagtgcaagatcattgatgaccagacagagaccatcaggaagctgaaggactgcctgcaggagaaggatgagcacatcaagaggctgcaggagaagatcacagaaattgagaagtgcacccaggagcagctggatgagaagagcagccagctggatgaggtgctggagaagctggagcggcacaatgaaaggaaggagaagctgaagcagcagctgaagggcaaggaggtggagctggaggagatcaggaaggcctacagcaccctgaacaggaagtggcatgacaagggggagctgctgtgccacctggagacccaggtgaaggaggtgaaggagaagtttgagaacaaggagaagaagctgaaggccgagcgggacaagagcattgagctgcagaagaatgccatggagaagctgcacagcatggatgatgccttcaagaggcaggtggatgccatcgtggaggcccaccaggccgagatcgcccagctggccaatgagaagcagaagtgcatcgacagcgccaacctgaaggtgcaccagatcgagaaggagatgagggagctgctggaggagacctgcaagaacaagaagaccatggaggccaagatcaagcagctggcctttgccctgaatgagatccagcaggacatgtag

SEQ ID NO: 20826 - DNA, 4665 bp, synthetic construct
  source 1..4665: mol_type = other DNA; note = Synthetic coding sequence
atgtctgccacctcctggttcctggtgagcagcagcggggcccggcaccggctgccccgggagctgatctttgtgggccgggaggagtgtgagctgatgctgcagagccgctctgtggacaagcagcacgccgtcatcaactatgaccaggacagagatgagcactgggtgaaggacctgggcagcctgaatggcacctttgtgaatgacatgaggatcccagaccagaagtatgtgaccctgaagctgaatgatgtgatccgcttcggctatgacagcaacatgtatgtgctggagcgggtgcagcaccgggtgcctgaggaggccctgaagcatgagaagtacaccagccagctgcaggtgtctgtgaagggcctggcccccaagaggtctgaggccctgcctgagcacaccccctactgtgaggccagcaaccccaggcctgagaagggggacagaagacctggaacagaagctgccagctaccgcacccccctgtatggccagcccagctggtggggagaagatgatggcagcaccctgcctgatgcccagaggcagggcgagccctacccagagcggcccaagggccctgtgcagcaggatggagagctgcacggcttccgggccccagctgagccccagggctgcagcttccggcgggagcccagctactttgagatccccaccaaggagaccccccagcccagccagcccccagaggtgcctgcccacgagatgcccaccaaggatgctgaggccggcggcggcggggccgcccctgtggtgcagagccacgccagcttcaccattgaatttgatgactgcagccctgggaagatgaagatcaaggaccacatcaccaagttcagcctgcggcagaggaggcctcctgggaaggaggccaccccaggagagatggtgtctgctgagaccaaggtggccgactggctggtgcagaatgaccccagcctgctgcaccgggtgggccctggagatgacagacacagcaccaagagtgacctgcctgtgcacaccaggaccctgaagggccacaagcatgaagatggcacccagagcgacagcgaggaccccctggccaaggccgccagcgctgctggggtgcccctggaggccagcggggagcaggtgcggctgcagaggcagatcaagagggacccccaggagctgctgcacaaccagcaggccttcgtcatcgagttctttgatgaggacacccccaggaagaagaggagccagagcttcacccacagccccagcggggaccccaaggctgacaagagaagaggccccaccccagctgaccgggaccggcccagcgtgcctgcccctgtgcaggccggcggccgcagcagcggcccccagagagctggcagcctgaagcgggagaagacagaggagcggctgggcagccccagccctgccagcaggaccccagcccggcccttcggctctgtgggcagaagaagccggctggcccaggacttcatggcccagtgcctgcgggagagcagccctgctgcccggcccagccctgagaaggtgccccctgtgctgcctgcccccctgacccctcatggcaccagccctgtgggcccccccaccccacctccagcccccacagacccccagctgaccaaggccaggaagcaggaggaggatgacagcctgagtgatgctggcacctacaccatcgagacagaggcccaggacacagaggtggaggaggccaggaagatgattgaccaggtgtttggagtgctggagagccctgagctgagccgggccagcagcgccaccttccggcctgtgatccggggggacagagatgaaagtgatgatggaggagtggcccagaggatggccctgctgcaggagtttgccagccggcccctgggcgccgccccccaggccgagcaccagggcctgcctgtgcccggcagccctgggggccagaagtgggtgagccgctgggccagcctggccgacagctacagcgaccccggcctgacagaagatggcctgggccggcggggcggggagcctgagggcagcctgcctgtgaggatgagaagaaggctgccccagctgcccagcgagagagctgacagccctgctggccctgagagcagcagaagaagtggccctggccccccagagctggacagcgagcagcccagccggctgtttggccaggaggagctggaccctgacagcctgagtgatgccagcggcagtgatggcggccggggccctgagcccggggtggagccccaggacagcagaagaagaagcccccaggagggccccacctggagccggggcagaagaagcccccgggcccctggagagcccaccccagccagcttcttcatcggggaccagaatggagatgctgtgctgagcaggaagcccctggccgcccctggagatggagagggcctgggccagacagcccagcccagccccccagccagagatggagtgtatgtgtctgccaatggaaggatggtgatccagctgcggcccggccgcagccctgagccagatggccctgccccagccttcctgcggcaggagagcttcaccaaggagcccgccagcggccccccagcccctgggaagccaccccacatcagcagccaccccctgctgcaggacctggccgccacccgggccgccaggatggacttccacagccaggacacccacctgatcctgaaggagacagaaacagccctggccgccctggaggcccggctgctgagcaacagcgtggatgctgaatgtgagggcggcagcaccccccggcccccagaagatgccctgagcggggacagtgatgtggacacagccagcacagtgtccctgcggagcggcaagagcggccccagccccaccaccccccagcccctgcgggcccagaaggagatgagccccagccccccagctgcccaggaccccggcggcacagccctggtgtctgcccgggagcagagcagcgagcggcagcaccaccccctgggccccacagacatgggccgcggggagcctgtgagaagaagtgccatccggcggggccaccggccccggggcagcctggactggcccagcgaggagcggggccctgtgctggcccacctgcccagcagtgatgtgatggccagcaaccacgagaccccagaggccactggagctggccgcctgggcagcaggaggaagccagctgcccccccacccagccctgctgcccgggaggagcagagccgcagcagcgccagcagccagaagggcccccaggccctgaccaggagcaacagcctgagcaccccccggcccacccgggccagccggctgcggcgggcccggctgggagatgccagtgacacagaagctgctgatggagagcggggcagcctgggcaaccctgagcctgtgggccggcctgctgctgagcaggccaagaagctgagccggctggacatcctggccatgcccaggaagagagctggcagcttcaccggcaccagtgaccctgaggccgccccagcccggaccagcttcagcggccgctctgtggagctgtgctgtgccagcaggaagcccaccatggccgaggcccgggctgtgtccaggaaggccgccaacacagccaccaccaccggcccccggcagcccttcagccgggcccggagcggcagcgcccgctacaccagcaccacccagacccccagggctggcagcagcagccgggcccggagccgggcccctggcccccgggacacagatgatgatgaggaggagccagacccctacggcttcatcgtgcagacagctgagattgctgagatcgcccggctgagccagaccctggtgaaggatgtggccatcctggcccaggagatccatgatgtggccggagatggagacaccctgggcagcagcgagcccgcccacagcgccagcctgagcaacatgcccagcaccccagccagcaccatcagcgcccgggaggagctggtgcagagaattcctgaggccagcctgaacttccagaaggtgcccccaggcagcctgaacagccgggactttgaccagaacatgaatgacagctgtgaagatgccctggccaacaagacccggcccaggaaccgggaggaggtgatctttgacaacctgatgctgaaccctgtgtcccagctgagccaggccatccgggagaacacagagcacctggccgagaagatgaagatcctcttccagaacacaggccgggcctgggaggacctggaggcccgcatcaatgcagaaaatgaggtgcccatcctgaagaccagcaacaaggagatcagcagcatcctgaaggagctgcggcgggtgcagaagcagctggaggtgatcaatgccatcgtggaccccagcggcagcctggacctgctgaccggcaacagaagcctggccagcagcgcccagcccggcctgggcaagggccgggtggccgcccagagcccccccagccctgccagcgctgaggccctgctgcctgccctgcccctgaggaacttcccccagagggccagctgtggcccccccagcctgcctgaccccaccttcctgcctgatgctgagcgcttcctgatctag

SEQ ID NO: 20827 - DNA, 696 bp, synthetic construct
  source 1..696: mol_type = other DNA; note = Synthetic coding sequence
atcatcctgctgctggtgcccagcgaggagacagatgaaaatgacctgatcctggaggtgacagctggggtgggcggcggcctgcggcatgccagcgccagcattggaggcagcgaggcctaccgccacatgaagtttgagggcggcgtgcaccgggtgcagagggtgcccaagacagagaagcagggccgggtgcacaccagcaccatgacagtggccatcctgccccagcccacagagatcaacctggtgatcaaccccaaggacctgagaattgacaccaagagggccagcggggccggcggccagcacgtgaacaccacagacagcgctgtgcgcatcgtgcacctgcccactggagtggtgtctgagtgccagcaggagaggagccagctgaagaacaaggagctggccatgaccaagctgcgggccaagctgtacagcatgcacctggaggaggagatcaacaagaggcagaatgccaggaagatccagatcggcagcaagggccgctctgagaagatccgcacctacaacttcccccagaacagagtgacagaccaccgcatcaacaagaccctgcatgacctggagaccttcatgcagggcgactacctgctggatgagctggtgcagagcctgaaggagtatgctgactatgagagcctggtggagatcatcagccagaaggtgtag

SEQ ID NO: 20828 - DNA, 483 bp, synthetic construct; identical to SEQ ID NO: 20009
  source 1..483: mol_type = other DNA; note = Synthetic coding sequence

SEQ ID NO: 20829 - DNA, 423 bp, synthetic construct
  source 1..423: mol_type = other DNA; note = Synthetic coding sequence
atgcagtttggagagctgctggccgctgtgaggaaggcccaggccaacgtgatgctgttcctggaggagaaggagcaggccgccctgagccaggccaacggcatcaaggcccacctggagtacagatctgctgagatggagaagagcaagcaggagctggagaccatggccgccatcagcaacacagtgcagttcctggagatgtgcatgaccagccgcagcaccaggacccagcacaccagcatcagcggctgcagaagaagaacagcccggagccccacccccaggcctggcagcatccccaccaggaccagccctgctggcagctgcacaggaggccgctgctgccccagccgggtgtgcacctgcaccggcaccatcctgcgctggaggagcagcggccaggcccccatgctggcctag

SEQ ID NO: 20830 - DNA, 819 bp, synthetic construct
  source 1..819: mol_type = other DNA; note = Synthetic coding sequence
atggccagcagcaacacagtgctgatgaggctggtggccagcgcctacagcatcgcccagaaggccggcatgattgtgagaagagtgattgctgagggggacctgggcatcgtggagaagacctgtgccacagacctgcagaccaaggctgaccggctggcccagatgagcatctgcagcagcctggccaggaagttccccaagctgaccatcatcggggaggagctggtggtgtgggtggaccccctggatggcaccaaggagtacacagagggcctgctggacaacgtgacagtgctgattggaattgcctatgagggcaaggccatcgccggggtcatcaaccagccctactacaactatgaagctggcccagatgctgtgctgggccgcaccatctggggcgtgctgggcctgggcgccttcggcttccagctgaaggaggtgcctgctgggaagcacatcatcaccaccaccaggagccacagcaacaagctggtgacagactgtgtggccgccatgaacccagatgctgtgctgcgggtgggcggggccggcaacaagatcatccagctgattgagggcaaggccagcgcctacgtgtttgccagccctggctgcaagaagtgggacacctgtgcccctgaggtgatcctgcatgctgtgggcggcaagctgacagacatccacggcaatgtgctgcagtaccacaaggatgtgaagcacatgaacagcgctggggtgctggccaccctgagaaattatgactactatgccagccgggtgcctgagagcatcaagaatgccctggtgccctag

SEQ ID NO: 20831 - DNA, 606 bp, synthetic construct
  source 1..606: mol_type = other DNA; note = Synthetic coding sequence
atggagagcaaccacaagtctggagatggcctgagcggcacccagaaggaggccgccctgcgggccctggtgcagaggacaggctacagcctggtgcaggagaatggccagaggaaatatggaggccccccacctggctgggatgctgcccctcctgagcggggctgtgagatcttcatcggcaagctgccccgggacctgtttgaagatgagctgatccccctgtgtgagaagattggcaagatctatgagatgaggatgatgatggacttcaacggcaacaacagaggctacgcctttgtgaccttcagcaacaaggtggaggccaagaatgccatcaagcagctgaacaactatgagatcagaaatggccgcctgctgggcgtgtgtgcctctgtggacaactgccgcctgtttgtgggcggcatccccaagaccaagaagcgggaggagatcctgtctgagatgaagaaggtgacagagggcgtggtggatgtgattgtgtaccccagcgctgctgacaagaccaagaacagaggatttgcctttgtggagtatgagagccacagagctgctgccatggcccggaggaagctgctgccctag

SEQ ID NO: 20832 - DNA, 1905 bp, synthetic construct
  source 1..1905: mol_type = other DNA; note = Synthetic coding sequence
atggccctgagcaagcgggagctggatgagctgaagccctggattgagaagacagtgaagagggtgctgggcttcagcgagcccaccgtggtgacagctgccctgaactgtgtgggcaagggcatggacaagaagaaggctgctgaccacctgaagcccttcctggatgacagcaccctgcgctttgtggacaagctgtttgaagctgtggaggagggccgcagcagccgccacagcaagagcagcagtgacaggagcaggaagcgggagctgaagatcaagcagatgatggaggccgccacccggcagatcgaggagaggaagaagcagctgtccttcatcagcccccccaccccccagcccaagacccccagcagcagccagcctgagcggctgcccatcggcaacaccatccagcccagccaggccgccaccttcatgaatgatgccatcgagaaggccaggaaggctgctgagctgcaggcccgcatccaggcccagctggccctgaagccaggcctgattggaaatgccaacatggtgggcctggccaacctgcacgccatgggcatcgccccacccaaggtggagctgaaggaccagaccaagcccacccccctcatcctggatgagcagggccgcacagtggatgccaccgggaaggagattgagctgacccacaggatgcccaccctgaaggccaacatccgggctgtgaagcgggagcagttcaagcagcagctgaaggagaagcccagcgaggacatggagagcaacaccttctttgacccccgggtgtccatcgcccccagccagaggcagaggaggaccttcaagttccatgacaagggcaagtttgagaagatcgcccagaggctgcggaccaaggcccagctggagaagctgcaggccgagatcagccaggccgccaggaagacaggcatccacaccagcacccggctggccctgattgcccccaagaaggagctgaaggagggggacatccctgagattgagtggtgggacagctacatcatccccaacggctttgacctgacagaggagaaccccaagcgggaggactacttcggcatcaccaacctggtggagcacccagcccagctgaacccccctgtggacaatgacacccctgtgaccctgggcgtgtacctgaccaagaaggagcagaagaagctgcggcggcagacccggcgggaggcccagaaggagctgcaggagaaggtgcggctgggcctgatgcctcctcctgagcccaaggtgcgcatcagcaacctgatgagggtgctgggcacagaggccgtgcaggaccccaccaaggtggaggcccacgtgcgggcccagatggccaagaggcagaaggcccacgaggaggccaatgctgccaggaagctgacagctgagcagaggaaggtgaagaagatcaagaagctgaaggaggacatcagccagggcgtgcacatctctgtgtacagagtgaggaacctgagcaacccagccaagaagttcaagattgaggccaatgccggccagctgtacctgactggagtggtggtgctgcacaaggatgtgaatgtggtggtggtggagggcggccccaaggcccagaagaagttcaagaggctgatgctgcaccgcatcaagtgggatgagcagaccagcaacaccaagggagatgatgatgaggagagtgatgaggaggccgtgaagaagaccaacaagtgtgtgctggtgtgggagggcacagccaaggacaggagctttggagagatgaagttcaagcagtgccccacagagaacatggcccgggagcacttcaagaagcatggagctgagcactactgggacctggccctgtctgagagcgtgctggagagcacagactag

SEQ ID NO: 20833 - DNA, 3192 bp, synthetic construct
  source 1..3192: mol_type = other DNA; note = Synthetic coding sequence
atgccccacctgcccctggccagcttccggccccccttctggggcctgcggcacagccggggcctgccccgcttccacagcgtgtccacccagagcgagccccacggcagccccatcagcagaagaaaccgggaggccaagcagaagaggctgcgggagaagcaggccaccctggaggccgagattgctggggagagcaagagccctgctgagagcatcaaggcctggaggcccaaggagctggtgctgtatgagatccccaccaagccaggagagaagaaggatgtgtctggccccctgcccccagcctacagcccccgctacgtggaggccgcctggtacccctggtgggtgcgggagggcttcttcaagccagagtaccaggcccggctgccccaggccactggagagaccttctccatgtgcatccccccaccaaatgtgacaggcagcctgcacatcggccacgccctgactgtggccatccaggatgccctggtgcgctggcacaggatgagaggagaccaggtgctgtgggtgcccggcagtgaccacgccggcatcgccacccaggccgtggtggagaagcagctgtggaaggagcggggcgtgagaagacatgagctgagccgggaggccttcctgcgggaggtgtggcagtggaaggaggccaagggcggggagatctgtgagcagctgcgggccctgggcgccagcctggactgggaccgggagtgcttcaccatggatgtgggcagctctgtggccgtgacagaggcctttgtgcggctgtacaaggccggcctgctgtacagaaaccaccagctggtgaactggagctgtgccctgcggagcgccatcagtgacatcgaggtggagaaccggcccctgcccggccacacccagctgcggctgcccggctgccccacccctgtgtcctttggcctgctcttctctgtggccttccctgtggatggagagccagatgctgaggtggtggtgggcaccaccaggcctgagaccctgcctggagatgtggccgtggccgtgcacccagatgacagccgctacacccacctgcacggccggcagctgcggcaccccctgatgggccagcccctgcccctcatcacagattatgctgtgcagccccacgtgggcaccggggctgtgaaggtgaccccagcccacagccctgcagatgctgagatgggcgcccggcacggcctgagccccctgaatgtgattgctgaagatggcaccatgaccagcctgtgtggggactggctgcagggcctgcacagatttgtggcccgggagaagatcatgtctgtgctgtctgagtggggcctcttccggggcctgcagaaccaccccatggtgctgcccatctgcagccgctctggagatgtgattgagtacctgctgaagaaccagtggtttgtgcgctgccaggagatgggcgcccgggccgccaaggctgtggagagcggggccctggagctgagccccagcttccaccagaagaactggcagcactggttcagccacatcggggactggtgtgtgtcccggcagctgtggtggggccaccagatcccagcctacctggtggtggaggaccacgcccagggcgaggaggactgctgggtggtgggccgctctgaggccgaggcccgggaggtggccgctgagctgaccggccggcctggagctgagctgaccctggagcgggaccctgatgtgctggacacctggttcagcagcgccctcttccccttcagcgccctgggctggccccaggagaccccagacctggcccgcttctaccccctgagcctgctggagactggaagtgacctgctgctcttctgggtgggccgcatggtgatgctgggcacccagctgaccggccagctgcccttcagcaaggtgctgctgcaccccatggtgcgggaccggcagggcaggaagatgagcaagagcctgggcaatgtgctggacccccgggacatcatcagcggcgtggagatgcaggtgctgcaggagaagctgcggagcggcaacctggaccctgctgagctggccatcgtggccgccgcccagaagaaggacttcccccacggcatcccagaatgtggcacagatgccctgcgcttcaccctgtgcagccatggagtgcaggccggggacctgcacctgtctgtgtctgaggtgcagagctgccgccacttctgcaacaagatctggaatgccctgcgcttcatcctgaatgccctgggggagaagtttgtgccccagcctgctgaggagctgagccccagcagccccatggatgcctggatcctgagccggctggccctggccgcccaggagtgtgagcggggcttcctgacccgggagctgagcctggtgacccacgccctgcaccacttctggctgcacaacctgtgtgatgtgtacctggaggccgtgaagcctgtgctgtggcacagcccccggcccctgggccccccccaggtgctcttcagctgtgccgacctgggcctgcggctgctggcccccctgatgcccttcctggccgaggagctgtggcagaggctgcccccccggcccggctgccccccagcccccagcatctctgtggccccctaccccagcgcctgcagcctggagcactggaggcagcctgagctggagcggcgcttcagccgggtgcaggaggtggtgcaggtgctgcgggccctgcgggccacctaccagctgaccaaggcccggccccgggtgctgctgcagagcagcgagcccggggaccagggcctgtttgaggccttcctggagcccctgggcaccctgggctactgtggggctgtgggcctgctgcccccaggagctgctgcccccagcggctgggcccaggcccccctgagtgacacagcccaggtgtacatggagctgcagggcctggtggacccccagatccagctgcccctgctggccgcccggcgctacaagctgcagaagcagctggacagcctgacagcccggaccccatctgagggggaggccggcacccagaggcagcagaagctgagcagcctgcagctggagctgagcaagctggacaaggccgccagccacctgcggcagctgatggatgagcccccagcccctggcagccctgagctgtag

SEQ ID NO: 20834 - DNA, 2118 bp, synthetic construct
  source 1..2118: mol_type = other DNA; note = Synthetic coding sequence
atgattgacagcgtgaagctgcggcgggacagcgctgctgacttcttcagccactatgagtacctgtgtgccctgcagaacagcgtgcccctgcctgctgtgcgggcctgcctgcgggagggcgtgctggacttcaatgctgaccggctgcggggcgtggactgggcccccctgctgagcaccctgaagatcaacaaggacctgcccctggtgtccatcaagagcttcttccagccctggctgggggacaccggcagtgacatgaacaagttctgccgcagccgggtgcctgccatccgctacaaggatgtgaccttccagctgtgcaaggccctgaagggctgcctgagcatcagctctgtgctgaagaacctggagctgaatggcctcatcctgcgggagcgggacctgaccatcctggccaagggcctgaacaagagcgccagcctggtgcacctgagcctggccaactgccccatcggagatggcggcctggagatcatctgccagggcatcaagagcagcatcaccctgaagacagtgaacttcaccggctgcaacctgacctggcagggcgctgaccacatggccaagatcctgaagtaccagaccatgagaagacatgaggagacctgggccgagagcctgcgctacagaagaccagacctggactgcatggccggcctgcggcgcatcaccctgaactgcaacaccctcatcggggacctgggcgcctgtgcctttgctgacagcctgtctgaggacctgtggctgcgggccctggacctgcagcagtgtggcctgaccaatgaaggagccaaggccctgctggaggccctggagaccaacaccaccctggtggtgctggacatcaggaagaaccccctgattgaccacagcatgatgaaggccgtcatcaagaaggtgctgcagaatggccgcagcgccaagtctgagtaccagtggatcaccagccccagcgtgaaggagcccagcaagacagccaagcagaagaggaggaccatcatcctgggcagcggccacaagggcaaggccaccatccgcatcggcctggccaccaagaagcctgtgagcagcggcaggaagcacagcctgggcaaggagtactatgccccagcccccctgcccccaggagtgtctggcttcctgccctggaggacagctgagcgggccaagaggcaccggggcttccccctcatcaagacccgggacatctgcaaccagctgcagcagcccggcttccctgtgacagtgacagtggagagccccagcagcagcgaggtggaggaggtggatgacagcagcgagagcgtgcatgaggtgcctgagaagaccagcattgagcaggaggccctgcaggagaagctggaggagtgcctgaagcagctgaaggaggagagggtcatccggctgaaggtggacaagagggtgtctgagctggagcatgaaaatgcccagctgaggaacatcaacttcagcctgtctgaggccctgcacgcccagagcctgaccaacatgatcctggatgatgaaggagtgctgggcagcattgaaaattccttccagaagttccacgccttcctggacctgctgaaggatgctggcctgggccagctggccaccatggccggcatcgaccagagcgacttccagctgctgggccacccccagatgaccagcacagtgagcaacccccccaaggaggagaagaaggccctggaggatgagaagccagagcccaagcagaatgccctgggccagatgcagaacatccaggtgtccatctgcatgcagagcgcctacaatgaaggcaccctgatgaagttccagaagatcactggagatgcccgcatccccctgcccctggacagcttccctgtgcctgtgtccaccccagagggcctgggcaccagcagcaacaacctgggcgtgcctgccacagagcagaggcaggagagctttgagggcttcatcgccaggatgtgcagccccagcccagatgccaccagcggcaccggcagccagaggaaggaggaggagctgagcaggaacagccgcagcagcagcgagaagaagaccaagacaggcagccactag

SEQ ID NO: 20835 - DNA, 1287 bp, synthetic construct
  source 1..1287: mol_type = other DNA; note = Synthetic coding sequence
atggcctggcagagcaggaaaggaggccacttccgggaggtggccatgcagtggaaggtgaccctgaccagccgctggggcctgctgcggcactgccaggtgctggccggcctgctgcacctgggcaacatccagtttgctgcctctgaagatgaggcccagccctgccagcccatggatgatgccaagtacagcgtgaggacagctgccagcctgctgggcctgcctgaagatgtgctgctggagatggtgcagatccgcaccatccgggccggccggcagcagcaggtgttcaggaagccctgtgcccgggcagaatgtgacacccggcgggactgcctggccaagctgatctatgcccggctgtttgactggctggtgtctgtcatcaacagcagcatctgtgccgacacagacagctggaccaccttcatcggcctgctggatgtgtatggctttgagagcttcccagacaacagcctggagcagctgtgcatcaactatgccaatgagaagctgcagcagcactttgtggcccactacctgcgggcccagcaggaggagtatgctgtggagggcctggagtggagcttcatcaactaccaggacaaccagccctgcctggacctgattgagggcagccccatcagcatctgcagcctcatcaatgaagaatgtcggctgaaccggcccagcagcgctgcccagctgcagaccagaattgaaacagccctggccggcagcccctgcctgggccacaacaagctgagccgggagcccagcttcatcgtggtgcactacgccggccctgtgcgctaccacacagctggcctggtggagaagaacaaggaccccatccccccagagctggatggagtggaggagaagcacttcagccaggccccctgcagcctgagcaccagccccctgcagacccggctgctggaggccatcatccggctgtggcccctgggcctggtgctggccaacacagccatgggcgtgggcagcttccagaggaagctggtggtgtgggcctgcctgcagctgccccggggcagccccagcagctacacagtgcagacagcccaggaccaggccggcgtgaccagcatccgggccctgccccagggcagcatcaagttccactgcaggaagagccccctgcgctatgctgacatctgcccagagcccagcccctacagcatcaccggcttcaaccagatcctgctggagcggcacaggctcatccacgtgaccagcagcgccttcaccggcctgggctag

SEQ ID NO: 20836 - DNA, 927 bp, synthetic construct; identical to SEQ ID NO: 18763
  source 1..927: mol_type = other DNA; note = Synthetic coding sequence

SEQ ID NO: 20837 - DNA, 429 bp, synthetic construct
  source 1..429: mol_type = other DNA; note = Synthetic coding sequence
atgagcctgcacggcaagaggaaggagatctacaagtatgaggccccctggacagtgtatgccatgaactggagcgtgcggccagacaagcgcttccggctggccctgggcagctttgtggaggagtacaacaacaaggtggtgatcctggatgtgcgggtgccctgcacccctgtggcccggctgaacaaccaccgggcctgtgtgaatggcatcgcctgggccccccacagcagctgccacatctgcacagctgctgatgaccaccaggccctgatctgggacatccagcagatgccccgggccatcgaggaccccatcctggcctacacagctgagggggagatcaacaacgtgcagtgggccagcacccagcctgactggatcgccatctgctacaacaactgcctggagatcctgcgggtgtag

SEQ ID NO: 20838 - DNA, 1233 bp, synthetic construct
  source 1..1233: mol_type = other DNA; note = Synthetic coding sequence
atggccgcccccagccccagcggcggcggcggcagcggcggcggcagcggcagcggcaccccaggccctgtgggcagccctgcccctggccaccctgctgtgtcctccatgcagggcttccagatcaacttctgtgagaaggcccagagcaagaggaaggccctgaagctgaactttgccaacccccccttcaagagcacagcccgcttcaccctgaaccccaaccccactggagtgcagaacccccacatcgagcggctgcggacccacagcattgagagcagcggcaagctgaagatcagccctgagcagcactgggacttcaccgctgaggacctgaaggacctgggggagatcggccgcggggcctacggctctgtgaacaagatggtgcacaagcccagcggccagatcatggctgtgaagaggatccgcagcacagtggatgagaaggagcagaagcagctgctgatggacctggatgtggtgatgaggagcagtgactgcccctacatcgtgcagttctacggggccctcttccgggagggggactgctggatctgcatggagctgatgagcaccagctttgacaagttctacaagtatgtgtacagcgtgctggatgatgtgattcctgaggagatcctgggcaagatcaccctggccaccgtgaaggccctgaaccacctgaaggagaacctgaagatcatccaccgggacatcaagcccagcaacatcctgctggacagaagtggcaacatcaagctgtgtgactttggcatcagcggccagctggtggacagcatcgccaagaccagagatgctggctgccggccctacatggcccctgagagaattgaccccagcgccagccggcagggctatgatgtgcggagtgatgtgtggagcctgggcatcaccctgtatgagctggccaccggccgcttcccctaccccaagtggaacagcgtgtttgaccagctgacccaggtggtgaagggggaccccccccagctgagcaacagcgaggagcgggagttcagccccagcttcatcaactttgtgaacctgtgcctgaccaaggatgagagcaagaggcccaagtacaaggagctgctgaagcaccccttcatcctgatgtatgaggagagagctgtggaggtggcctgctacgtgtgcaagatcctggaccagatgcctgccacccccagcagccccatgtatgtggactag

SEQ ID NO: 20839 - DNA, 687 bp, synthetic construct
  source 1..687: mol_type = other DNA; note = Synthetic coding sequence
atgcagctggccgtggtgtctgaggagcaggaccagaacctgaacagactcatctgctggatcctgatgcagttcatctacatcagcagtgactatgtgtttgatggcaccaaccccccctaccgggaggaggacatcccagcccccctgaacctgtatggcaagaccaagctggatggagagaaggctgtgctggagaacaacctgggcgctgctgtgctgcgcatccccatcctgtatggagaggtggagaagctggaggagagcgctgtgacagtgatgtttgacaaggtgcagttcagcaacaagagcgccaacatggaccactggcagcagcgcttccccacccacgtgaaggatgtggccaccgtgtgccggcagctggccgagaagaggatgctggaccccagcatcaagggcaccttccactggagcggaaatgagcagatgaccaagtatgagatggcctgtgccatcgcagatgccttcaacctgcccagcagccacctgcggcccatcacagacagccctgtgctgggcgcccagaggcccagaaatgcccagctggactgcagcaagctggagaccctgggcatcggccagaggacccccttcagaattggcatcaaggagagcctgtggcccttcctgattgacaagcgctggaggcagacagtgttccactag

SEQ ID NO: 20840 - DNA, 1101 bp, synthetic construct
  source 1..1101: mol_type = other DNA; note = Synthetic coding sequence
atgtctgctgccaaccctgagacccccaacagcaccatcagccgggaggccagcacccagagcagcagcgctgctgccagccagggctgggtgctgcctgagggcaagatcgtgcccaacacagtgtttgtgggcggcattgatgccaggatggatgaaacagagatcggcagctgcttcggccgctatggctctgtgaaggaggtgaagatcatcaccaacagaactggagtgtccaagggctacggctttgtgtcctttgtgaatgatgtggatgtgcagaagatcgtgggcagccagatccacttccacggcaagaagctgaagctgggccctgccatcaggaagcagaagctgtgtgcccggcacgtgcagccccggcccctggtggtgaaccccccacctccaccccagttccagaatgtgtggaggaaccccaacacagagacctacctgcagccccagatcacccccaaccctgtgacccagcacgtgcaggcctacagcgcctacccccacagccctggccaggtgatcaccggctgccagctgctggtgtacaactaccaggagtaccccacctacccagacagcgccttccaggtgaccaccggctaccagctgcctgtgtacaactaccagcccttccctgcctaccccagcagccccttccaggtgacagctggctaccagctgcctgtgtacaactaccaggccttccctgcctaccccagcagccccttccaggtgaccaccggctaccagctgcctgtgtacaactaccaggccttccctgcctaccccagcagccccttccaggtgaccaccggctaccagctgcctgtgtacaactaccaggccttccctgcctaccccagcagccccttccaggtgaccaccggctaccagctgcctgtgtacaactaccaggccttccctgcctaccccaacagcgctgtgcaggtgaccaccggctaccagttccacgtgtacaactaccagatgccaccccagtgccctgtgggggagcagaggaggaacctgtggacagaggcctacaagtggtggtacctggtgtgcctgatccagaggcgggactag

SEQ ID NO: 20841 - DNA, 306 bp, synthetic construct
  source 1..306: mol_type = other DNA; note = Synthetic coding sequence
atggccagcgctggcacccagcactacagcatcggcctgcggcagaagaacagcttcaagcagagcggccccagcggcaccgtgcctgccaccccacctgagaagcccagcgagggccgggtgtggccccaggcccaccagcaggtgaagcccatctggaagctggagaagaagcaggtggagaccctgtctgctggcctgggccctggcctgctgggcgtgcccccccagcctgcctacttcttctgccccagcaccctgtgcagcagcggcaccacagctgtgattgctggccacagcagctag

SEQ ID NO: 20842 - DNA, 2121 bp, synthetic construct
  source 1..2121: mol_type = other DNA; note = Synthetic coding sequence
atgattgacagcgtgaagctgcggcgggacagcgctgctgacttcttcagccactatgagtacctgtgtgccctgcagaacagcgtgcccctgcctgctgtgcgggcctgcctgcgggagggcgtgctggacttcaatgctgaccggctgcggggcgtggactgggcccccctgctgagcaccctgaagatcaacaaggacctgcccctggtgtccatcaagagcttcttccagccctggctgggggacaccggcagtgacatgaacaagttctgccgcagccgggtgcctgccatccgctacaaggatgtgaccttccagctgtgcaaggccctgaagggctgcctgagcatcagctctgtgctgaagaacctggagctgaatggcctcatcctgcgggagcgggacctgaccatcctggccaagggcctgaacaagagcgccagcctggtgcacctgagcctggccaactgccccatcggagatggcggcctggagatcatctgccagggcatcaagagcagcatcaccctgaagacagtgaacttcaccggctgcaacctgacctggcagggcgctgaccacatggccaagatcctgaagtaccagaccatgagaagacatgaggagacctgggccgagagcctgcgctacagaagaccagacctggactgcatggccggcctgcggcgcatcaccctgaactgcaacaccctcatcggggacctgggcgcctgtgcctttgctgacagcctgtctgaggacctgtggctgcgggccctggacctgcagcagtgtggcctgaccaatgaaggagccaaggccctgctggaggccctggagaccaacaccaccctggtggtgctggacatcaggaagaaccccctgattgaccacagcatgatgaaggccgtcatcaagaaggtgctgcagaatggccgcagcgccaagtctgagtaccagtggatcaccagccccagcgtgaaggagcccagcaagacagccaagcagaagaggaggaccatcatcctgggcagcggccacaagggcaaggccaccatccgcatcgtgggcctggccaccaagaagcctgtgagcagcggcaggaagcacagcctgggcaaggagtactatgccccagcccccctgcccccaggagtgtctggcttcctgccctggaggacagctgagcgggccaagaggcaccggggcttccccctcatcaagacccgggacatctgcaaccagctgcagcagcccggcttccctgtgacagtgacagtggagagccccagcagcagcgaggtggaggaggtggatgacagcagcgagagcgtgcatgaggtgcctgagaagaccagcattgagcaggaggccctgcaggagaagctggaggagtgcctgaagcagctgaaggaggagagggtcatccggctgaaggtggacaagagggtgtctgagctggagcatgaaaatgcccagctgaggaacatcaacttcagcctgtctgaggccctgcacgcccagagcctgaccaacatgatcctggatgatgagggcgtgctgggcagcattgagaacagcttccagaagttccacgccttcctggacctgctgaaggatgctggcctgggccagctggccaccatggccggcatcgaccagagcgacttccagctgctgggccacccccagatgaccagcacagtgagcaacccccccaaggaggagaagaaggccctggaggatgagaagccagagcccaagcagaatgccctgggccagatgcagaacatccagttccagaagatcactggagatgcccgcatccccctgcccctggacagcttccctgtgcctgtgtccaccccagagggcctgggcaccagcagcaacaacctgggcgtgcctgccacagagcagaggcaggagagctttgagggcttcatcgccaggatgtgcagccccagcccagatgccaccagcggcaccggcagccagaggaaggaggaggagctgagcaggaacagccgcagcagcagcgagaagaagaccaagacaggagagtacaccaagaagcacagcgacaagcagcaccctgggaaggacctgcacagctag

SEQ ID NO: 20843 - DNA, 1932 bp, synthetic construct
  source 1..1932: mol_type = other DNA; note = Synthetic coding sequence
atggcctgccagcagagccgctaccacagcttcagcagcgccagccggctgcagccccggcccagcggcgtgaccattgatgagagcttcctgacagaggacaagagcacccagaacaggaagctgctgcagaagaggaggaccctggagctgcctgctgcccccctgagccactgccaggcccctgtgctgggcggcaccgggaagctgcccacccagggcgcccccccagctggccctggccaccgcttccaccctggcaccaaggctgctgcccaccagcgggagaagatccgggccctggagcccctgaaggccaagctggtgacagtgaatgaagactgcaatgaaagaatcctggccatgagagctgaggagaagtatgagatcagcctgctgaagaaggagaagatgaacctgctgaagctgattgacaagaagaatgaggagaagatcagcctgcagagcgaggtgaccaagctgaggaagaacctggccgaggagtacctgcactacctgtctgaaagagatgcctgcaagatcctgattgctgacctgaatgagctgcgctaccagcgggaggacatgagcctggcccagagccctggcatctggggagaagatcctgtgaagctgaccctggccctgaagatgacccggcaggacctgaccaggacccagatggagctgaacaacatgaaggccaactttggagatgtggtgccccggcgggactttgagatgcaggagaagaccaacaaggacctgcaggagcagctggacaccctgcgggccagctatgaggaggtgaggaaggagcacgagatcctgatgcagctgcacatgagcaccctgaaggagcgggaccagttcttcagcgagctgcaggagatccagaggaccagcacccccaggccagactggaccaagtgcaaggatgtggtggccggcggccctgagcgctggcagatgctggccgagggcaagaacagcgaccagctggtggatgtgctgctggaggagatcggcagcggcctgctgcgggagaaggacttcttccctggcctgggctacggggaggccatcccagccttcctgcgctttgatggcctggtggagaacaagaagcccagcaagaaggatgtggtgaacctgctgaaggatgcctggaaggagcggctggccgaggagcagaaggagaccttcccagacttcttcttcaacttcctggagcaccgcttcggccccagtgatgccatggcctgggcctacaccatctttgagaacatcaagatcttccacagcaatgaggtgatgagccagttctatgctgtgctgatgggcaagagaagtgaaaatgtgtatgtgacccagaaggagaccgtggcccagctgctgaaggagatgaccaatgctgacagccagaatgaaggcctgctgaccatggagcagttcaacacagtgctgaagagcaccttccccctgaagacagaggagcagatccaggagctgatggaggccggcggctggcaccccagcagcagcaatgctgacctgctgaactaccgcagcctcttcatggaggatgaggagggccagagcgagccctttgtgcagaagctgtgggagcagtacatggatgagaaggatgagtacctgcagcagctgaagcaggagctgggcatcgagctgcacgaggaggtgaccctgcccaagctgcggggcggcctgatgaccatcgaccccagcctggacaagcagacagtgaacacctacatgagccaggccttccagctgcctgagagcgagatgcctgaggagggagatgagaaggaggaggccgtggtggagatcctgcagacagccctggagcggctgcaggtgattgacatccggcgggtgggcccccgggagcctgagcccgccagctag

SEQ ID NO: 20844 - DNA, 474 bp, synthetic construct
  source 1..474: mol_type = other DNA; note = Synthetic coding sequence
atggccaccagcgcccccctgcggagcctggaggaggaggtgacctgcagcatctgcctggactacctgcgggaccctgtgaccatcgactgtggccacgtgttctgccgcagctgcaccacagatgtgcggcccatcagcggcagcaggcctgtgtgccccctgtgcaagaagcccttcaagaaggagaacatccggcctgtgtggcagctggccagcctggtggagaacatcgagcggctgaaggtggacaagggccggcagcctggagaggtgacccgggagcagcaggatgccaagctgtgtgagcggcaccgggagaagctgcactactactgtgaagatgatggcaagctgctgtgtgtgatgtgccgggagagccgggagcaccggccccacacagctgtgctgatggagaaggccgcccagccccaccgggagaagatcctgaaccacctgagcaccctgaggtag

SEQ ID NO: 20845 - DNA, 939 bp, synthetic construct
  source 1..939: mol_type = other DNA; note = Synthetic coding sequence
atggcccagccctaccccccagcccagtacccacctccaccccagaatggcatcccagcagaatatgcccctcctccaccccaccccacccaggactacagcggccagacccctgtgcccacagaacatggcatgaccctgtacaccccagcccagacccaccctgagcagcccggcagcgaggccagcacccagcccatcgccggcacccagacagtgccccagacagatgaagctgcccagacagacagccagcccctgcaccccagcgaccccacagagaagcagcagcccaagaggctgcacgtgagcaacatccccttccgcttccgggaccctgacctgcggcagatgtttggccagtttgggaagatcctggatgtggagatcatcttcaatgaaagaggcagcaagggcttcggctttgtgacctttgagaccagcagtgatgctgaccgggcccgggagaagctgaatggcaccatcgtggagggcaggaagattgaggtgaacaatgccacagcccgggtgatgaccaacaagaagacaggcaacccctacaccaacggctggaagctgaaccctgtggtgggcgctgtgtatggccctgagttctatgctgtgacaggcttcccctaccccaccaccggcacagctgtggcctacagaggagcccacctgcggggccggggccgggctgtgtacaacaccttccgggccgcccctcctcctccacccatccccacctacggggctgtggtgtaccaggacggcttctacggggctgagatctatggaggctatgctgcctaccgctatgcccagcctgctgctgctgctgctgcctacagcgacagctatggccgggtgtatgctgctgctgacccctaccaccacaccatcggccctgctgccacctacagcatcggcaccatgtag

SEQ ID NO: 20846 - DNA, 300 bp, synthetic construct
  source 1..300: mol_type = other DNA; note = Synthetic coding sequence
atggccagcctgctgcaggaccagctgaccacagaccaggacctgctgctgatgcaggagggcatgcccatgaggaaggtgcgcagcaagtcctggaagaagctgcgctacttccggctgcagaatgatggcatgacagtgtggcacgcccggcaggcccggggcagcgccaagcccagcttcagcatcagtgatgtggagaccatcagaaatggacatgattctgagctgctgcggagcctggccgaggagctgcccctggagcagggcttcaccatcgtgttccacggcagaagatag

SEQ ID NO: 20847 - DNA, 1620 bp, synthetic construct; identical to SEQ ID NO: 19050
  source 1..1620: mol_type = other DNA; note = Synthetic coding sequence

SEQ ID NO: 20848 - DNA, 480 bp, synthetic construct
  source 1..480: mol_type = other DNA; note = Synthetic coding sequence
atggccaccagcgcccccctgcggagcctggaggaggaggtgacctgcagcatctgcctggactacctgcgggaccctgtgaccatcgactgtggccacgtgttctgccgcagctgcaccacagatgtgcggcccatcagcggcagcaggcctgtgtgccccctgtgcaagaagcccttcaagaaggagaacatccggcctgtgtggcagctggagaagatcctgaaccacctgagcaccctgcggcgggaccgggacaagatccagggcttccaggccaagggggaggccgacatcctggccgccctgaagaagctgcaggaccagaggcagtacatcgtggccgagtttgagcagggccaccagttcctgcgggagcgggaggagcacctgctggagcagctggccaagctggagcaggagctgacagagggccgggagaagttcaagagcagaggagtgggggagctggccaggtag

SEQ ID NO: 20849 - DNA, 579 bp, synthetic construct; identical to SEQ ID NO: 20257
  source 1..579: mol_type = other DNA; note = Synthetic coding sequence

SEQ ID NO: 20850 - DNA, 309 bp, synthetic construct
  source 1..309: mol_type = other DNA; note = Synthetic coding sequence
atgcacaacagaagccagggcttcttcttcagcagctgccacccccagaaccacgtgtcctatggctgccagagccccagcttcatcttctgccgctgccagagcctgaactttgtgtccaggacctgctaccccctgagctacttctcctatggcaaccagaccatcggcagcatcagcaacagcttccgcagcctgaactacgtgagccacagcttccagcccatctccttcatgcacagcagcttccagcctgcctgcagcgactttgtgggctggcagagccccttcctgcggaggacctgctag

SEQ ID NO: 20851 - DNA, 723 bp, synthetic construct
  source 1..723: mol_type = other DNA; note = Synthetic coding sequence
atggacctggtgcggctgggcctggagcggggggagacagccaaggaggccctggatgtgattgtgtccctgctggaggagcacggccagggcggcaactactttgaagatgccaacagctgccacagcttccagagcgcctacctgattgtggacagagatgaggcctgggtgctggagaccatcggcaagtactgggccgctgagaaggtgacagagagcatcaccgtgcagaccatgatgaacaccctgcgggacaaggccagcggcgtgtgcattgattctgagttcttcctgaccacagccagcggcgtgtctgtgctgccccagaacagaagcagcccctgcatccactacttcaccggcaccccagaccccagccgcagcatcttcaagcccttcatctttgtggatgatgtgaagctggtgcccaagacccagagcccctgctttggagatgatgatcctgccaagaaggagccccgcttccaggagaagccagacagaagacatgagctgtacaaggcccacgagtgggcccgggccatcatcgagagtgaccaggagcagggcaggaagctgcggagcaccatgctggagctggagaagcagggcctggaggccatggaggagatcctgaccagcagcgagcccctggaccctgctgaggtgggggacctcttctatgactgtgtggacacagagatcaagttcttcaagtag

SEQ ID NO: 20852 - DNA, 900 bp, synthetic construct
  source 1..900: mol_type = other DNA; note = Synthetic coding sequence
tgaagagaggaggacatctaccagtttgcctactgctacccctacacctacacccgcttccagcactacctggacagcctgcagaagaggaacatggactacttcttccgggagcagctgggccagagcgtgcagcagaggaagctggacctgctgaccatcaccagcccagacaacctgcgggagggcgctgagcagaaggtggtgttcatcaccggccgggtgcaccctggagagacccccagcagctttgtgtgccagggcatcatcgacttcctggtgtcccagcaccccatcgcctgtgtgctgcgggagtacctggtgttcaagatcgcccccatgctgaacccagatggagtgtacctgggcaactaccgctgcagcctgatgggctttgacctgaacagacactggctggaccccagcccctgggtgcaccccaccctgcacggcgtgaagcagctgattgtgcagatgtacaatgaccccaagaccagcctggagttctacatcgacatccacgcccacagcaccatgatgaatggcttcatgtatggcaacatctttgaagatgaggagcgcttccagaggcaggccatcttccccaagctgctgtgccagaatgctgaggacttctcctacagcagcaccagcttcaacagagatgctgtgaaggccggcaccggccgccgcttcctgggcggcctgctggaccacaccagctactgctacaccctggaggtgtccttctacagctacatcatcagcggcaccacagctgctgtgccctacacagaggaggcctgcatcctgagcccccacccagccctgggccagcccagcagcagccgggagtaccccagcctgaccggccaggagctgggcccccagctgaggtag

SEQ ID NO: 20853 - DNA, 1041 bp, synthetic construct
  source 1..1041: mol_type = other DNA; note = Synthetic coding sequence
atggctgctgctgagcccgccagcagcggccagcaggccccagctggccagggccagggccagaggcccccaccccagcccccccaggcccaggccccccagcccccacctccaccccagctgggcggggccggcggcggcagcagcagacatgagaagagcctgggcctgctgaccaccaagtttgtgtccctgctgcaggaggccaaggatggagtgctggacctgaaggctgctgctgacaccctggccgtgcggcagaagaggcgcatctatgacatcaccaacgtgctggagggcatcgacctgattgagaagaagagcaagaacagcatccagtggaagggcgtgggcgccggctgcaacaccaaggaggtgattgaccggctgcgctacctgaaggccgagattgaggacctggagctgaaggagcgggagctggaccagcagaagctgtggctgcagcagagcatcaagaatgtgatggatgacagcatcaacaaccgcttctcctatgtgacccatgaggacatctgcaactgcttcaatggagacaccctgctggccatccaggcccccagcggcacccagctggaggtgcccatccctgagatgggccagaatggccagaagaagtaccagatcaacctgaagagccacagcggccccatccacgtgctgctgatcaacaaggagagcagcagcagcaagcctgtggtgtttcctgtgcccccaccagatgacctgacccagcccagcagccagagcctgacccctgtgaccccccagaagagctccatggccacccagaacctgcctgagcagcacgtgtctgagaggagccaggccctgcagcagaccagcgccacagacatcagcagcgctggcagcatcagcggggacatcattgatgagctgatgagcagtgatgtgttccccctgctgcggctgagccccaccccagcagatgactacaacttcaacctggatgacaatgaaggagtgtgtgacctgtttgatgtgcagatcctgaactactag

SEQ ID NO: 20854 - DNA, 396 bp, synthetic construct
  source 1..396: mol_type = other DNA; note = Synthetic coding sequence
atgagcaagcgctacctgcagaaggccaccaagggcaagctgctgatcatcatcttcatcgtgaccctgtggggcaaggtggtgagcagcgccaaccaccacaaggcccaccacgtgaagacaggcacctgtgaggtggtggccctgcaccgctgctgcaacaagaacaagattgaggagaggagccagacagtgaagtgcagctgcttccctggccaggtggccggcaccacccgggccgcccccagctgtgtggatgccagcatcgtggagcagaagtggtggtgccacatgcagccctgcctggagggggaggagtgcaaggtgctgcctgacaggaagggctggagctgcagcagcggcaacaaggtgaagaccaccagggtgacccactag

SEQ ID NO: 20855 - DNA, 306 bp, synthetic construct
  source 1..306: mol_type = other DNA; note = Synthetic coding sequence
atgcccttcttcggcaacaccttcagccccaagaagaccccacccaggaagagcgccagcctgagcaacctgcacagcctggacaggagcacccgggaggtggagctgggcctggagtatggcagccccaccatgaacctggccggccagagcctgaagtttgaaaatggccagtggattgctgagactggagtgtctgggggcgtggacagaagagaggtgcagaggctgcggcggaggaaccagcagctggaggaggagaacaacctgctgcggctgaaggtggacatcctgctggacatgtag

SEQ ID NO: 20856 - DNA, 393 bp, synthetic construct
  source 1..393: mol_type = other DNA; note = Synthetic coding sequence
atggacatcagcaagggcctgcccggcatgcagggcggcctgcacatctggatcagcgagaacaggaagatggtgcctgtgcctgagggcgcctacggcaacttctttgaggagcactgctacgtgatcctgcacgtgccccagagccccaaggccacccagggcgccagcagtgacctgcactactgggtgggcaagcaggccggggctgaggcccagggcgctgctgaggccttccagcagaggctgcaggatgagctgggcggccagacagtgctgcaccgggaggcccagggccacgagagtgactgcttctgcagctacttccggcccggcatcatctacagaaaaggaggcctggccagtgacctgaagcacgtggagaccaactag

SEQ ID NO: 20857 - DNA, 51 bp, synthetic construct
  source 1..51: mol_type = other DNA; note = Synthetic coding sequence
atgtgcaccagcgagaccttccaggccctggacacctttgaggccaggtag

SEQ ID NO: 20858 - DNA, 5553 bp, synthetic construct
  source 1..5553: mol_type = other DNA; note = Synthetic coding sequence
atggagagcaacttcaaccaggagggcgtgccccggcccagctatgtgttttctgctgaccccatcgcccggcccagcgagatcaactttgatggcatcaagctggacctgagccatgagttcagcctggtggcccccaacacagaggccaacagctttgagagcaaggactacctgcaggtgtgcctgcgcatccggcccttcacccagagcgagaaggagctggagagcgagggctgtgtgcacatcctggacagccagacagtggtgctgaaggagccccagtgcatcctgggccgcctgtctgagaagagcagcggccagatggcccagaagttctccttcagcaaggtgtttggacctgccaccacccagaaggagttcttccagggctgcatcatgcagcctgtgaaggacctgctgaagggccagagccgcctcatcttcacctacggcctgaccaacagcggcaagacctacaccttccagggcacagaagaaaatattggcatcctgcccaggaccctgaatgtgctgtttgacagcctgcaggagcggctgtacaccaagatgaacctgaagccccacaggagccgggagtacctgcggctgagcagcgagcaggagaaggaggagatcgccagcaagagcgccctgctgcggcagatcaaggaggtgacagtgcacaatgacagtgatgacaccctgtatggcagcctgaccaacagcctgaacatcagcgagtttgaggagagcatcaaggactatgagcaggccaacctgaacatggccaacagcatcaagttctctgtgtgggtgtccttctttgagatctacaatgagtacatctatgacctgtttgtgcctgtgagcagcaagttccagaagaggaagatgctgcggctgagccaggatgtgaagggctacagcttcatcaaggacctgcagtggatccaggtgtctgacagcaaggaggcctaccgcctgctgaagctgggcatcaagcaccagagcgtggccttcaccaagctgaacaatgccagcagccgcagccacagcatcttcaccgtgaagatcctgcagattgaagattctgagatgagcagggtcatccgggtgtctgagctgagcctgtgtgacctggccggcagcgagaggaccatgaagacccagaatgaaggagagcggctgcgggagaccggcaacatcaacaccagcctgctgaccctgggcaagtgcatcaacgtgctgaagaacagcgagaagagcaagttccagcagcacgtgcccttccgggagagcaagctgacccactacttccagagcttcttcaacgggaagggcaagatctgcatgattgtgaacatcagccagtgctacctggcctatgatgagaccctgaatgtgctgaagttcagcgccatcgcccagaaggtgtgtgtgcctgacaccctgaacagcagccaggagaagctgtttggacctgtgaagagcagccaggatgtgtccctggacagcaacagcaacagcaagatcctgaatgtgaagagggccaccatctcctgggagaacagcctggaggacctgatggaggatgaggacctggtggaggagctggagaatgctgaggagacccagaatgtggagaccaagctgctggatgaggacctggacaagaccctggaggagaacaaggccttcatcagccatgaggagaagaggaagctgctggacctgattgaggacctgaagaagaagctgatcaatgagaagaaggagaagctgaccctggagttcaagatccgggaggaggtgacccaggagttcacccagtactgggcccagcgggaggccgacttcaaggagaccctgctgcaggagcgggagatcctggaggagaatgctgagcggcggctggccatcttcaaggacctggtgggcaaatgtgacacccgggaggaggccgccaaggacatctgtgccaccaaggtggagacagaggagacccacaactacgtgggctttgaggacatcatcgacagcctgcaggacaacgtggccgacatcaagaagcaggccgagatcgcccacctgtacatcgccagcctgcctgacccccaggaggccacagcctgcctggagctgaagttcaaccagatcaaggccgagctggccaagaccaagggggagctgatcaagaccaaggaggagctgaagaagcgggagaatgaaagtgacagcctcatccaggagctggagaccagcaacaagaagatcatcacccagaaccagaggatcaaggagctgatcaacatcatcgaccagaaggaggacaccatcaatgagttccagaacctgaagagccacatggagaacaccttcaagtgcaatgacaaggctgacaccagcagcctcatcatcaacaacaagctgatctgcaatgagaccgtggaggtgcccaaggacagcaagagcaagatctgcagcgagaggaagagggtgaatgaaaatgagctgcagcaggatgagcccccagccaagaagggcaccaccagcgctgccagcagccggcggctgaggaagctgatcagcaagcctgtgaacagaacccggcagacagagggccacagcctggtgtccatccacgtgtcctctgccatcacagaggaccagaagaagtctgaggaggtgcggcccaacattgctgagattgaggacatccgggtgctgcaggagaacaatgaaggcctgcgggccttcctgctgaccattgaaaatgagctgaagaatgagaaggaggagaaggccgagctgaacaagcagatcgtgcacttccagcaggagctgagcctgtctgagaagaagaacctgaccctgagcaaggaggtgcagcagatccagagcaactatgacatcgccatcgccgagctgcacgtgcagaagagcaagaaccaggagcaggaggagaagatcatgaagctgagcaatgaaattgaaacagccaccaggagcatcaccaacaacgtgtcccagatcaagctgatgcacaccaagattgatgagctgcggaccctggacagcgtgtcccagatcagcaacatcgacctgctgaacctgcgggacctgagcaatggcagcgaggaggacaacctgcccaacacccagctggacctgctgggcaatgactacctggtgtccaagcaggtgaaggagtaccgcatccaggagcccaaccgggagaacagcttccacagcagcattgaggccatctgggaggagtgcaaggagatcgtgaaggccagcagcaagaagagccaccagatcgaggagctggagcagcagatcgagaagctgcaggccgaggtgaagggctacaaggatgagaacaaccggctgaaggagaaggagcacaagaaccaggatgacctgctgaaggagaaggagaccctcatccagcagctgaaggaggagctgcaggagaagaatgtgaccctggatgtgcagatccagcacgtggtggagggcaagagggccctgtctgagctgacccagggcgtgacctgctacaaggccaagatcaaggagctggagaccatcctggagacccagaaggtggagtgcagccacagcgccaagctggagcaggacatcctggagaaggagagcatcatcctgaagctggagaggaacctgaaggagttccaggagcacctgcaggacagcgtgaagaacaccaaggacctgaatgtgaaggagctgaagctgaaggaggagatcacccagctgaccaacaacctgcaggacatgaagcacctgctgcagctgaaggaggaggaggaggagaccaaccggcaggagacagagaagctgaaggaggagctgagcgccagcagcgcccggacccagaacctgaaggctgacctgcagaggaaggaggaggactatgctgacctgaaggagaagctgacagatgccaagaagcagatcaagcaggtgcagaaggaggtgtctgtgatgagagatgaggacaagctgctgcgcatcaagatcaatgagctggagaagaagaagaaccagtgcagccaggagctggacatgaagcagaggaccatccagcagctgaaggagcagctgaacaaccagaaggtggaggaggccatccagcagtatgaaagagcctgcaaggacctgaatgtgaaggagaagatcatcgaggacatgaggatgaccctggaggagcaggagcagacccaggtggagcaggaccaggtgctggaggccaagctggaggaggtggagcggctggccacagagctggagaagtggaaggagaagtgcaatgacctggagaccaagaacaaccagaggagcaacaaggagcacgagaacaacacagatgtgctgggcaagctgaccaacctgcaggatgagctgcaggagagcgagcagaagtacaatgctgacaggaagaagtggctggaggagaagatgatgctgatcacccaggccaaggaggccgagaacatccggaacaaggagatgaagaagtatgcagaagatcgggagcgcttcttcaagcagcagaatgagatggagatcctgacagcccagctgacagagaaggacagcgacctgcagaagtggagggaggagcgggaccagctggtggccgccctggagatccagctgaaggccctgatcagcagcaatgtgcagaaggacaatgaaattgagcagctgaagaggatcatcagcgagaccagcaagattgagacccagatcatggacatcaagcccaagaggatcagcagcgctgaccctgacaagctgcagacagagcccctgagcaccagctttgagatcagcaggaacaagattgaagatggctctgtggtgctggacagctgtgaggtgtccacagaaaatgaccagagcacccgcttccccaagccagagctggagatccagttcacccccctgcagcccaacaagatggctgtgaagcaccctggctgcaccacccctgtgacagtgaagatccccaaggccaggaagaggaagagcaatgagatggaggaggacctggtgaagtgtgagaacaagaagaatgccacccccaggaccaacctgaagttccccatcagtgatgacaggaacagctctgtgaagaaggagcagaaggtggccatccggcccagcagcaagaagacctacagcctgcggagccaggccagcatcattggagtgaacctggccaccaagaagaaggagggcaccctgcagaagtttggagacttcctgcagcacagccccagcatcctgcagagcaaggccaagaagatcatcgagaccatgagcagcagcaagctgagcaatgtggaggccagcaaagaaaatgtgtcccagcccaagagggccaagaggaagctgtacaccagcgagatcagcagccccatcgacatcagcggccaggtgatcctgatggaccagaagatgaaggagagtgaccaccagatcatcaagaggcggctgcggaccaagacagccaagtag

SEQ ID NO: 20859 - DNA, 1527 bp, synthetic construct; identical to SEQ ID NO: 20134
  source 1..1527: mol_type = other DNA; note = Synthetic coding sequence

SEQ ID NO: 20860 - DNA, 975 bp, synthetic construct
  source 1..975: mol_type = other DNA; note = Synthetic coding sequence
atgtttattggaggcctgtcctggcagaccagcccagacagcctgcgggactacttcagcaagtttggagagatccgggagtgcatggtgatgagggaccccaccaccaagaggagccggggcttcggctttgtgacctttgctgaccctgcctctgtggacaaggtgctgggccagccccaccacgagctggacagcaagaccatcgaccccaaggtggccttcccccggcgggcccagcccaagatggtgaccaggaccaagaagatctttgtgggcggcctgagcgccaacacagtggtggaggatgtgaagcagtactttgagcagtttgggaaggtggaggatgccatgctgatgtttgacaagaccaccaacagacaccggggctttggatttgtgacctttgaaaatgaagatgtggtggagaaggtgtgtgagatccacttccacgagatcaacaacaagatggtggagtgcaagaaggcccagcccaaggaggtgatgtttcctcctggcacccggggccgggcccggggcctgccctacaccatggatgccttcatgctgggcatgggcatgctgggctaccccaactttgtggccacctacggccggggctacccaggctttgcccccagctatggctaccagtttcctggcttccctgctgctgcctacggccctgtggccgctgctgctgtggccgccgcccggggctctgtgctgaacagctacagcgcccagcccaactttggagccccagccagccctgctggcagcaacccagcccggcctgggggcttccctggggccaacagccctggccctgtggccgacctgtatggccctgccagccaggacagcggcgtgggcaactacatctctgctgccagcccccagcccggcagcggcttcggccacggcattgctggccccctgattgccacagccttcaccaacggctaccactag

SEQ ID NO: 20861 - DNA, 333 bp, synthetic construct
  source 1..333: mol_type = other DNA; note = Synthetic coding sequence
tgacacaagccctgctacggggccctgtttggcccccggggcgtgaacattggaggagtgggcagctacctgtacaacccccccacccccagccctggctgcaccacccccctgagccccagcagcttcagccccccccggcccaggacaggcctgccccagggcaagaagacagagaaggtgatgagcctgggcaggaactggcaccggccctgcctgcgctgccagcgctgccacaagaccctgacagctggcagccacgccgagcatgatggagtgccctactgccacgtgccctgctacggctacctgtttggccccaaggccctgtag

SEQ ID NO: 20862 - DNA, 411 bp, synthetic construct
  source 1..411: mol_type = other DNA; note = Synthetic coding sequence
atgacagaggacagccagaggaacttccgctctgtgtactatgagaaggtgggcttccggggcgtggaggagaagaagagcctggagatcctgctgaaggatgaccggctggacacagagaagctgtgcaccttcagccagcgcttccccctgcccagcatgtaccgggccctggtgtggaaggtgctgctgggcatcctgcccccccaccacgagagccacgccaaggtgatgatgtacaggaaggagcagtacctggatgtgctgcacgccctgaaggtggtgcgctttgtgtctgatgccaccccccaggccgaggtgtacctgaggatgtaccagctggagagcggcaagctgcccaggagccccagcttccccctggagccagatgatgaggtgttcctggcctag

SEQ ID NO: 20863 - DNA, 1686 bp, synthetic construct
  source 1..1686: mol_type = other DNA; note = Synthetic coding sequence
atggccagccagttctgcctgcctgagagcccctgcctgagccccccacccctgagccccctggccctggcccccagcagcgccatccgggaccagaggacagccaccaagtgggtggccatgatcccccagaagaaccagacagccagcggggacagcctggatgtgcgggtgcccagcaagccctgcctgatgaagcagaagaagagcccctgcctgtgggagatccagaagctgcaggagcagcgggagaagagaagaaggctgcagcaggagatccgggcccggcgggccctggatgtgaacaccaggaaccccaactatgagatcatgcacatgattgaggagtaccgccgccacctggacagcagcaagatctctgtgctggagcccccccaggagcaccgcatctgtgtgtgtgtgaggaagaggcccctgaaccagcgggagaccaccctgaaggaccacgcctttgatgacaaggccagcaatgagctggtgtaccagttcaccgcccagcccctggtggagagcatcttcaggaagggcatggccacctgctttgcctacggccagacaggcagcggcaagacctacaccatgggcggggacttcagcggcacagcccaggactgcagcaagggcatctatgccctggtggcccaggatgtgttcctgctgctgaggaacagcacctatgagaagctggacctgaaggtgtatggcaccttctttgagatctacggcggcaaggtgtatgacctgctgaactggaagaagaagctgcaggtgctggaggatggcaaccagcagatccaggtggtgggcctgcaggagaaggaggtgtgctgcgtggaggaggtgctgaacctggtggagatcggcaacagctgcaggaccagccggcagacccctgtgaatgcccacagcagccgcagccatgctgtgttccagatcatcctgaagagcggccgcatcatgcacggcaagttcagcctggtggacctggccggaaatgaaagaggagctgacaccaccaaggccagcaggaagaggcagctggagggcgctgagatcaacaagagcctgctggccctgaaggagtgcatcctggccctgggccagaacaagccccacacccccttccgggccagcaagctgaccctggtgctgcgggacagcttcatcggccagaacagcagcacctgcatgattgccaccatcagccctggcatgaccagctgtgagaacaccctgaacaccctgcgctatgccaacagagtgaagaagctgaatgtggatgtgcggccctaccaccggggccactaccccatcggccacgaggcccccaggatgctgaagagccacatcggcaacagcgagatgagcctgcagagagatgagttcatcaagatcccctacgtgcagagcgaggagcagaaggagattgaggaggtggagaccctgcccaccctgctgggcaaggacaccaccatcagcggcaagggcagcagccagtggctggagaacatccaggagagagctggaggagtgcaccacgacatcgacttctgcatcgcccggagcctgagcatcctggagcagaagattgatgccctgacagagatccagaagaagctgaagctgctgctggccgacctgcacgtgaagagcaaggtggagtag

SEQ ID NO: 20864 - DNA, 375 bp, synthetic construct
  source 1..375: mol_type = other DNA; note = Synthetic coding sequence
tgaagcgcctgcatcggcaactgcagcacagccctggaggagctgacagatgacatgacagaggacttcctgcctgtgctgcgggagtacatcctgtacagcgacagcatgaagtctgtgctgaagaagagggaccaggtgcaggccgagtatgaggccaagctggaggccgtggccctgaggaaagaagatcggcccaaggtgcctgcagatgtggagaagtgccaggacaggatggagtgcttcaatgctgacctgaaggctgacatggagcgctggcagaacaacaagaggcaggacttccggcagctgctgatgggcatggctgacaagaacatccagtactatgagaagagcattgctgacctgaagtag

SEQ ID NO: 20865 - DNA, 747 bp, synthetic construct; identical to SEQ ID NO: 20797
  source 1..747: mol_type = other DNA; note = Synthetic coding sequence

SEQ ID NO: 20866 - DNA, 1125 bp, synthetic construct
  source 1..1125: mol_type = other DNA; note = Synthetic coding sequence
atggacttcaacatgaagaagctggccagtgatgctggcatcttcttcaccagggctgtgcagttcacagaggagaagtttggccaggccgagaagacagagctggatgcccactttgagaacctgctggcccgggctgacagcaccaagaactggacagagaagatcctgcggcagacagaggtgctgctgcagcccaaccccagcgcccgggtggaggagttcctgtatgagaagctggacaggaaggtgcccagccgggtgaccaacggggagctgctggcccagtacatggctgatgctgccagcgagctgggccccaccaccccctacggcaagaccctcatcaaggtggccgaggccgagaagcagctgggcgctgctgagcgggacttcatccacacagccagcatctccttcctgacccccctgaggaacttcctggagggggactggaagaccatcagcaaggagcggcggctgctgcagaacagaaggctggacctggatgcctgcaaggcccggctgaagaaggccaaggctgctgaggccaaggccaccctgtggaatgatgaggtggacaaggccgagcaggagctgcgggtggcccagacagaatttgaccggcaggccgaggtgacccggctgctgctggagggcatcagcagcacccacgtgaaccacctgcgctgcctgcatgaatttgtgaagagccagaccacctactatgcccagtgctaccgccacatgctggacctgcagaagcagctgggccgcttccctggcacctttgtgggcaccacagagcccgccagcccccccctgagcagcaccagccccaccacagctgctgccaccatgcctgtggtgcccagcgtggccagcctggcccctcctggagaggccagcctgtgcctggaggaggtggcccccccagccagcggcaccaggaaggcccgggtgctgtatgactatgaagctgctgacagcagcgagctggccctgctggctgatgagctgatcaccgtgtacagcctgcccggcatggaccctgactggctgattggagagcggggcaacaagaagggcaaggtgcctgtgacctacctggagctgctgtcctag

SEQ ID NO: 20867 - DNA, 1188 bp, synthetic construct; identical to SEQ ID NO: 20054
  source 1..1188: mol_type = other DNA; note = Synthetic coding sequence

SEQ ID NO: 20868 - DNA, 1131 bp, synthetic construct
  source 1..1131: mol_type = other DNA; note = Synthetic coding sequence
atggagaagaagaagatggtgacccagggcaaccaggagcccaccaccaccccagatgccatggtgcagcccttcaccaccatccccttccccccaccaccccagaatggcatccccacagaatatggagtgccccacacccaggactatgccggccagacaggagagcacaacctgaccctgtatggcagcacccaggcccacggggagcagagcagcaacagccccagcacccagaatggcagcctgaccacagaaggaggagcccagacagatggccagcagagccagacccagagcagcgagaacagcgagagcaagagcacccccaagaggctgcacgtgagcaacatccccttccgcttccgggaccctgacctgcggcagatgtttggccagtttgggaagatcctggatgtggagatcatcttcaatgaaagaggcagcaagggcttcggctttgtgacctttgagaacagcgcagatgctgaccgggcccgggagaagctgcatggaacagtggtggagggcaggaagattgaggtgaacaatgccacagcccgggtgatgaccaacaagaagatggtgaccccctatgccaacggctggaagctgagccctgtggtgggcgctgtgtatggccctgagctgtatgctgccagcagcttccaggctgatgtgtccctgggcaatgatgctgctgtgcccctgagcggccggggcggcatcaacacctacatccccctcatcatccctggcttcccctaccccacagctgccaccacagctgctgccttccggggggcccacctgcggggccggggccgcacagtgtatggagctgtgcgggctgtgcccccaacagccatcccagcctacccaggagtggtgtaccaggacggcttctatggagctgacctgtatggaggctacgccgcctaccgctatgcccagcctgccacagccacagctgccacagctgctgctgctgctgctgctgcctacagtgatggctacggccgggtgtacacagctgacccctaccacgccctggccccagctgccagctatggagtgggcgctgtggccagcctgtaccggggcggctacagcagatttgccccctactag

SEQ ID NO: 20869 - DNA, 1638 bp, synthetic construct
  source 1..1638: mol_type = other DNA; note = Synthetic coding sequence
atgggcaccccctggaggcctcccagccggcggccctggcgctggcccaccggctgcaccaggaagacctgtggcccccccacctggagcctggagaggaccaggtcctggctgagcggccgggagcacagcgtcttcaccggggtggccatcgtgcactgcagcagcaaggaccaccagctggacaccagggtgtctgagttctatgaggagaccaaggtgaagttcagcgagctgtctgaggagctgctgtgggagtatgtgcacagcggggagcccatggacaaggccggcggctacggcatccaggccctgggcggcatgctggtggagagcgtgcacggggacttcctgaatgtggtgggcttccccctgaaccacttctgcaagcagctggtgaagctgtactacccacccaggcctgaggacctgcggcgctctgtgaagcatgacagcatcccagctgctgacacctttgaggacctgagtgatgtggagggcggcggcagcgagcccacccagagagatgctggcagcagagatgagaaggccgaggccggggaggccggccaggccacagctgaggccgagtgccacaggacccgggagaccctgccccccttccccacccggctgctggagctgattgagggcttcatgctgagcaagggcctgctgacagcctgcaagctgaaggtgtttgacctgctgaaggatgaggccccccagaaggctgctgacatcgccagcaaggtggatgccagcgcctgtggcatggagcggctgctggacatctgtgccgccatgggcctgctggagaagacagagcagggctacagcaacacagaaacagccaacgtgtacctggccagtgatggagagtacagcctgcacggcttcatcatgcacaacaatgacctgacctggaacctcttcacctacctggagtttgccatccgggagggcaccaaccagcaccaccgggccctgggcaagaaggcagaagatctcttccaggatgcctactaccagagccctgagacccggctgcgcttcatgagggccatgcacggcatgaccaagctgacagcctgccaggtggccacagccttcaacctgagccgcttcagcagcgcctgtgatgtgggcggctgcaccggggccctggcccgggagctggcccgggagtaccccaggatgcaggtgacagtgtttgacctgcctgacatcatcgagctggccgcccacttccagcccccaggcccccaggccgtgcagatccactttgctgctggggacttcttccgggaccccctgcccagcgctgagctgtatgtgctgtgccgcatcctgcatgactggccagatgacaaggtgcacaagctgctgagccgggtggccgagagctgcaagccaggggccggcctgctgctggtggagaccctgctggatgaggagaagagggtggcccagagggccctgatgcagagcctgaacatgctggtgcagacagagggcaaggagaggagcctgggggagtaccagtgcctgctggagctgcacggcttccaccaggtgcaggtggtgcacctgggcggcgtgctggatgccatcctggccaccaaggtggccccctag

SEQ ID NO: 20870 - DNA, 621 bp, synthetic construct
  source 1..621: mol_type = other DNA; note = Synthetic coding sequence
atgagccagaccagcctgaagcagaagaagaatgaacctggcatgaggagcagcaaggagagcctggaggccgagaagaggaaggagagtgacaagacaggagtgcggctgagcaaccagatgagaagagctgtgaaccccaaccacagcctgcgctgctgccccttccagggccacagcagctgccgccgctgcctgtgtgccgctgagggcacagccctgggcccctgccacaccatccgcatctacatccacatgtgcctgctgtgggagcagggccagcagatcaccatgatgagggtgtcccgggaccacaccacagattctggaggagagccccagaccacctggggcagccaggagagcagcctgaggaagacagacagccggggctacctggtgcgcagccagtggagccgcatcagccgcagccccagcaccaaggcccccagcattgatgagcccaggagcaggaacaccagcgccaagctgcccagcagcagcaccagcagcaggacccccagcaccagccccagcctgcatgacagcagccccccacccctgagcggccagcccagcctgcagcccccagccagcccccagctgcccaggagcctgtag

SEQ ID NO: 20871 - DNA, 414 bp, synthetic construct
  source 1..414: mol_type = other DNA; note = Synthetic coding sequence
atggcccctggcacccccaagagcctgctgctgagcgccagcatcaagcgggagggggagagccccacagccagcccccacagcagcgccacagatgacctgcaccacagcgaccgctaccagaccttcctgcgggtgcgggccaaccggcagacccggctgaatgcccgcatcggcaagatgaagaggaggaagcaggatgagggccaggtgtgccccctgtgcaaccggcccctggccggcagcgagcaggagatgagcagacatgtggagcactgcctgagcaagcgggagggcagctgcatggccgaggatgatgctgtggacatcgagcacgagaacaacaacagatttgaggagtatgagtggtgtggccagaagaggatccgggccaccaccctgctggagggctag

SEQ ID NO: 20872 - DNA, 570 bp, synthetic construct
  source 1..570: mol_type = other DNA; note = Synthetic coding sequence
atgatccccatctgccctgtggtgtccttcacctacgtgcccagccggctgggagaagatgccaagatggccactggaaactacttcggcttcacccacagcggggctgctgctgctgctgctgctgcccagtacagccagcagcctgccagcggcgtggcctacagccaccccaccaccgtggccagctacacagtgcaccaggcccctgtggccgcccacacagtgacagctgcctatgccccagctgctgccaccgtggccgtggcccggcctgcccctgtggccgtggccgccgccgccacagctgctgcctacggcggctaccccacagcccacacagccacagattatggctacacccagaggcagcaggaggcccctcctcctcctcctccagccaccacccagaactaccaggacagctacagctatgtgcgcagcacagccccagctgtggcctatgacagcaagcagtactaccagcagcctgctgccacagaagctggcagcagcagcagctgctgctgctgctgcaacagctgcctggaccgggaccacctgtactag

SEQ ID NO: 20873 - DNA, 387 bp, synthetic construct
  source 1..387: mol_type = other DNA; note = Synthetic coding sequence
atggatgctgacagtgatgtggccctggacatcctgatcaccaacgtggtgtgtgtgttccgcacccgctgccacctgaacctgaggaagatcgccctggagggcgccaacgtcatctacaagagagatgtgggcaaggtgctgatgaagctgaggaagccccgcatcacagccaccatctggagcagcggcaagatcatctgcacaggagccaccagcgaggaggaggccaagtttggagcccggcggctggcccggagcctgcagaagctgggcttccaggtgatcttcacagacttcaaggtggtgaatgtgctggccgtgtgcaacatgccctttgagatccggctgcctgagttcaccaagaacaaccggccccacgcctag

SEQ ID NO: 20874 - DNA, 381 bp, synthetic construct
  source 1..381: mol_type = other DNA; note = Synthetic coding sequence
atgtggacagcccggggccccttcagaagagaccgctggagcagtgaagatgaggaggccgccggccccagccaggccctgagccccctgctgagtgacaccaggaagatcgtgtctgagggggagctggaccagctggcccagatccggcccctcatcttcaacttccacgagcagacagccatcaaggactgcctgaagatcctggaggagaagacagctgcctatgacatcatgcaggagttcatggccctggagctgaagaacctgcctggagagttcaacagcggcaaccagcccagcaaccgggagaagaaccgctacagagacatcctgcccttccagcaccacggctacagcggccccaatgaaagaacatag

SEQ ID NO: 20875 - DNA, 912 bp, synthetic construct
  source 1..912: mol_type = other DNA; note = Synthetic coding sequence
gaagatgagtacatccagagccacaactttgacagcgccatgaaggtgaccagccagggccagcccagccctgtggagccccggggccccttctacttctgccgcctgctgctggatgacctgggcatgaacagctgggacaggaggaagaacttccacctgctgaagaagaacagcaagctgctgcgggagctgaagaacctggacagccggcagtgccgggagacccacaagattgctgtgttctacatcgccgagggccaggaggacaagtgcagcatcctgagcaatgaaagaggcagccaggcctatgaagattttgtggccggcctgggctgggaggtggacctgagcacccactgcggcttcatgggcggcctgcagagaaatggcagcacaggccagacagccccctactatgccaccagcacagtggaggtgatcttccacgtgtccaccaggatgcccagcgacagtgatgacagcctgaccaagaagctgcggcacctgggcaatgatgaggtgcacatcgtgtggagcgagcacagccgggactacagaagaggcatcatccccacagcctttggagatgtgtccatcatcatctaccccatgaagaaccacatgttcttcatcgccatcaccaagaagccagaggtgcccttcttcggccccctgtttgatggagccatcgtgtctgggaagctgctgcccagcctggtgtgtgccacctgcatcaatgccagcagagctgtgaagtgcctgatccccctgtaccagagcttctatgaggagcgggccctgtacctggaggccatcatccagaaccaccgggaggtgatgacctttgaggactttgctgcccaggtgttcagccccagccccagctacagcctgagcggcacagactag

SEQ ID NO: 20876 - DNA, 2883 bp, synthetic construct
  source 1..2883: mol_type = other DNA; note = Synthetic coding sequence
atggaggtgcaggtgtcccaggccagcctgggctttgagctgacctctgtggagaagagcctgcgggagtggagccggctgagccgggaggtgattgcctggctgtgccccagcagccccaacttcatcctgaacttccccccacctccttctgccagctctgtgtccatggtgcagctgttcagcagccccttcggctaccagagccccagcggccacagcgaggaggagcgggagggcaacatgaagagcgccaagccccaggtgaaccacagccagcacggggagagccagagggccctgagccccctgcagagcaccctgagcagcgctgccagccccagccaggcctatgagacctacattgaaaatggcctcatctgcctgaagcacaagatccggaacatcgagaagaagaagctgaagctggaggactacaaggaccggctgaagagcggggagcacctgaacccagaccagctggaggccgtggagaagtatgaggaggtgctgcacaacctggagtttgccaaggagctgcagaagaccttcagcggcctgagcctggacctgctgaaggcccagaagaaggcccagaggcgggagcacatgctgaagctggaggccgagaagaagaagctgcggaccatcctgcaggtgcagtatgtgctgcagaacctgacccaggagcacgtgcagaaggacttcaagggcggcctgaatggagctgtgtacctgcccagcaaggagctggactacctgatcaagttcagcaagctgacctgcccagagagaaatgaaagcctgtctgtggaggaccagatggagcagagcagcctgtacttctgggacctgctggagggcagcgagaaggctgtggtgggcaccacctacaagcacctgaaggacctgctgagcaagctgctgaacagcggctactttgagagcatccctgtgcccaagaatgccaaggagaaggaggtgcccctggaggaggagatgctgatccagagcgagaagaagacccagctgagcaagacagaatctgtgaaggagagcgagagcctgatggagtttgcccagcctgagatccagccccaggagttcctgaacagacgctacatgacagaggtggactacagcaacaagcagggcgaggagcagccctgggaggccgactatgccaggaagcccaacctgcccaagcgctgggacatgctgacagagccagatggccaggagaagaagcaggagagcttcaagtcctgggaggccagcggcaagcaccaggaggtgtccaagccagctgtgtccctggagcagaggaagcaggacaccagcaagctgcggagcaccctgcctgaggagcagaagaagcaggagatcagcaagagcaagcccagccccagccagtggaagcaggacacccccaagagcaaggccggctacgtgcaggaggagcagaagaagcaggagacccccaagctgtggcctgtgcagctgcagaaggagcaggaccccaagaagcagacccccaagtcctggacccccagcatgcagagcgagcagaacaccaccaagtcctggaccacccccatgtgtgaggagcaggacagcaagcagcctgagacccccaagtcctgggagaacaacgtggagagccagaagcacagcctgaccagccagagccagatcagccccaagtcctggggcgtggccacagccagcctcatccccaatgaccagctgctgcccaggaagctgaacacagagcccaaggatgtgcccaagcctgtgcaccagcctgtgggcagcagcagcaccctgcccaaggaccctgtgctgaggaaggagaagctgcaggacctgatgacccagatccagggcacctgcaacttcatgcaggagagcgtgctggactttgacaagcccagcagcgccatccccaccagccagcccccatctgccaccccaggcagccctgtggccagcaaggagcagaacctgagcagccagagcgacttcctgcaggagcccctgcaggccaccagcagccctgtgacctgcagcagcaatgcctgcctggtgaccacagaccaggccagcagcggcagcgagacagagttcatgaccagcgagaccccagaggccgccatccccccaggcaagcagcccagcagcctggccagccccaacccccccatggccaagggcagcgagcagggcttccagagccccccagccagcagcagctctgtgaccatcaacacagcccccttccaggccatgcagacagtgttcaacgtgaatgcccccctgccccccaggaaggagcaggagatcaaggagagcccctacagccctggctacaaccagagcttcaccacagccagcacccagaccccaccccagtgccagctgcccagcatccacgtggagcagacagtgcacagccaggagacagccaactaccacccagatggcaccatccaggtgtccaatggcagcctggccttctacccagcccagaccaacgtgttcccccggcccacccagccctttgtgaacagccggggctctgtgcggggctgcacccggggcggccgcctcatcaccaacagctaccgcagccctgggggctacaagggctttgacacctaccggggcctgcccagcatcagcaatggaaactacagccagctgcagttccaggcccgggagtacagcggggccccctacagccagagggacaacttccagcagtgctacaagaggggcggcaccagcggcggcccccgggccaacagccgggccaactgcttcatcatgaggaacagcctgctgctgatcaagcagcagggcggcgtcatcctgctgaggtag

SEQ ID NO: 20877 - DNA, 1746 bp, synthetic construct
  source 1..1746: mol_type = other DNA; note = Synthetic coding sequence
aacaacaacggcacctatgatggcatcgcctactttgagtgcaaggagaagcacggcatctttgccccaccccagaagatcagccacatccctgagaactttgatgattatgtggacatcaatgaagatgaggactgctacagtgatgagcgctaccagtgctacaaccaggagcagaatgacacagagggccccaaggaccgggagaaggatgtgtctgagtacttctatgagaagagcctgcccagcgtgaatgacatcgaggcctctgtgaacagaagccgcagcctgaagattgaaacagacaacgtgcaggacatcagcggcgtgctggaggcccacgtgcaccagcagagctctgtggacagccagatcagcagcaaagaaaacaaggacctgatcagtgatgccacagagaaggtgtccattgctgctgaagatgacaccctggacaacaccttcagcgaggagctggagaagcagcagcagttcacagaggaggaggacaacctgtatgcagaggccagcgagaagctgtgcacccccctgctggacctgctgacccgggagaagaaccagctggaggcccagctgaagagcagcctgaatgaggagaagaagagcaagcagcagctggagaagatcagcctgctgacagacagcctgctgaaggtgtttgtgaaggacacagtgaaccagctgcagcagatcaagaagaccagagatgagaagatccagctgagcaaccaggagctgctgggagatgaccagaagaaggtgaccccccaggacctgagccagaatgtggaggagcagagccccagcatcagcggctgcttcctgagcagcgagctggaggatgagaaggaggagatcagcagcccagacatgtgccccaggcctgagagccctgtgtttggagccagcggccaggaggagctggccaagaggctggccgagctggagctgagccgggagttcctgagcgccctgggagatgaccaggactggtttgatgaggactttggcctgagcagcagccacaagatccagaagaacaaggccgaggagaccatcgtgcccctgatggccgagcccaagagggtgacccagcagccctgtgagaccctgctggccgtgccccacacagctgaggaggtggagatcctggtgcacaatgctgctgaggagctgtggaagtggaaggagctgggccatgacctgcacagcatcagcatccccaccaagctgctgggctgtgccagcaagggcctggacatcgagagcaccagcaagagggtgtacaagcaggccgtgtttgacctgaccaaggagatctttgaggagatctttgctgaggaccccaacctgaaccagcctgtgtggatgaagccctgccgcatcaacagcagctacttccggcgggtgaagaaccccaacaacctggatgagatcaagagcttcatcgccagcgaggtgctgaagctgttcagcctgaagaaggagcccaaccacaagacagactggcagaagatgatgaagtttggaaggaagaagagggacagagtggaccacatcctggtgcaggagctgcacgaggaggaggcccagtgggtgaactatgatgaagatgagctgtgtgtgaagatgcagctggctgatggcatctttgagaccctcatcaaggacaccattgatgtgctgaaccagatcagcgagaagcagggccgcatgctgctggtgtag

SEQ ID NO: 20878 - DNA, 345 bp, synthetic construct
  source 1..345: mol_type = other DNA; note = Synthetic coding sequence
atgtggagcctgacagccagcgagggggagagcaccacagcccacttcttcctgggcgctggagatgagggcctgggcacccggggcatcggcatgaggcctgaggagagtgacagcgagctgctggaggatgaggaggatgaggtgcccccagagccccagatcatcgtgggcatctgtgccatgaccaagaagagcaagagcaagcccatgacccagatcctggagcggctgtgccgctttgactacctgactgtggtgatcctgggagaagatgtgatcctgaatgaacctgtggagaactggcccagctgccactgcctgatctccttccacagcaagtag

SEQ ID NO: 20879 - DNA, 918 bp, synthetic construct
  source 1..918: mol_type = other DNA; note = Synthetic coding sequence
atggaggccgagagcttcccctgcctgctgcggcccttcttcaaggagaggagctgtgccctgcggcctgccttccacacagccaagtgtgagaagctgcagaaggagaaggaggagctggagaggagatttgaggccgagatggcccggctgcaggaggagcacggggaccagctgctgagcatccgctgccagcaccaggagcaggtggaggacctgacagccagccatgatgctgccctgctggagatggagaacaaccacacagtggccatcaccatcctgcaggatgaccatgaccacaaggtgcaggagctgatgagcacccatgagctggagaagaaggagctggaggagaactttgagaagctgcggctgagcctgcaggaccaggtggacaccctgaccttccagagccagagcctgcgggaccgggccaggagatttgaggaggccctgaggaagaacacagaggagcagctggagatcgccctggccccctaccagcacctggaggaggacatgaagagcctgaagcaggtgctggagatgaagaaccagcagatccacgagcaggagaagaagatcctggagctggagaagctggccgagaagaacatcatcctggaggagaagatccaggtgctgcagcagcagaatgaagacctgaaggccagaattgaccagaacacagtggtgacccggcagctgtctgaggagaatgccaacctgcaggagtatgtggagaaggagacccaggagaagaagaggctgagcaggaccaatgaggagctgctgtggaagctgcagacaggagaccccaccagccccatcaagctgagccccaccagccctgtgtaccggggcagcagcagcggccccagcagccctgcccgggtgtccaccaccccaagatag

SEQ ID NO: 20880 - DNA, 2319 bp, synthetic construct
  source 1..2319: mol_type = other DNA; note = Synthetic coding sequence
atgcaggagctggaggagctgaggaagcagctgggctctgtggccaccggcagcaccctgcagcagagcctggagctgaagaggaagatgctgcgggacaagcagaacaagaagaacagcggccagcacctgcccatcttccctgcctgggtgtatgaaagacctgccctgattggagacttcctgattggagctggcatcagcacagacacagccctgcccatcggcaccctgcccctggccagccaggagagcgctgtggtggaggacctgctgtatgtgctggtgggcgtggatggccgctacgtgtctgcccagcccctggccggccggcagagcaggaccttcctggtggaccccaacctggacctgagcatccgggagctggtgcaccgcatcctgcctgtggccgccagctacagcgctgtgacccgcttcatcgaggagaagagcagctttgaatatggccaggtgaaccacgccctggccgccgccatgaggaccctggtgaaggagcacctgatcctggtgtcccagctggagcagctgcaccggcagggcctgctgagcctgcagaagctgtggttctacatccagcctgccatgaggaccatggacatcctggccagcctggccacctctgtggacaagggagaatgtctgggcggcagcaccctgagcctgctgcatgaccgctccttctcctacacaggagacagccaggcccaggagctgtgcctgtacctgaccaaggccgccagcgccccctactttgaggtgctggagaagtggatctaccggggcatcatccatgacccctacagcgagttcatggtggaggagcacgagctgaggaaggagcgcatccaggaggactacaatgacaagtactgggaccagcgctacaccatcgtgcagcagcagatccccagcttcctgcagaagatggctgacaagatcctgagcacaggcaagtacctgaatgtggtgcgggagtgtggccatgatgtgacctgccctgtggccaaggagatcatctacaccctgaaggagcgggcctacgtggagcagatcgagaaggccttcaactatgccagcaaggtgctgctggacttcctgatggaggagaaggagctggtggcccacctgcggagcatcaagcgctacttcctgatggaccagggcgacttctttgtgcacttcatggacctggccgaggaggagctgaggaagcctgtggaggacatcaccccaccccggctggaggccctgctggagctggccctgaggatgagcacagccaacacagaccccttcaaggatgacctgaagattgacctgatgcctcatgacctgatcacccagctgctgcgggtgctggccatcgagaccaagcaggagaaggccatggcccatgctgaccccacagagctggccctgagcggcctggaggccttctcctttgactacatcgtgaagtggcccctgagcctcatcatcaacaggaaggccctgacccgctaccagatgctgttccgccacatgttctactgcaagcacgtggagcggcagctgtgcagcgtgtggatcagcaacaagacagccaagcagcacagcctgcacagcgcccagtggtttgctggggccttcaccctgcggcagaggatgctgaactttgtgcagaacatccagtactacatgatgtttgaggtgatggagcccacctggcacatcctggagaagaacctgaagagcgccagcaacattgatgatgtgctgggccaccacacaggcttcctggacacctgcctgaaggactgcatgctgaccaaccctgagctgctgaaggtgttcagcaagctgatgtctgtgtgtgtgatgttcaccaactgcatgcagaagttcacccagagcatgaagctggatggagagctgggcggccagaccctggagcacagcacagtgctgggcctgcctgctggagctgaggagcgggccaggaaggagctggccaggaagcacctggccgagcacgccgacacagtgcagctggtgtctggctttgaggccaccatcaacaagtttgacaagaacttcagcgcccacctgctggacctgctggcccggctgagcatctacagcaccagtgactgtgagcacggcatggccagcgtcatcagccggctggacttcaacggcttctacacagagcggctggagcggctgtctgctgagaggagccagaaggccaccccccaggtgcctgtgctgcggggccccccagccccagccccccgggtggccgtgacagcccagtag

SEQ ID NO: 20881 - DNA, 1203 bp, synthetic construct
  source 1..1203: mol_type = other DNA; note = Synthetic coding sequence
atggacttcaacatgaagaagctggccagtgatgctggcatcttcttcaccagggctgtgcagttcacagaggagaagtttggccaggccgagaagacagagctggatgcccactttgagaacctgctggcccgggctgacagcaccaagaactggacagagaagatcctgcggcagacagaggtgctgctgcagcccaaccccagcgcccgggtggaggagttcctgtatgagaagctggacaggaaggtgcccagccgggtgaccaacggggagctgctggcccagtacatggctgatgctgccagcgagctgggccccaccaccccctacggcaagaccctcatcaaggtggccgaggccgagaagcagctgggcgctgctgagcgggacttcatccacacagccagcatctccttcctgacccccctgaggaacttcctggagggggactggaagaccatcagcaaggagcggcggctgctgcagaacagaaggctggacctggatgcctgcaaggcccggctgaagaaggccaaggctgctgaggccaaggccaccaccgtgcctgacttccaggagacccggcccaggaactacatcctgagcgccagcgccagcgccctgtggaatgatgaggtggacaaggccgagcaggagctgcgggtggcccagacagaatttgaccggcaggccgaggtgacccggctgctgctggagggcatcagcagcacccacgtgaaccacctgcgctgcctgcacgagtttgtgaagagccagaccacctactatgcccagtgctaccgccacatgctggacctgcagaagcagctgggcagcagccagggcgccatcttccctggcacctttgtgggcaccacagagcccgccagcccccccctgagcagcaccagccccaccacagctgctgccaccatgcctgtggtgcccagcgtggccagcctggcccctcctggagaggccagcctgtgcctggaggaggtggcccccccagccagcggcaccaggaaggcccgggtgctgtatgactatgaagctgctgacagcagcgagctggccctgctggctgatgagctgatcaccgtgtacagcctgcccggcatggaccctgactggctgattggagagcggggcaacaagaagggcaaggtgcctgtgacctacctggagctgctgtcctag

SEQ ID NO: 20882 - DNA, 1827 bp, synthetic construct
  source 1..1827: mol_type = other DNA; note = Synthetic coding sequence
atgcccttctggcccatccgctgcctgaagaggagcaggaggatgccccggggcggggccggggagcgggagaaggtgcctgccaaccctgaggccctgctgctgatggccagcagccagagggacatggaggactgggtgcaggccatcagaagagtcatctgggcccccctgggcggcggcatcttcggccagaggctggaggagaccgtgcaccacgagaggaaatatggcccccggctggcccccctgctggtggagcagtgtgtggacttcatccgggagcggggcctgacagaggagggcctcttcaggatgcctggccaggccaacctggtgcgggacctgcaggacagctttgactgtggggagaagcccctgtttgacagcaccacagatgtgcacacagtggccagcctgctgaagctgtacctgcgggagctgcctgagcctgtggtgccctttgcccgctatgaggacttcctgagctgtgcccagctgctgaccaaggatgaaggagagggcaccctggagctggccaagcaggtgagcaacctgccccaggccaactacaacctgctgcgctacatctgcaagttcctggatgaggtgcaggcctacagcaatgtgaacaagatgtctgtgcagaacctggccaccgtgtttggccccaacatcctgcggccccaggtggaggaccctgtgaccatcatggagggcaccagcctggtgcagcacctgatgacagtgctgatcaggaagcacagccagctgttcaccgcccctgtgcctgagggccccaccagcccccggggcggcctgcagtgtgctgtgggctggggcagcgaggaggtgacccgggacagccagggcgagcccggcggccctggcctgcctgcccacaggaccagcagcctggatggagctgctgtggccgtgctgagcaggacagcccccaccggccctggcagccgctgcagccctgggaagaaggtgcagaccctgcccagctggaagagcagcttccggcagcccaggagcctgagcggcagccccaagggcggcggcagcagcctggaggtgcccatcatcagcagcggcggcaactggctgatgaatggcctgagcagcctgcggggccaccggcgggccagcagcggggaccggctgaaggacagcggctctgtgcagaggctgagcacctatgacaacgtgcctgcccctggcctggtgcccggcatccccagcgtggcctccatggcctggagcggggccagcagcagcgagagctctgtgggcggcagcctgagcagctgcacagcctgccgggccagtgacagcagcgcccggagcagcctgcacacagactgggccctggagcccagccccctgcccagcagcagcgaggaccccaagagcctggacctggaccacagcatggatgaagctggagctggggccagcaacagcgagcccagcgagccagacagccccacccgggagcacgcccggcgctctgaggccctgcagggcctggtgacagagctgcgggcagagctgtgccggcagaggacagaatatgaaagatctgtgaagagaattgaggagggcagcgctgacctgaggaagaggatgagccggctggaggaggagctggaccaggagaagaagaagtacatcatgctggagatcaagctgagaaattctgagcgggcccgggaggatgctgagaggaggaaccagctgctgcagcgggagatggaggagttcttcagcaccctgggcagcctgactgtgggcgccaagggggcccgggcccccaagtag

SEQ ID NO: 20883 - DNA, 708 bp, synthetic construct
  source 1..708: mol_type = other DNA; note = Synthetic coding sequence
atgttttctgaggagtgcatcatggatgtgattggctgcctggagtatgaccctgccctgagccagcccaggaagcaccgggagttcctgaccaagacagccaagttcaaggaggtgatccccatcagtgaccctgagctgaagcagaagatccaccagacctacagagtgcagtacatccaggacatggtgctgcccaccccatctgtgtttgaggagaacatgctgagcaccctgcacagcttcatcttcttcaacaaggtggagatcgtgggcatgctgcaggaggatgagaagttcctgacagacctgtttgcccagctgacagatgaggccacagatgaggagaagaggcaggagctggtgaacttcctgaaggagttctgtgccttcagccagaccctgcagccccagaacagagatgccttcttcaagaccctgagcaacatgggcatcctgcctgccctggaggtgatcctgggcatggatgacacccaggtgcgctctgctgccacagacatcttctcctacctggtggagtacaaccccagcatggtgcgggagtttgtgatgcaggaggcccagcagaatgatgatgtgtccaagaagctgacagagcagaagatcaccagcaaggtgaacatcatctgcaccaacagcaagtacctgtacatcggcagctacaactgcttctactacagcttctag

SEQ ID NO: 20884 - DNA, 3513 bp, synthetic construct
  source 1..3513: mol_type = other DNA; note = Synthetic coding sequence
gtgtacaagggccgccacgtgaagacaggccagctggccgccatcaaggtgatggatgtgacagaagatgaggaggaggagatcaagctggagatcaacatgctgaagaagtacagccaccacaggaacatcgccacctactacggggccttcatcaagaagagccccccaggccatgatgaccagctgtggctggtgatggagttctgtggggccggcagcatcacagacctggtgaagaacaccaagggcaacaccctgaaggaggactggatcgcctacatcagccgggagatcctgcggggcctggcccacctgcacatccaccacgtgatccaccgggacatcaagggccagaatgtgctgctgacagaaaatgctgaggtgaagctggtggactttggagtgtctgcccagctggacagaacagtgggcagaagaaacaccttcatcggcaccccctactggatggcccctgaggtgattgcctgtgatgagaacccagatgccacctatgactacagaagtgacctgtggagctgtggcatcacagccatcgagatggccgagggcgccccacccctgtgtgacatgcaccccatgagggccctcttcctgatccccagaaatcctccaccccggctgaagagcaagaagtggagcaagaagttcttctccttcatcgagggctgcctggtgaagaactacatgcagaggcccagcacagagcagctgctgaagcaccccttcatccgggaccagcccaatgaaaggcaggtgcgcatccagctgaaggaccacatcgacaggaccaggaagaagagaggagagaaggatgaaacagaatatgagtacagcggcagcgaggaggaggaggaggaggtgcctgagcaggagggggagcccagcagcatcgtgaatgtgcctggagagagcaccctgcggcgggacttcctgcggctgcagcaggagaacaaggagaggtctgaggccctgcggcggcagcagctgctgcaggagcagcagctgcgggagcaggaggagtacaagaggcagctgctggccgagcggcagaagagaattgagcagcagaaggagcagaggcggcggctggaggagcagcagaggcgggagcgggaggcccggcggcagcaggagcgggagcagaggagaagagagcaggaggagaagaggcggctggaggagctggagaggaggaggaaggaggaggaggagcggcggcgggcagaggaggagaagagaagagtggagcgggagcaggagtacatccggcggcagctggaggaggagcagaggcacctggaggtgctgcagcagcagctgctgcaggagcaggccatgctgctgcatgaccaccggcggccccacccccagcacagccagcagcccccaccaccccagcaggagaggagcaagcccagcttccacgcccctgagcccaaggcccactatgagcctgctgaccgggcccgggaggtggaggaccgcttcaggaagaccaaccacagcagccctgaggcccagagcaagcagacaggccgggtgctggagccccctgtgcccagccgctctgagagcttcagcaatggaaattctgagagcgtgcacccagccctgcagaggcctgctgagccccaggtgcctgtgaggaccaccagccgcagccctgtgctgagcagaagagacagccccctgcagggcagcggccagcagaacagccaggccggccagaggaacagcaccagcattgagccccggctgctgtgggagcgggtggagaagctggtgccccggcccggcagcggcagcagcagcggcagcagcaacagcggcagccagcccggcagccaccctggcagccagagcggcagcggggagcgcttccgggtgcgcagcagcagcaagtctgagggcagccccagccagaggctggagaatgctgtgaagaagccagaggacaagaaggaggtgttccggcccctgaagccagctgacctgacagccctggccaaggagctgcgggctgtggaggatgtgcggcccccccacaaggtgacagactacagcagcagcagcgaggagagcggcaccacagatgaggaggatgatgatgtggagcaggagggcgcagatgagagcaccagcggccctgaggacaccagggctgccagcagcctgaacctgagcaatggagaaacagagagcgtgaagaccatgattgtgcatgatgatgtggagagcgagcccgccatgacccccagcaaggagggcaccctgattgtgcggcagacccagagcgccagcagcaccctgcagaagcacaagagcagcagcagcttcacccccttcatcgacccccggctgctgcagatcagccccagcagcggcaccaccgtgacctctgtggtgggcttcagctgtgatggcatgaggcctgaggccatccggcaggaccccaccaggaaaggatctgtggtgaatgtgaaccccaccaacacccggccccagagcgacaccccagagatcaggaagtacaagaagcgcttcaacagcgagatcctgtgtgccgccctgtggggcgtgaacctgctggtgggcacagagagcggcctgatgctgctggacaggagcggccagggcaaggtgtaccccctcatcaacagaagacgcttccagcagatggatgtgctggagggcctgaatgtgctggtgaccatcagcggcaagaaggacaagctgcgggtgtactacctgtcctggctgaggaacaagatcctgcacaatgaccctgaggtggagaagaagcagggctggaccaccgtgggggacctggagggctgtgtgcactacaaggtggtgaagtatgaaagaatcaagttcctggtgattgccctgaagagctctgtggaggtgtatgcctgggcccccaagccctaccacaagttcatggccttcaagagctttggagagctggtgcacaagcccctgctggtggacctgactgtggaggagggccagaggctgaaggtgatctacggcagctgtgccggcttccacgctgtggatgtggacagcggctctgtgtatgacatctacctgcccacccacatccagtgcagcatcaagccccacgccatcatcatcctgcccaacacagatggcatggagctgctggtgtgctatgaagatgagggcgtgtatgtgaacacctacggccgcatcaccaaggatgtggtgctgcagtggggcgagatgcccacctctgtggcctacatccgcagcaaccagaccatgggctggggcgagaaggccatcgagatccgctctgtggagaccggccacctggatggagtcttcatgcacaagagggcccagaggctgaagttcctgtgtgaaagaaatgacaaggtgttctttgcctctgtgcgcagcggcggcagcagccaggtgtacttcatgaccctgggccgcaccagcctgctgtcctggtag

SEQ ID NO: 20885 - DNA, 1476 bp, synthetic construct
  source 1..1476: mol_type = other DNA; note = Synthetic coding sequence
gtcatcatccaccgggtgctggagaagcaggaggtggaggtgttctacccagactttggaaacatcggcatcgtgcagaagagcagcctgcgcttcctgaagtgctgctacaccaagctgcctgcccaggccatcccctgcagcctggcctgggtgcggcctgtggaggagcactggaccagcaaggccatcctgcagttccagaagctgtgtggcctgaagcccctggtgggcgtggtggatgaatatgtggatggcatcctgaacatcttcctgtgtgacaccagcagcaatgaagatgtgtacttccaccacgtgctgaggacagagggccacgccatcgtgtgccgggagaacatcagcagcaagggcttcagcgagctgaaccccctggccctgtacaccaccagcagcggcggccctgaggacatcgtgctgacagagctgggctaccccagccagcagcactacttcaatgaagacaggaagatcagcccccagagcaaggagagcgagctgcgcatcctgcaggacatcaatgatgagaagagcctgagccacctgaagtctgagagcaaggagcccctgaaggacagcgagtttgagagcctgaagacctgcaacaagagctttgaggaggaccccaagtggagcaaccctgagcccaatgacctgaaggaggagaatgaagatgagatccccaccggcatgccctgcctggagagcgtgaccatcggagatgacatctgggatgagaactggctgcccctgcaggccaagatgggcaaaggaggagatgctgccagccacctgttcaccgccagcctgggcggcaagaaccagtacagcagctgcaaggagatgccccagaaggactggtgcttcagcacccccaaggacacctgggatgacagctggcagcccagcggcctggtgaatggcaccaaggtggaggtgcacaagccagaggtgctgggcgcccaggagaagaacacaggcaccaacagaacccagaagcagctggacatcaatggcagcagtgacagcagcaccctgcccaagctggaggagttctgcaccagcctgacccagagcgagcagagcgcagatggcagccagagcgagcccaacaacagccagacccagcccaagcagatccagctgagcacagctgccccctgcagcaccacagctgtggatgacagcgctgagaagcccagcggctctgtggagagcagccctgagatcctgaagaatgaagacttcagcagcagccgggccatcaccctgtacaaggacaagaggcaggagagcgtggaccagctgagcctcatcctgtcctatgagtgccagatcagccagaagctgtacatccccaggagcacagccacagctgccctgggcgccgccgcccggctggccaccagccgcagcctgctgcactggtaccccagcgtgaagaggatggaggcctag

SEQ ID NO: 20886 - DNA, 426 bp, synthetic construct
  source 1..426: mol_type = other DNA; note = Synthetic coding sequence
atgcccaccaccagcaggcctgccctggatgtgaagggcggcaccagccctgccaaggaggatgccaaccaggagatgagctctgtggcctacagcaacctggccgtgaaggacaggaaggctgtggccatcctgcactacccaggagtggccagcaatggcaccaaggccagcggggcccccaccagcagcagcggcagccccatcggcagccccaccaccaccccacccaccaagccacccagcttcaacctgcacccagccccccacctgctggcctccatgcacctgcagaagctgaacagccagtaccagggcatggctgctgccaccccaggccagcctggagaggccggccccctgcagaactgggactttggagcccaggccggcggcgctgagagcctgagccccagcgctggatag

SEQ ID NO: 20887 - DNA, 1188 bp, synthetic construct; identical to SEQ ID NO: 20054
  source 1..1188: mol_type = other DNA; note = Synthetic coding sequence

SEQ ID NO: 20888 - DNA, 1344 bp, synthetic construct
  source 1..1344: mol_type = other DNA; note = Synthetic coding sequence
atggccacagacagctgggccctggccgtggatgagcaggaggccgctgtgaagtccatgaccaacctgcagatcaaggaggagaaggtgaaggctgacaccaacggcatcatcaagaccagcaccacagctgagaagacagatgaggaggagaaggaggaccgggccgcccagagcctgctgaacaagctgatccgcagcaacctggtggacaacaccaaccaggtggaggtgctgcagagggaccccaacagccccctgtacagcgtgaagagctttgaggagctgcggctgccccagaacctgattgcccagagccagagcggcaccgggaagacagctgcctttgtgctggccatgctgagccgggtggagcccagcgaccgctacccccagtgcctgtgcctgagccccacctatgagctggccctgcagacaggcaaggtgattgagcagatgggcaagttctacccagagctgaagctggcctatgctgtgcggggcaacaagctggagcggggccagaagatcagcgagcagatcgtgattggcaccccaggcaccgtgctggactggtgcagcaagctgaagttcatcgaccccaagaagatcaaggtgtttgtgctggatgaagcagatgtgatgattgccacccagggccaccaggaccagagcatccgcatccagaggatgctgcccaggaactgccagatgctgctcttcagcgccacctttgaggacagcgtgtggaagtttgcccagaaggtggtgcctgaccccaacgtcatcaagctgaagcgggaggaggagaccctggacaccatcaagcagtactacgtgctgtgcagcagcagagatgagaagttccaggccctgtgcaacctgtatggagccatcaccatcgcccaggccatgatcttctgccacaccaggaagacagcctcctggctggccgctgagctgagcaaggagggccaccaggtggccctgctgagcggggagatgatggtggagcagagagctgctgtgattgagcgcttccgggagggcaaggagaaggtgctggtgaccaccaacgtgtgtgcccggggcattgatgtggagcaggtgtctgtggtgatcaactttgacctgcctgtggacaaggatggcaacccagacaatgagacctacctgcacagaattggaagaacaggccgctttgggaagaggggcctggccgtgaacatggtggacagcaagcacagcatgaacatcctgaaccgcatccaggagcacttcaacaagaagattgagcggctggacacagatgacctggatgaaattgagaagatcgccaactag

SEQ ID NO: 20889 - DNA, 630 bp, synthetic construct
  source 1..630: mol_type = other DNA; note = Synthetic coding sequence
atggccagcagtgacctggagcagctgtgcagccacgtgaatgagaagattggcaacatcaagaagaccctgagcctgaggaactgtggccaggagcccaccctgaagacagtgctgaacaagattggagatgagatcatcgtcatcaatgagctgctgaacaagctggagctggagatccagtaccaggagcagaccaacaacagcctgaaggagctgtgtgagagcctggaggaggactacaaggacatcgagcacctgaaggaaaatgtgcccagccacctgccccaggtgacagtgacccagagctggtacatgaagagccggctgacctacaaccagatcaatgatgtgatcaaggagatcaacaaggctgtgatcagcaagtacaagatcctgcaccagcccaagaagtccatgaacagcgtgaccaggaacctgtaccaccgcttcattgatgaggagaccaaggacaccaagggccgctacttcatcgtggaggccgacatcaaggagttcaccaccctgaaggctgacaagaagttccacgtgctgctgaacatcctgcggcactgccggcggctgtctgaggtgcggggcggcggcctgacccgctacgtgatcacctag

SEQ ID NO: 20890 - DNA, 1125 bp, synthetic construct
  source 1..1125: mol_type = other DNA; note = Synthetic coding sequence
atggattctgtgcgcagcggccccttcggccagctgttccggccagacaacttcatcttcggccagacaggagctggcaacaactgggccaagggccactacacagaaggagctgagctggtggatgctgtgctggatgtggtgaggaaagaatgtgagcactgtgactgcctgcagggcttccagctgacccacagcctgggcggcggcactggaagtggcatgggcaccctgctgatcagcaagatccgggaggagttcccagaccgcatcatgaacaccttctctgtgatgcccagccccaaggtgtctgacacagtggtggagccctacaatgccaccctgtctgtgcaccagctggtggagaacacagatgagacctactgcatcgacaatgaggccctgtatgacatctgcttccgcaccctgaagctgaccacccccacctacggggacctgaaccacctggtgtctgccaccatgtctggagtgaccaccagcctgcgcttccctggccagctgaatgctgacctgaggaagctggccgtgaacatggtgcccttcccccggctgcacttcttcatgcctggctttgcccccctgaccagccggggcagccagcagtaccgggccctgactgtgcctgagctgacccagcagatgtttgatgccaggaacatgatggccgcctgtgaccccaggcatggccgctacctgactgtggccaccgtcttccggggccccatgtccatgaaggaggtggatgagcagatgctggccatccagagcaagaacagcagctactttgtggagtggatccccaacaacgtgaaggtggccgtgtgtgacatccccccccggggcctgaagatggccagcaccttcatcggcaacagcacagccatccaggagctgttcaagaggatcagcgagcagttcagcgccatgttccggaggaaggccttcctgcactggttcaccggggagggcatggatgagatggagttcacagaagctgagagcaacatgaatgacctggtgtctgagtaccagcagtaccaggatgccacagccaatgatggagaggaggcctttgaagatgaggaggaggagattgatggatag

SEQ ID NO: 20891 - DNA, 2289 bp, synthetic construct
  source 1..2289: mol_type = other DNA; note = Synthetic coding sequence
atggccagcctgctgcaggaccagctgaccacagaccaggacctgctgctgatgcaggagggcatgcccatgaggaaggtgcgcagcaagtcctggaagaagctgcgctacttccggctgcagaatgatggcatgacagtgtggcacgcccggcaggcccggggcagcgccaagcccagcttcagcatcagtgatgtggagaccatcagaaatggacatgattctgagctgctgcggagcctggccgaggagctgcccctggagcagggcttcaccatcgtgttccacggccgccgcagcaacctggacctgatggccaacagcgtggaggaggcccagatctggatgaggggcctgcagctgctggtggacctggtgacctccatggaccaccaggagcggctggaccagtggctgagtgactggttccagagaggagacaagaaccaggacggcaagatgtccttccaggaggtgcagaggctgctgcacctgatgaatgtggagatggaccaggagtatgccttcagcctcttccaggccgctgacaccagccagagcggcaccctggagggggaggagtttgtgcagttctacaaggccctgaccaagagagctgaggtgcaggagctgtttgagagcttcagcgcagatggccagaagctgaccctgctggagttcctggacttcctgcaggaggagcagaaggagcgggactgcaccagcgagctggccctggagctgattgacagatatgagcccagcgacagcggcaagctgcggcacgtgctgtccatggatggcttcctgagctacctgtgcagcaaggatggagacatcttcaacccagcctgcctgcccatctaccaggacatgacccagcccctgaaccactacttcatctgcagcagccacaacacctacctggtgggggaccagctgtgtggccagagctctgtggagggctacatccgggccctgaagaggggctgccgctgtgtggaggtggatgtgtgggatggccccagcggggagcctgtggtgtaccacggccacaccctgaccagccgcatcctcttcaaggatgtggtggccaccgtggcccagtatgccttccagaccagtgactaccctgtgatcctgagcctggagacccactgctcctgggagcagcagcagaccatggcccggcacctgacagagatcctgggggagcagctgctgagcaccaccctggatggagtgctgcccacccagctgcccagccctgaggagctgcggaggaagatcctggtgaagggcaagaagctgaccctggaggaggacctggagtatgaggaggaggaggccgagcctgagctggaggagagcgagctggccctggagagccagtttgaaacagagcctgagccccaggagcagaacctgcagaacaaggacaagaagaagaagagcaagcccatcctgtgcccagccctgagcagcctggtgatctacctgaagtctgtgtccttccgctccttcacccacagcaaggagcactaccacttctatgagatcagcagcttcagcgagaccaaggccaagaggctcatcaaggaggccggaaatgaatttgtgcagcacaacacctggcagctgagccgggtgtaccccagcggcctgaggacagacagcagcaactacaacccccaggagctgtggaatgccggctgccagatggtggccatgaacatgcagacagctggcctggagatggacatctgtgatggccacttccggcagaatggaggctgcggctacgtgctgaagccagacttcctgcgggacatccagagcagcttccaccctgagaagcccatcagccccttcaaggcccagaccctgctgatccaggtgatcagcggccagcagctgcccaaggtggacaagaccaaggagggcagcatcgtggaccccctggtgaaggtgcagatcttcggcgtgcggctggacacagcccggcaggagaccaactacgtggagaacaacggcttcaacccctactggggccagaccctgtgcttccgggtgctggtgcctgagctggccatgctgcgctttgtggtgatggactatgactggaagagcagaaatgacttcatcggccagtacaccctgccctggacctgcatgcagcagggctaccgccacatccacctgctgagcaaggatggcatcagcctgcggcctgccagcatctttgtgtacatctgcatccaggagggcctggagggagatgagagctag

SEQ ID NO: 20892 - DNA, 1461 bp, synthetic construct
  source 1..1461: mol_type = other DNA; note = Synthetic coding sequence
atggccgagctgcagatgctgctggaggaggagatccctgggggccggcgggccctgtttgacagctacaccaacctggagcgggtggccgactactgtgagaacaactacatccagagcgctgacaagcagagggccctggaggagaccaaggcctacaccacccagagcctggcctctgtggcctacctgatcaacaccctggccaacaacgtgctgcagatgctggacatccaggccagccagctgcggaggatggagagcagcatcaaccacatcagccagacagtggacatccacaaggagaaggtggcccggcgggagatcggcatcctgaccaccaacaagaacaccagcaggacccacaagatcatcgccccagccaacctggagaggcctgtgcgctacatcaggaagcccatcgactacaccatcctggatgacattggacatggagtgaagtggctgctgcgcttcaaggtgtccacccagaacatgaagatgggcggcctgcccaggaccaccccacccacccagaagccacccagcccccccatgtctgggaagggcaccctgggccgccacagcccctaccgcaccctggagcctgtgcggccccctgtggtgcccaatgactatgtgcccagccccaccaggaacatggcccccagccagcagagccctgtgaggacagcctctgtgaaccagaggaacagaacctacagcagcagcggcagcagcggcggcagccaccccagcagccgcagcagcagccgggagaacagcggcagcggctctgtgggcgtgcccatcgctgtgcccacccccagcccccccagcgtcttccctgccccagctggcagcgctggcaccccacccctgcctgccaccagcgccagcgccccagcccccctggtgcctgccaccgtgcccagcagcacagccccagatgctgctgctgggggcgcccagaccctggctgatggcttcaccagccccaccccacctgtggtgagcagcaccccacccaccggccaccctgtgcagttctacagcatgaacagacctgccagccgccacaccccacccaccatcggcggcagcctgccctaccgccggccccccagcatcaccagccagaccagcctgcagaaccagatgaatggaggccccttctacagccagaaccctgtgtctgacaccccacctcctcctcctcctgtggaggagcctgtgtttgatgagagccccccacctcctcctcctcctgaggactatgaggaggaggaggccgctgtggtggagtacagcgacccctatgcagaagaagatcctccctgggcccccaggagctacctggagaaggtggtggccatctatgactacaccaaggacaaggaggatgagctgtccttccaggagggcgccatcatctacgtgatcaagaagaatgatgactag

SEQ ID NO: 20893 - DNA, 2145 bp, synthetic construct
  source 1..2145: mol_type = other DNA; note = Synthetic coding sequence
atgctgagccccaagatccggcaggcccggcgggcccggagcaagagcctggtgatgggagagcagagccgcagccctggccgcatgccctgcccccaccggctgggccctgtgctgaaggccggctggctgaagaagcagaggagcatcatgaagaactggcagcagcgctggtttgtgctgcggggggaccagctgttctactacaaggacaaggatgagatcaagccccagggcttcatcagcctgcagggcacccaggtgacagagctgcccccaggccctgaggaccccgggaagcacctgtttgagatcagccctggaggagctggggagcgggagaaggtgcctgccaaccctgaggccctgctgctgatggccagcagccagagggacatggaggactgggtgcaggccatcagaagagtcatctgggcccccctgggcggcggcacagcccggcgcagccacgcccaccccctggagcccctgcccccaggcatcttcggccagaggctggaggagaccgtgcaccacgagaggaaatatggcccccggctggcccccctgctggtggagcagtgtgtggacttcatccgggagcggggcctgacagaggagggcctcttcaggatgcctggccaggccaacctggtgcgggacctgcaggacagctttgactgtggggagaagcccctgtttgacagcaccacagatgtgcacacagtggccagcctgctgaagctgtacctgcgggagctgcctgagcctgtggtgccctttgcccgctatgaggacttcctgagctgtgcccagctgctgaccaaggatgaaggagagggcaccctggagctggccaagcaggtgagcaacctgccccaggccaactacaacctgctgcgctacatctgcaagttcctggatgaggtgcaggcctacagcaatgtgaacaagatgtctgtgcagaacctggccaccgtgtttggccccaacatcctgcggccccaggtggaggaccctgtgaccatcatggagggcaccagcctggtgcagcacctgatgacagtgctgatcaggaagcacagccagctgttcaccgcccctgtgcctgagggccccaccagcccccggggcggcctgcagtgtgctgtgggctggggcagcgaggaggtgacccgggacagccagggcgagcccggcggccctggcctgcctgcccacaggaccagcagcctggatggagctgctgtggccgtgctgagcaggacagcccccaccggccctggcagccgctgcagccctgggaagaaggtgcagaccctgcccagctggaagagcagcttccggcagcccaggagcctgagcggcagccccaagggcggcggcagcagcctggaggtgcccatcatcagcagcggcggcaactggctgatgaatggcctgagcagcctgcggggccaccggcgggccagcagcggggaccggctgaaggacagcggctctgtgcagaggctgagcacctatgacaacgtgcctgcccctggcctggtgcccggcatccccagcgtggcctccatggcctggagcggggccagcagcagcgagagctctgtgggcggcagcctgagcagctgcacagcctgccgggccagtgacagcagcgcccggagcagcctgcacacagactgggccctggagcccagccccctgcccagcagcagcgaggaccccaagagcctggacctggaccacagcatggatgaagctggagctggggccagcaacagcgagcccagcgagccagacagccccacccgggagcacgcccggcgctctgaggccctgcagggcctggtgacagagctgcgggcagagctgtgccggcagaggacagaatatgaaagatctgtgaagagaattgaggagggcagcgctgacctgaggaagaggatgagccggctggaggaggagctggaccaggagaagaagaagtacatcatgctggagatcaagctgagaaattctgagcgggcccgggaggatgctgagaggaggaaccagctgctgcagcgggagatggaggagttcttcagcaccctgggcagcctgactgtgggcgccaagggggcccgggcccccaagtag

SEQ ID NO: 20894 - DNA, 381 bp, synthetic construct; identical to SEQ ID NO: 20874
  source 1..381: mol_type = other DNA; note = Synthetic coding sequence

SEQ ID NO: 20895 - DNA, 2442 bp, synthetic construct
  source 1..2442: mol_type = other DNA; note = Synthetic coding sequence
atgtctgagcagggcgacctgaaccaggccatcgccgaggagggcggcacagagcaggagacagccaccccagaaaatggcatcgtgaagtctgagagcctggatgaggaggagaagctggagctgcagaggcggctggaggcccagaaccaggagaggaggaagagcaagagcggggccggcaagggcaagctgaccaggagcctggccgtgtgtgaggagagcagcgcccggcctggaggagagagcctgcaggaccaggagagcatccacctgcagctgagcagcttcagcagcctgcaggaggaggacaagagcaggaaggatgattctgagcgggagaaggagaaggacaagaacaaggacaagaccagcgagaagcccaagatccgcatgctgagcaaggactgcagccaggagtacacagacagcactggaattgacctgcacgagttcctgatcaacaccctgaagaacaacagccgggacaggatgatcctgctgaagatggagcaggagatcatcgacttcatcgctgacaacaacaaccactacaagaagttcccccagatgagcagctaccagaggatgctggtgcaccgggtggccgcctacttcggcctggaccacaacgtggaccagacaggcaagagcgtcatcatcaacaagaccagcagcacccgcatccctgagcagcgcttctgtgagcacctgaaggatgagaagggggaggagagccagaagcgcttcatcctgaagagggacaacagcagcattgacaaggaggacaaccagagcgtgtgcagccaggagagcctgtttgtggagaacagccggctgctggaggacagcaacatctgcaatgagacctacaagaagaggcagctgttccggggcaacagagatggcagcggccgcaccagcggcagccggcagagcagcagtgaaaatgagctgaagtggagcgaccaccagagggcctggagcagcacagacagcgacagcagcaacagaaacctgaagccagccatgaccaagacagccagctttggaggcatcaccgtgctgaccaggggggacagcaccagcagcaccaggagcacaggcaagctgagcaaggccggcagcgagagcagcagcagcgctggcagcagcggcagcctgagcaggacccacccccccctgcagagcacccccctggtgtctggagtggccgccggcagccctggctgtgtgccctacccagaaaatggaattggaggccaggtggcccccagcagcaccagctacatcctgctgcccctggaggccgccaccggcatccccccaggcagcatcctgctgaacccccacacaggccagccctttgtgaacccagatggcaccccagccatctacaacccccccaccagccagcagcccctgcggagcgccatggtgggccagagccagcagcagcccccccagcagcagcccagcccccagccccagcagcaggtgcagcccccccagccccagatggccggccccctggtgacccagagcgtgcagggcctgcaggccagcagccagagcgtgcagtacccagctgtgtccttccccccccagcacctgctgcctgtgagccccacccagcacttccccatgagagatgatgtggccacccagtttggccagatgaccctgagccggcagagcagtggagagaccccagagcccccatctggccctgtgtaccccagcagcctgatgccccagcctgcccagcagcccagctatgtgattgccagcacaggccagcagctgcccaccggcggcttcagcggcagcggcccccccatcagccagcaggtgctgcagcccccacccagcccccagggctttgtgcagcagcccccaccagcccagatgcctgtgtactactaccccagcggccagtaccccaccagcaccacccagcagtaccggcccatggcccctgtgcagtacaatgcccagaggagccagcagatgccccaggccgcccagcaggccggctaccagcctgtgctgagcggccagcagggcttccagggcctcatcggcgtgcagcagcccccccagagccagaatgtcatcaacaaccagcagggcacccctgtgcagagcgtgatggtgtcctaccccaccatgagcagctaccaggtgcccatgacccagggcagccagggcctgccccagcagagctaccagcagcccatcatgctgcccaaccaggccggccagggcagcctgcctgccaccggcatgcctgtgtactgcaatgtgaccccacccaccccccagaacaacctgcggctgattggcccccactgccccagcagcacagtgcctgtgatgtctgccagctgcaggaccaactgtgcctccatgagcaatgccggctggcaggtgaagttctag

SEQ ID NO: 20896 - DNA, 1467 bp, synthetic construct
  source 1..1467: mol_type = other DNA; note = Synthetic coding sequence
atgaatggagccctggaccacagcgaccagcctgaccctgatgccatcaagatgtttgtgggccagatccccaggtcctggagcgagaaggagctgaaggagctgtttgagccctatggagctgtgtaccagatcaacgtgctgcgggacaggagccagaaccccccccagagcaagggctgctgctttgtgaccttctacaccaggaaggccgccctggaggcccagaatgccctgcacaacatcaagaccctgcccggcatgcaccaccccatccagatgaagccagctgacagcgagaagagcaatgctgtggaggacaggaagctgttcatcggcatggtgtccaagaagtgcaatgaaaatgacatccgggtgatgttcagccccttcggccagatcgaggagtgccgcatcctgcggggcccagatggcctgagccggggctgtgcctttgtgaccttcagcacccgggccatggcccagaatgccatcaaggccatgcaccagagccagaccatggagggctgcagcagccccatcgtggtgaagtttgctgacacccagaaggacaaggagcagaggcggctgcagcagcagctggcccagcagatgcagcagctgaacacagccacctggggcaacctgaccggcctgggcggcctgaccccccagtacctggccctgctgcagcaggccaccagcagcagcaacctgggcgccttcagcggcatccagcagatggccggcatgaatgccctgcagctgcagaacctggccaccctggccgctgctgctgctgctgcccagaccagcgccaccagcaccaatgccaaccccctgagcaccaccagcagcgccctgggcgccctgaccagccctgtggccgccagcacccccaacagcacagctggggccgccatgaacagcctgaccagcctgggcaccctgcagggcctggccggggccaccgtgggcctgaacaacatcaatgccctggccggcaccatcaacagcatggccgccctgaatggaggcctgggcgccaccggcctgaccaacggcacagctggcaccatggatgccctgacccaggcctacagcggcatccagcagtatgctgctgctgccctgcccaccctgtacagccagagcctgctgcagcagcagagcgctgctggcagccagaaggagggccctgagggcgccaacctcttcatctaccacctgccccaggagtttggagaccaggacatcctgcagatgttcatgccctttggaaatgtcatcagcgccaaggtgttcatcgacaagcagaccaacctgagcaagtgcttcggctttgtgtcctatgacaaccctgtgtctgcccaggccgccatccaggccatgaatggcttccagatcggcatgaagaggctgaaggtgcagctgaagaggagcaagaatgacagcaagccctactag

SEQ ID NO: 20897 - DNA, 474 bp, synthetic construct; identical to SEQ ID NO: 20844
  source 1..474: mol_type = other DNA; note = Synthetic coding sequence

SEQ ID NO: 20898 - DNA, 303 bp, synthetic construct
  source 1..303: mol_type = other DNA; note = Synthetic coding sequence
atggccagcgaggacatcgccaagctggccgagaccctggccaagacccaggtggccggcggccagctgtccttcaagggcaagagcctgaagctgaacacagcagaagatgccaaggatgtgatcaaggagattgaggactttgacagcctggaggccctgcggctggagggcaacacagtgggcgtggaggccgcccgggtgattgccaaggccctggagaagaagtctgagctgaagcgctgccactggagcgacatgttcaccggccgcctgaggacagagatccccccagccctgtag

SEQ ID NO: 20899 - DNA, 459 bp, synthetic construct
  source 1..459: mol_type = other DNA; note = Synthetic coding sequence
atgtctgtgacctatgatgacagcgtgggcgtggaggtgtccagtgacagcttctgggaggtgggcaactacaagaggacagtgaagagaattgatgatggccaccggctgtgcagcgacctgatgaactgcctgcacgagcgggccagaattgagaaggcctatgcccagcagctgacagagtgggcccggcgctggaggcagctggtggagaagggcccccagtatggcaccgtggagaaggcctggatggccttcatgtctgaggccgagcgggtgtctgagctgcacctggaggtgaaggccagcctgatgaatgatgactttgagaagatcaagaactggcagaaggaggccttccacaagcagatgatgggcggcttcaaggagaccaaggaggctgaagatggcttcaggaaggcccagaagccctgggccaagaagctgaaggaggtgtag

SEQ ID NO: 20900 - DNA, 543 bp, synthetic construct
  source 1..543: mol_type = other DNA; note = Synthetic coding sequence
atgtttgccagtgacctgctgcgggccctggactgctgccctggggccggcagcagcggcctgctgccccagctgggcccccggcagctgctggccttcaccgtgaactgcctgggcaaccaccgctacctgggcttctttgaggacctggagcagaggcacaaggcccaggtgctggtggaggacatcagtgacatcctggaggagcacgccgagaagcacttccacccctacatcgcctactgcagcaatgaggtgtaccagcagaggaccctgcagaagctgatcagcagcaatgctgccttccgggaggccctgcgggagattgaaagaagacctgcctgtggcggcctgcccatgctgtccttcctgatcctgcccatgcagagggtgacccggctgcccctgctgatggacaccctgtgcctgaagacccagggccacagcgagcgctacaaggccgccagccgggccctgaaggccatcagcaagctggtgcggcagtgcaatgaaggagcccacaggatggagaggatggagtag

SEQ ID NO: 20901 - DNA, 2487 bp, synthetic construct; identical to SEQ ID NO: 19576
  source 1..2487: mol_type = other DNA; note = Synthetic coding sequence

SEQ ID NO: 20902 - DNA, 4455 bp, synthetic construct
  source 1..4455: mol_type = other DNA; note = Synthetic coding sequence
atgaggatcccagaccagaagtatgtgaccctgaagctgaatgatgtgatccgcttcggctatgacagcaacatgtatgtgctggagcgggtgcagcaccgggtgcctgaggaggccctgaagcatgagaagtacaccagccagctgcaggtgtctgtgaagggcctggcccccaagaggtctgaggccctgcctgagcacaccccctactgtgaggccagcaaccccaggcctgagaagggggacagaagacctggaacagaagctgccagctaccgcacccccctgtatggccagcccagctggtggggagaagatgatggcagcaccctgcctgatgcccagaggcagggcgagccctacccagagcggcccaagggccctgtgcagcaggatggagagctgcacggcttccgggccccagctgagccccagggctgcagcttccggcgggagcccagctactttgagatccccaccaaggagaccccccagcccagccagcccccagaggtgcctgcccacgagatgcccaccaaggatgctgaggccggcggcggcggggccgcccctgtggtgcagagccacgccagcttcaccattgaatttgatgactgcagccctgggaagatgaagatcaaggaccacatcaccaagttcagcctgcggcagaggaggcctcctgggaaggaggccaccccaggagagatggtgtctgctgagaccaaggtggccgactggctggtgcagaatgaccccagcctgctgcaccgggtgggccctggagatgacagacacagcaccaagagtgacctgcctgtgcacaccaggaccctgaagggccacaagcatgaagatggcacccagagcgacagcgaggaccccctggccaaggccgccagcgctgctggggtgcccctggaggccagcggggagcaggtgcggctgcagaggcagatcaagagggacccccaggagctgctgcacaaccagcaggccttcgtcatcgagttctttgatgaggacacccccaggaagaagaggagccagagcttcacccacagccccagcggggaccccaaggctgacaagagaagaggccccaccccagctgaccgggaccggcccagcgtgcctgcccctgtgcaggccggcggccgcagcagcggcccccagagagctggcagcctgaagcgggagaagacagaggagcggctgggcagccccagccctgccagcaggaccccagcccggcccttcggctctgtgggcagaagaagccggctggcccaggacttcatggcccagtgcctgcgggagagcagccctgctgcccggcccagccctgagaaggtgccccctgtgctgcctgcccccctgacccctcatggcaccagccctgtgggcccccccaccccacctccagcccccacagacccccagctgaccaaggccaggaagcaggaggaggatgacagcctgagtgatgctggcacctacaccatcgagacagaggcccaggacacagaggtggaggaggccaggaagatgattgaccaggtgtttggagtgctggagagccctgagctgagccgggccagcagcgccaccttccggcctgtgatccggggggacagagatgaaagtgatgatggaggagtggcccagaggatggccctgctgcaggagtttgccagccggcccctgggcgccgccccccaggccgagcaccagggcctgcctgtgcccggcagccctgggggccagaagtgggtgagccgctgggccagcctggccgacagctacagcgaccccggcctgacagaagatggcctgggccggcggggcggggagcctgagggcagcctgcctgtgaggatgagaagaaggctgccccagctgcccagcgagagagctgacagccctgctggccctgagagcagcagaagaagtggccctggccccccagagctggacagcgagcagcccagccggctgtttggccaggaggagctggaccctgacagcctgagtgatgccagcggcagtgatggcggccggggccctgagcccggggtggagccccaggacagcagaagaagaagcccccaggagggccccacctggagccggggcagaagaagcccccgggcccctggagagcccaccccagccagcttcttcatcggggaccagaatggagatgctgtgctgagcaggaagcccctggccgcccctggagatggagagggcctgggccagacagcccagcccagccccccagccagagatggagtgtatgtgtctgccaatggaaggatggtgatccagctgcggcccggccgcagccctgagccagatggccctgccccagccttcctgcggcaggagagcttcaccaaggagcccgccagcggccccccagcccctgggaagccaccccacatcagcagccaccccctgctgcaggacctggccgccacccgggccgccaggatggacttccacagccaggacacccacctgatcctgaaggagacagaaacagccctggccgccctggaggcccggctgctgagcaacagcgtggatgctgaatgtgagggcggcagcaccccccggcccccagaagatgccctgagcggggacagtgatgtggacacagccagcacagtgtccctgcggagcggcaagagcggccccagccccaccaccccccagcccctgcgggcccagaaggagatgagccccagccccccagctgcccaggaccccggcggcacagccctggtgtctgcccgggagcagagcagcgagcggcagcaccaccccctgggccccacagacatgggccgcggggagcctgtgagaagaagtgccatccggcggggccaccggccccggggcagcctggactggcccagcgaggagcggggccctgtgctggcccacctgcccagcagtgatgtgatggccagcaaccacgagaccccagaggccactggagctggccgcctgggcagcaggaggaagccagctgcccccccacccagccctgctgcccgggaggagcagagccgcagcagcgccagcagccagaagggcccccaggccctgaccaggagcaacagcctgagcaccccccggcccacccgggccagccggctgcggcgggcccggctgggagatgccagtgacacagaagctgctgatggagagcggggcagcctgggcaaccctgagcctgtgggccggcctgctgctgagcaggccaagaagctgagccggctggacatcctggccatgcccaggaagagagctggcagcttcaccggcaccagtgaccctgaggccgccccagcccggaccagcttcagcggccgctctgtggagctgtgctgtgccagcaggaagcccaccatggccgaggcccgggctgtgtccaggaaggccgccaacacagccaccaccaccggcccccggcagcccttcagccgggcccggagcggcagcgcccgctacaccagcaccacccagacccccagggctggcagcagcagccgggcccggagccgggcccctggcccccgggacacagatgatgatgaggaggagccagacccctacggcttcatcgtgcagacagctgagattgctgagatcgcccggctgagccagaccctggtgaaggatgtggccatcctggcccaggagatccatgatgtggccggagatggagacaccctgggcagcagcgagcccgcccacagcgccagcctgagcaacatgcccagcaccccagccagcaccatcagcgcccgggaggagctggtgcagagaattcctgaggccagcctgaacttccagaaggtgcccccaggcagcctgaacagccgggactttgaccagaacatgaatgacagctgtgaagatgccctggccaacaagacccggcccaggaaccgggaggaggtgatctttgacaacctgatgctgaaccctgtgtcccagctgagccaggccatccgggagaacacagagcacctggccgagaagatgaagatcctcttccagaacacaggccgggcctgggaggacctggaggcccgcatcaatgcagaaaatgaggtgcccatcctgaagaccagcaacaaggagatcagcagcatcctgaaggagctgcggcgggtgcagaagcagctggaggtgatcaatgccatcgtggaccccagcggcagcctggacctgctgaccggcaacagaagcctggccagcagcgcccagcccggcctgggcaagggccgggtggccgcccagagcccccccagccctgccagcgctgaggccctgctgcctgccctgcccctgaggaacttcccccagagggccagctgtggcccccccagcctgcctgaccccaccttcctgcctgatgctgagcgcttcctgatctag

SEQ ID NO: 20903 - DNA, 150 bp, synthetic construct
  source 1..150: mol_type = other DNA; note = Synthetic coding sequence
atgtaccccaaccccctcatctactgcacctgctgggacccctggaacctgggccccaggaagctgatcaagaccccccagctgcccaggaagaacagcacaggcagcagcaagctgacccccctggtgcctgcccccaagaaccactag

SEQ ID NO: 20904 - DNA, 948 bp, synthetic construct; identical to SEQ ID NO: 18329
  source 1..948: mol_type = other DNA; note = Synthetic coding sequence

SEQ ID NO: 20905 - DNA, 3015 bp, synthetic construct
  source 1..3015: mol_type = other DNA; note = Synthetic coding sequence
atgaaggccaccacccccctgcagacagtggaccggcccaaggactggtacaagaccatgttcaagcagatccacatggtgcacaagccaggcctgtacaaccccccctacagcgcccagagccaccctgctgccaagacccagacctaccggcccctgagcaagagccacagcgacaacagccccaatgccttcaaggatgccagcagccctgtgcccccaccccacgtgcccccacctgtgccccccctgcggccccgggacaggagcagcacagagaagcatgactgggaccccccagacaggaaggtggacaccaggaagttccgctctgagcccaggagcatctttgaatatgagcccgggaagagcagcatcctgcagcacgagaggcctgccagcctgtaccagagcagcattgacaggagcctggagcggcccatgagcagcgcctccatggccagtgacttcaggaagaggaggaagtctgagcctgctgtgggccccccccggggcctgggggaccagagcgccagcaggaccagccctggccgggtggacctgcccggcagcagcaccaccctgaccaagagcttcaccagcagcagccccagcagccccagccgggccaagggaggagatgacagcaagatctgccccagcctgtgcagctacagcggcctgaatggaaaccccagcagcgagctggactactgcagcacctaccggcagcacctggatgtgccccgggacagcccccgggccatctccttcaagaatggctggcagatggcccggcagaatgctgagatctggagcagcacagaggagaccgtgagccccaagatcaagagccgcagctgtgatgacctgctgaatgatgactgtgacagcttcccagaccccaaggtgaagtctgagagcatgggcagcctgctgtgtgaggaggacagcaaggagagctgccccatggcctggggcagcccctacgtgcctgaggtgcgcagcaatggccgcagccgcatccgccacaggtctgccagaaatgcccctggcttcctgaagatgtacaagaagatgcaccgcatcaacaggaaggacctgatgaacagcgaggtgatctgcagcgtgaagagccgcatcctgcagtatgagagcgagcagcagcacaaggacctgctgcgggcctggagccagtgcagcacagaggaggtgccccgggacatggtgcccacccgcatcagcgagtttgagaagctgatccagaagagcaagtccatgcccaacctgggagatgacatgctgagccctgtgaccctggagcccccccagaatggcctgtgccccaagaggcgcttcagcattgagtacctgctggaggaggagaaccagagcggccccccagcccggggccggcggggctgccagagcaatgccctggtgcccatccacatcgaggtgaccagtgatgagcagccccgggcccacgtggagttcagtgacagcgaccaggatggagtggtgtctgaccacagcgactacatccacctggagggcagcagcttctgcagcgagagtgactttgaccacttctccttcaccagcagcgagagcttctacggcagcagccaccaccaccaccaccaccaccaccaccaccaccgccacctgatcagcagctgcaagggccgctgcccagccagctacacccgcttcaccaccatgctgaagcatgagcgggcccggcatgagaacacagaggagccccggcggcaggagatggaccccggcctgagcaagctggccttcctggtgtcccctgtgcccttccggaggaagaagaacagcgcccccaagaagcagacagagaaggccaagtgcaaggcctctgtgtttgaggccctggacagcgccctgaaggacatctgtgaccagatcaaggccgagaagaagaggggcagcctgcctgacaacagcatcctgcacaggctcatcagcgagctgctgcctgatgtgcctgagaggaacagcagcctgcgggccctgcggcgcagccccctgcaccagcccctgcaccccctgcccccagatggagccatccactgccccccctaccagaatgactgtggccgcatgcccaggtctgccagcttccaggatgtggacacagccaacagcagctgccaccaccaggaccggggcggggccctgcaggaccgggagagccccaggagctacagcagcaccctgacagacatgggccgcagcgccccccgggagcggcggggcaccccagagaaggagaagctgcctgccaaggctgtgtatgacttcaaggcccagaccagcaaggagctgtccttcaagaagggggacacagtgtacatcctgaggaagattgaccagaactggtatgaaggagagcaccacggccgggtgggcatcttccccatctcctatgtggagaagctgaccccacctgagaaggcccagcctgcccggcccccacctccagcccagcctggagagatcggggaggccatcgccaagtacaacttcaatgctgacaccaacgtggagctgagcctgaggaaaggagacagagtcatcctgctgaagagggtggaccagaactggtatgagggcaagatccctggcaccaaccggcagggcatcttccctgtgtcctatgtggaggtggtgaagaagaacaccaagggagctgaggactacccagacccccccatcccccacagctacagcagtgaccgcatccacagcctgagcagcaacaagccccagaggcctgtgttcacccatgagaacatccagggcggcggggagcccttccaggccctgtacaactacaccccaagaaatgaagatgagctggagctgcgggagagtgatgtgattgatgtgatggagaagtgtgatgatggctggtttgtgggcaccagcaggaggaccaagttcttcggcaccttccctggcaactacgtgaagaggctgtag

SEQ ID NO: 20906 - DNA, 981 bp, synthetic construct
  source 1..981: mol_type = other DNA; note = Synthetic coding sequence
atggctgctgctgctgctgctgctgctgccaccaacggcaccggcggcagcagcggcatggaggtggatgctgctgtgcccagcgtgatggcctgtggggtgactggatctgtgtctgtggccctgcaccccctggtgatcctgaacatcagtgaccactggatccgcatgaggagccaggagggccggcctgtgcaggtgattggagccctgattggcaagcaggagggcaggaacatcgaggtgatgaacagctttgagctgctgagccacacagtggaggagaagatcatcatcgacaaggagtactactacaccaaggaggagcagttcaagcaggtgttcaaggagctggagttcctgggctggtacaccaccggcggccccccagaccccagcgacatccacgtgcacaagcaggtgtgtgagatcatcgagagccccctcttcctgaagctgaaccccatgaccaagcacacagacctgcctgtgtctgtgtttgaatctgtgattgacatcatcaatggagaggccaccatgctgtttgctgagctgacctacaccctggccacagaggaggccgagagaattggagtggaccacgtggccaggatgacagccaccggcagcggggagaacagcacagtggccgagcacctgattgcccagcacagcgccatcaagatgctgcacagccgggtgaagctgatcctggagtatgtgaaggccagcgaggccggggaggtgcccttcaaccacgagatcctgcgggaggcctatgccctgtgccactgcctgcctgtgctgagcacagacaagttcaagacagacttctatgaccagtgcaatgatgtgggcctgatggcctacctgggcaccatcaccaagacctgcaacaccatgaaccagtttgtgaacaagttcaacgtgctgtatgaccggcagggcattggaagaaggatgaggggcctcttcttctag

SEQ ID NO: 20907 - DNA, 780 bp, synthetic construct
  source 1..780: mol_type = other DNA; note = Synthetic coding sequence
tgattcaccgcccaggcccccagcggccgcggggctgctgtgggcagcggcacccggctggccagcctgcggctgctgacagagctggagagccctgcctggtggcccttcagcagcaagctgtggaagaccccacctgagaccaagccccgggaggatgtgtccatgaccagctgtgagccctttgggaaggagggcatcctgatcaagatcccagctgtgatcagccacaggacagagagccacgtgaagccaggccgcctgactgtgctggtgtctggcctggagatccatgacagcagcagcctgctgatgcacagatttgaaagagaagatgtggatgacatcaaggtgcacagcccctatgagatcagcatccggcagcgcttcatcggcaagccagacatggcctaccgcctcatcagcgccaagatgcctgaggtgatccccatcctggaggtgcagttcagcaagaagatggagctgctggaggatgccctggtgctgcggagcgcccggaccagcagccctgctgagaagagctgcagcgtgtggcatgctgccagcggcctgatgggccgcaccctgcaccgggagcccccagctggggaccaggagggcacagccctgcacctgcagaccagcctgcctgccctgtctgaggccgacacccaggagctgacccagggcttccggcccatgagcctgagcacccagacagtgctggtgatgctgtgcagcgagagcgctggggccctgtggaggcagaggctgtcctag

SEQ ID NO: 20908 - DNA, 1038 bp, synthetic construct
  source 1..1038: mol_type = other DNA; note = Synthetic coding sequence
atggctgctgctgagcccgccagcagcggccagcaggccccagctggccagggccagggccagaggcccccaccccagcccccccaggcccaggccccccagcccccacctccaccccagctgggcggggccggcggcggcagcagcagacatgagaagagcctgggcctgctgaccaccaagtttgtgtccctgctgcaggaggccaaggatggagtgctggacctgaaggctgctgctgacaccctggccgtgcggcagaagaggcgcatctatgacatcaccaacgtgctggagggcatcgacctgattgagaagaagagcaagaacagcatccagtggaagggcgtgggcgccggctgcaacaccaaggaggtgattgaccggctgcgctacctgaaggccgagattgaggacctggagctgaaggagcgggagctggaccagcagaagctgtggctgcagcagagcatcaagaatgtgatggatgacagcatcaacaaccgcttctcctatgtgacccatgaggacatctgcaactgcttcaatggagacaccctgctggccatccaggcccccagcggcacccagctggaggtgcccatccctgagatgggccagaatggccagaagaagtaccagatcaacctgaagagccacagcggccccatccacgtgctgctgatcaacaaggagagcagcagcagcaagcctgtggtgtttcctgtgcccccaccagatgacctgacccagcccagcagccagagcctgacccctgtgaccccccagaagagctccatggccacccagaacctgcctgagcagcacgtgtctgagaggagccaggccctgcagcagaccagcgccacagacatcagcagcggcagcatcagcggggacatcattgatgagctgatgagcagtgatgtgttccccctgctgcggctgagccccaccccagcagatgactacaacttcaacctggatgacaatgaaggagtgtgtgacctgtttgatgtgcagatcctgaactactag

SEQ ID NO: 20909 - DNA, 96 bp, synthetic construct
  source 1..96: mol_type = other DNA; note = Synthetic coding sequence
atgacagtgccctggaggcctgggaagaggcgcatcacctacaaggaggaggaggacctgaccctgcagcccaggagctgcctgcagtgcagctag

SEQ ID NO: 20910 - DNA, 489 bp, synthetic construct
  source 1..489: mol_type = other DNA; note = Synthetic coding sequence
atgaacaaccagaagcagcagaagcccaccctgagcggccagcgcttcaagaccaggaagagagatgagaaggagagatttgaccccacccagttccaggactgcatcatccagggcctgacagaaacaggaacagacctggaggccgtggccaagttcctggatgccagcggggccaagctggactaccgccgctatgcagagaccctgtttgacatcctggtggccggcggcatgctggcccctgggggcaccctggctgatgacatgatgaggacagatgtgtgtgtgtttgctgcccaggaggacctggagaccatgcaggcctttgcccaggtgttcaacaagctgatccgccgctacaagtacctggagaagggctttgaagatgaggtgaagaagctgctgctcttcctgaagggcttcagcgagagcgagaggaacaagctggccatgctgactggagtgctgctggccaacggcacctag

SEQ ID NO: 20911 - DNA, 270 bp, synthetic construct
  source 1..270: mol_type = other DNA; note = Synthetic coding sequence
atggctgctgccactggagaccccggcctgagcaagctgcagtttgcccccttcagcagcgccctggatgtgggcttctggcatgagctgacccagaagaagctgaatgagtaccgcctggatgaggcccccaaggacatcaagggctactactacaatggagacagcgctggcctgcctgcccggctgaccctggagttcagcgcctttgacatgtctgcccccaccccagcccgctgctgcccagccatcggcaccctgtacaactag

SEQ ID NO: 20912 - DNA, 2025 bp, synthetic construct; identical to SEQ ID NO: 19458
  source 1..2025: mol_type = other DNA; note = Synthetic coding sequence

SEQ ID NO: 20913 - DNA, 1923 bp, synthetic construct
  source 1..1923: mol_type = other DNA; note = Synthetic coding sequence
atggagaaccagctggccaagagcacagaggagaggaccttccagtaccaggacagcctgcccagcctgcctgtgcccagcctggaggagagcctgaagaagtacctggagagcgtgaccaggacctgctaccagatccggggcctggaccctgatgccaagaggggcttcctggacctgacccgggagggcatccaggtgaagccctttgccaaccaggaggagtacaagaagacagaggagatcgtgcagaagttccagagcggcatcggggagaagctgcaccagaagctgctggagcgggccaagggcaagaggaactggctggaggagtggtggctgaatgtggcctacctggatgtgcgcatccccagccagctgaatgtgaactttgctggccctgctgcccactttgagcactactggccacccaaggagggcacccagctggagcggggcagcatcaccctgtggcacaacctgaactactggcagctgctgaggaaggagaaggtgcctgtgcacaaggtgggcaacacccccctggacatgaaccagttcaggatgctgttcagcacctgcaaggtgcccggcatcacccgggacagcatcatgaactacttcagaacagagagcgagggccgcagccccaaccacatcgtggtgctgtgccggggccgggcctttgtgtttgatgtgattcatgagggctgcctggtgaccccacctgagctgctgcggcagctgacctacatccacaagaagtgccacagcgagccagatggccctggcattgctgccctgaccagcgaggagaggacccgctgggccaaggcccgggagtacctgattggcctggaccctgagaacctggccctgctggagaagatccagagcagcctgctggtgtacagcatggaggacagcagcccccacgtgaccccagaggactacagcgagatcatcgccgccatcctgattggagaccccaccgtgcgctggggagacaagagctacaacctgatctccttcagcaatggagtgtttggctgcaactgtgaccacgccccctttgatgccatgatcatggtgaacatctcctactacgtggatgagaagatcttccagaatgaaggccgctggaagggcagcgagaaggtgcgggacatccccctgcctgaggagctgatcttcatcgtggatgagaaggtgctgaatgacatcaaccaggccaaggcccagtacctgcgggaggccagtgacctgcagattgctgcctatgccttcaccagctttgggaagaagctgaccaagaacaagatgctgcacccagacaccttcatccagctggccctgcagctggcctactaccgcctgcacggccaccctggctgctgctatgaaacagccatgaccaggcacttctaccacggccgcacagagaccatgaggagctgcaccgtggaggccgtgcgctggtgccagagcatgcaggaccccagcgtgaacctgcgggagcggcagcagaagatgctgcaggcctttgccaagcacaacaagatgatgaaggactgcagcgctggaaaaggatttgacagacacctgctgggcctgctgctgattgccaaggaggagggcctgcctgtgcctgagctgttcacagaccccctcttcagcaagagcggcggcggcggcaactttgtgctgagcaccagcctggtgggctacctgcgggtgcagggcgtggtggtgcccatggtgcacaacggctacggcttcttctaccacatcagagatgacagatttgtggtggcctgcagcgcctggaagagctgcccagagacagatgctgagaagctggtgcagctgaccttctgtgccttccatgacatgatccagctgatgaacagcacccacctgtag

SEQ ID NO: 20914 - DNA, 474 bp, synthetic construct; identical to SEQ ID NO: 20844
  source 1..474: mol_type = other DNA; note = Synthetic coding sequence

SEQ ID NO: 20915 - DNA, 432 bp, synthetic construct
  source 1..432: mol_type = other DNA; note = Synthetic coding sequence
tgaacaagacacttcaaggagagcatcaagttcatccacgagtgccgcctgcggggggagagctgcctggtgcactgcctggccggcgtgagccgctctgtgaccctggtgattgcctacatcatgacagtgacagactttggctgggaggatgccctgcacacagtgcgggccggccgcagctgtgccaaccccaacgtgggcttccagaggcagctgcaggagtttgagaagcatgaggtgcaccagtaccggcagtggctgaaggaggagtatggagagagccccctgcaggatgctgaggaggccaagaacatcctgggcaagtacaaggagcagggccgcacagagccccagcccggggcccggcgctggagcagcttccctgccctggcccccctgacctatgacaactacaccacagagacctag

SEQ ID NO: 20916 - DNA, 495 bp, synthetic construct
  source 1..495: mol_type = other DNA; note = Synthetic coding sequence
atggtgaacagcgtcatcttctttgacatcaccgtggatggcaagcccctgggccgcatcagcatcaagcagtttgctgacaagatccccaagacagctgagaacttccgggccctgagcactggagagaagggcttccgctacaagggcagctgcttccaccgcatcatccctggcttcatgtgccagggcggggacttcacccaccccaatggaactggagacaagagcatctatggagagaagtttgatgatgagaacctgatcaggaagcacactggaagtggcatcctgtccatggccaatgccggccccaacaccaacggcagccagttcttcatctgcacagccaagacagagtggctggatggcaagcacgtggccttcggcaaggtgaaggagcgggtgaacatcgtggaggccatggagcacttcggctacagaaacagcaagaccagcaagaagatcaccatcgctgactgtggccagttctag

SEQ ID NO: 20917 - DNA, 468 bp, synthetic construct
  source 1..468: mol_type = other DNA; note = Synthetic coding sequence
atgtctgagggggagagccagacagtgctgagcagcggcagtgaccccaaggtggagagcagcagcagcgcccctggcctgacctctgtgagcccccctgtgaccagcaccaccagcgctgccagccctgaggaggaggaggagagtgaagatgaaagtgagatcctggaggagagcccctgtggccgctggcagaagagaagagaggaggtgaaccagagaaatgtgcccggcattgattctgcctacctggccatggacacagaggagggcgtggaggtggtgtggaatgaggtgcagttcagcgagaggaagaactacaagctgcaggaggagaaggtgcgggctgtgtttgacaacctgatccagctggagcacctgaacatcgtgaagttccacaagtactgggccgacatcaaggagaacaaggcccgggtcatcttcatcacagagtacatgagcagctag

SEQ ID NO: 20918 - DNA, 837 bp, synthetic construct
  source 1..837: mol_type = other DNA; note = Synthetic coding sequence
atgtggcccttccccagccgcagcctcttccccccacccacccaggcctggctgcagacagtgtccagtgaccctgaggcccagggctggggcgcctggaatgagaccaaggagatcctgggccctgagggcggggagggcaaggaggagaaggaggaggaggaggatgctgaggaggaccaggatggagatgctggcttcctgctgagcctgctggagcaggagaacctggctgaatgtcccctgcctgaccaggagctggaggccatcaagatgaaggtgtgtgccatggagcaggccgagggcaccccccggcccccaggagtgcagcagcaggccgaggaggaggagggcacagctgctggccagctgctgagccctgagaccgtgggctgccccctgagcggcaccccagaggagaaggtggaggccgaccacaggtctgtgtatgtgggcaatgtggactatggaggcagcgctgaggagctggaggcccacttcagccgctgtggggaggtgcaccgggtgaccatcctgtgtgacaagttcagcggccaccccaagggctacgcctacattgaatttgccaccaagggctctgtgcaggccgctgtggagctggaccagagcctcttccggggccgggtcatcaaggtgctgcccaagaggaccaacttccctggcatcagcagcacagacagaggaggcctgcggggccaccctggcagcagaggagcccccttcccccacagcggcctgcagggccggccccggctgcggccccagggccagaacagagcccggggcaagttcagcccctggttcagcccctactag

SEQ ID NO: 20919 - DNA, 132 bp, synthetic construct
  source 1..132: mol_type = other DNA; note = Synthetic coding sequence
atgtctgagcagggcgacctgaaccaggccatcgccgaggagggcggcacagagcaggagacagccaccccagaaaatggcatcgtgaagtctgagagcctggatgaggaggagaagctggagctgcagtag

SEQ ID NO: 20920 - DNA, 390 bp, synthetic construct
  source 1..390: mol_type = other DNA; note = Synthetic coding sequence
atggctgatgaggagctggaggccctgcggcggcagaggctggccgagctgcaggccaagcatggagaccctggagatgctgcccagcaggaggccaagcaccgggaggccgagatgaggaacagcatcctggcccaggtgctggaccagagcgcccgggcccggctgagcaacctggccctggtgaagccagagaagaccaaggctgtggagaactacctgatccagatggcccgctatggccagctgtctgagaaggtgtccctggacagcctggaggagctgtactgctacctgctgtaccagaacatggccagcaagggccagctgcacctgcactggatcacagagttcctgctgaccctgcggaggaactgctggagggagtag

SEQ ID NO: 20921 - DNA, 2286 bp, synthetic construct
  source 1..2286: mol_type = other DNA; note = Synthetic coding sequence
atgaggaagcaggaggtgaggacaggccgggaggccggccagggccacggcaccggcagccctgctgagcaggtgaaggccctgatggacctgctggccggcaagggcagccagggcagccaggccccccaggccctggacaggaccccagatgcccccctgggcccctgcagcaatgacagccgcatccagaggcacaggaaggccctgctgagcaaggtgggcggcggccctgagctgggcggcccctggcaccggctggccagcctgctgctggtggagggcctgacagacctgcagctgcgggagcatgacttcacccaggtggaggccacccggggcggcggccacccagccaggacagtggccctggacaggctcttcctgcccctgagccgggtgtctgtgcccccccgggtgtccatcaccatcggcgtggccggcatgggcaagaccaccctggtgcgccactttgtgcggctgtgggcccacggccaggtgggcaaggacttcagcctggtgctgcccctgaccttccgggacctgaacacccatgagaagctgtgtgccgacaggctcatctgcagcgtcttcccccacgtgggggagcccagcctggccgtggccgtgcctgcccgggccctgctgatcctggatggcctggatgaatgtaggacccccctggacttcagcaacacagtggcctgcacagaccccaagaaggagatccctgtggaccacctgatcaccaacatcatccggggcaacctcttccctgaggtgtccatctggatcaccagccggcccagcgccagcggccagatccctgggggcctggtggacaggatgacagagatccggggcttcaatgaggaggagatcaaggtgtgcctggagcagatgtttcctgaggaccaggccctgctgggctggatgctgagccaggtgcaggccgaccgggccctgtacctgatgtgcaccgtgcctgccttctgccgcctgaccggcatggccctgggccacctgtggaggagcaggacaggcccccaggatgctgagctgtggccacccaggaccctgtgtgagctgtacagctggtacttcaggatggccctgtctggagagggccaggagaagggcaaggccagcccccgcatcgagcaggtggcccatggaggcaggaagatggtgggcaccctgggccgcctggccttccacggcctgctgaagaagaagtatgtgttctatgagcaggacatgaaggcctttggagtggacctggccctgctgcagggcgccccctgcagctgcttcctgcagcgggaggagaccctggccagctctgtggcctactgcttcacccacctgagcctgcaggagtttgtggccgccgcctactactacggggccagccggcgggccatctttgacctcttcacagagagcggcgtgtcctggccccggctgggcttcctgacccacttccgctctgctgcccagagggccatgcaggccgaggatggccgcctggatgtgttcctgcgcttcctgagcggcctgctgagcccccgggtgaatgccctgctggccggcagcctgctggcccagggcgagcaccaggcctaccgcacccaggtggccgagctgctgcagggctgcctgcggccagatgctgctgtgtgtgcccgggccatcaacgtgctgcactgcctgcacgagctgcagcacacagagctggcccggtctgtggaggaggccatggagagcggggccctggcccggctgaccggccctgcccaccgggccgccctggcctacctgctgcaggtgtctgatgcctgtgcccaggaggccaacctgagcctgagcctgagccagggcgtgctgcagagcctgctgccccagctgctgtactgcaggaagctgcggctggacaccaaccagttccaggaccctgtgatggagctgctgggctctgtgctgagcggcaaggactgccgcatccagaagatcagcctggccgagaaccagatcagcaacaagggggccaaggccctggcccggagcctgctggtgaacagaagcctgaccagcctggacctgcggggcaacagcatcggcccccagggcgccaaggccctggctgatgccctgaagatcaacagaaccctgaccagcctgcgggtgaagttcatgtaccacaagattgactgcttccggcgggtgcctgaggctgatgcctgcaaccccagcaccctgggcggccagggccgctggatcacctag

SEQ ID NO: 20922 - DNA, 474 bp, synthetic construct; identical to SEQ ID NO: 20844
  source 1..474: mol_type = other DNA; note = Synthetic coding sequence

SEQ ID NO: 20923 - DNA, 1473 bp, synthetic construct
  source 1..1473: mol_type = other DNA; note = Synthetic coding sequence
atgaccatcggccgcatggagaatgtggaggtgttcaccgctgagggcaagggccggggcctgaaggccaccaaggagttctgggccgctgacatcatctttgctgagcgggcctacagcgctgtggtgtttgacagcctggtgaactttgtgtgccacacctgcttcaagaggcaggagaagctgcaccgctgtggccagtgcaagtttgcccactactgtgacaggacctgccagaaggatgcctggctgaaccacaagaatgaatgttctgccatcaagagatatggcaaggtgcccaatgaaaacatccggctggccgcccgcatcatgtggagggtggagcgggagggcaccggcctgacagagggctgcctggtgtctgtggatgacctgcagaaccacgtggagcactttggagaggaggagcagaaggacctgcgggtggatgtggacaccttcctgcagtactggccaccccagagccagcagttctccatgcagtacatcagccacatctttggagtcatcaactgcaatggcttcaccctgagtgaccagaggggcctgcaggccgtgggcgtgggcatcttccccaacctgggcctggtgaaccacgactgctggcccaactgcaccgtcatcttcaacaacggcaaccatgaagctgtgaagtccatgttccacacccagatgagaattgagctgcgggccctgggcaagatcagcgagggggaggagctgactgtgtcctacatcgacttcctgaatgtgtctgaggagaggaagaggcagctgaagaagcagtactactttgactgcacctgtgagcactgccagaagaagctgaaggatgacctcttcctgggcgtgaaggacaaccccaagcccagccaggaggtggtgaaggagatgatccagttcagcaaggacaccctggagaagattgacaaggcccggtctgagggcctgtaccacgaggtggtgaagctgtgccgggagtgcctggagaagcaggagcctgtgtttgctgacaccaacatctacatgctgaggatgctgagcatcgtgtctgaggtgctgagctacctgcaggcctttgaggaggccagcttctacgcccggaggatggtggatggctacatgaagctgtaccaccccaacaatgcccagctgggcatggctgtgatgagagctggcctgaccaactggcacgccggcaacatcgaggtgggccacggcatgatctgcaaggcctatgccatcctgctggtgacccacggccccagccaccccatcaccaaggacctggaggccatgagggtgcagacagagatggagctgaggatgttccggcagaatgagttcatgtactacaagatgagggaggccgccctgaacaaccagcccatgcaggtgatggccgagcccagcaatgagcccagccctgccctcttccacaagaagcagtag

SEQ ID NO: 20924 - DNA, 1491 bp, synthetic construct
  source 1..1491: mol_type = other DNA; note = Synthetic coding sequence
atgtggggccgcttcctggcccctgaggccagcggccgggacagccctgggggcgcccgctccttccctgctggccctgactacagcagcgcctggctgcctgccaatgaaagcctgtggcaggccaccaccgtgcccagcaaccacaggaacaaccacatcagaagacacagcatcgccagtgacagcggggacaccggcatcggcaccagctgcagcgacagcgtggaggaccacagcaccagcagcggcaccctgtccttcaagcccagccagagcctcatcaccctgcccacagcccacgtgatgcccagcaacagcagcgccagcatcagcaagctgcgggagagcctgaccccagatggcagcaagtggagcaccagcctgatgcagaccctgggcaaccacagcagaggagagcaggacagcagcctggacatgaaggacttccggcccctgaggaagtggagcagcctgagcaagctgacagccccagacaactgtggccagggcggcaccgtgtgccgggaggagagcagaaatggcctggagaagattggcaaggccaaggccctgaccagccagctgcggaccatcggccccagctgcctgcatgacagcatggagatgctgcggctggaggacaaggagatcaacaagaagaggagcagcaccctggactgcaagtacaagtttgagagctgcagcaaggaggacttccgggccagcagcagcaccctgcggcggcagcctgtggacatgacctacagcgccctgcctgagagcaagcccatcatgaccagcagcgaggcctttgagccccccaagtacctgatgctgggccagcaggccgtgggcggcgtgcccatccagcccagcgtgaggacccagatgtggctgacagagcagctgcggaccaaccccctggagggcaggaacacagaagattcctacagcctggccccctggcagcagcagcagatcgaggacttccggcagggcagcgagacccccatgcaggtgctgaccggcagcagccggcagagctacagccctggctaccaggacttcagcaagtgggagagcatgctgaagatcaaggagggcctgctgcggcagaaggagatcgtcatcgaccggcagaagcagcagatcacccacctgcacgagcgcatccgggacaatgagctgcgggcccagcacgccatgctgggccactacgtgaactgtgaagattcctatgtggccagcctgcagccccagtatgagaacaccagcctgcagacccccttcagcgaggagagcgtgagccacagccagcagggcgagtttgagcagaagctggccagcacagagaaggaggtgctgcagctgaatgagttcctgaagcagaggctgagcctcttcagcgaggagaagaagaagctggaggagaaggtgggcttcagcaacaaggtggagctgggccagcagcacttcctgagcatctag

SEQ ID NO: 20925 - DNA, 1083 bp, synthetic construct
  source 1..1083: mol_type = other DNA; note = Synthetic coding sequence
atggccgagctgcagcagctgcaggagtttgagatccccaccggccgggaggccctgcggggcaaccacagcgccctgctgcgggtggccgactactgtgaggacaactacgtgcaggccacagacaagaggaaggccctggaggagaccatggccttcaccacccaggccctggcctctgtggcctaccaggtgggcaacctggccggccacaccctgaggatgctggacctgcagggcgccgccctgcggcaggtggaggccaggatggtgaacatgcacatggagaaggtggcccggcgggagatcggcaccctggccaccgtgcagaggctgcccccaggccagaaggtgattgcccctgagaacctgccccccctgaccccctactgccggcggcccctgaactttggctgcctggatgacattggacatggcatcaaggacctgagcacccagctgagcaggacaggcaccctgagcaggaagagcatcaaggccccagccaccccagccagcgccaccctgggccggcccccacgcatccctgagcctgtgcacctgcctgtggtgcctgatggccgcctgtctgctgccagcagcgccttcagcctggccagcgctggcagcgctgagggcgtgggcggggcccccacccccaagggccaggccgcccccccagccccacccctgcccagcagcctggaccccccacctcctcctgctgctgtggaggtgttccagaggcctcccaccctggaggagctgagccccccacctccagatgaggagctgcccctgcccctggacctgcccccacctccacccctggatggagatgagctgggcctgcccccacctcctcctggctttggaccagatgagcccagctgggtgcctgccagctacctggagaaggtggtgaccctgtacccctacaccagccagaaggacaatgagctgtccttcagcgagggcaccgtcatctgtgtgacccggcgctacagtgatggctggtgtgagggcgtgtcctctgagggcaccggcttcttccctggcaactacgtggagcccagctgctag

SEQ ID NO: 20926 - DNA, 201 bp, synthetic construct
  source 1..201: mol_type = other DNA; note = Synthetic coding sequence
atgctgcgctgtggccagatgatctttgcccaggccctggtgtgccgccacctgggccgggactggcgctggacccagaggaagaggcagcctgacagctacttctctgtgctgaatgccttcatcgacaggaaggacagctactacagcatccaccagatcgcccagatgggcgtgggggagggcaagagcattggatag

SEQ ID NO: 20927 - DNA, 1476 bp, synthetic construct
  source 1..1476: mol_type = other DNA; note = Synthetic coding sequence
atggagcagcccccagcccccaagagcaagctgaagaagctgtctgaggacagcctgaccaagcagcctgaggaggtgtttgatgtgctggagaagctgggggagggcagctatggcagcgtcttcaaggccatccacaaggagagcggccaggtggtggccatcaagcaggtgcctgtggagagtgacctgcaggagatcatcaaggagatcagcatcatgcagcagtgtgacagcccctacgtggtgaagtactacggcagctacttcaagaacacagacctgtggatcgtgatggagtactgtggggccggctctgtgtctgacatcatccggctgaggaacaagaccctgattgaagatgaaattgccaccatcctgaagagcaccctgaagggcctggagtacctgcacttcatgaggaagatccaccgggacatcaaggccggcaacatcctgctgaacacagagggccacgccaagctggccgactttggagtggccggccagctgacagacaccatggccaagaggaacacagtcatcggcacccccttctggatggcccctgaggtgatccaggagatcggctacaactgtgtggccgacatctggagcctgggcatcaccagcattgagatggccgagggcaagccaccctatgctgacatccaccccatgagggccatcttcatgatccccaccaaccccccacccaccttcaggaagccagagctgtggagcgatgacttcacagactttgtgaagaagtgcctggtgaagaaccctgagcagagggccacagccacccagctgctgcagcaccccttcatcaagaatgccaagcctgtgtccatcctgcgggacctgatcacagaggccatggagatcaaggccaagagacatgaggagcagcagcgggagctggaggaggaggaggagaacagtgatgaagatgagctggacagccacaccatggtgaagacctctgtggagagcgtgggcaccatgagggccaccagcaccatgtctgagggcgcccagaccatgattgagcacaacagcaccatgctggagagtgacctgggcaccatggtgatcaacagtgaagatgaggaggaggaggatggcaccatgaagagaaatgccaccagcccccaggtgcagaggcccagcttcatggactactttgacaagcaggacttcaagaacaagagccatgagaactgcaaccagaacatgcatgagcccttccccatgagcaagaatgtgtttcctgacaactggaaggtgccccaggatggagactttgacttcctgaagaacctgagcctggaggagctgcagatgaggctgaaggccctggaccccatgatggagcgggagattgaggagctgcggcagcgctacacagccaagaggcagcccatcctggatgccatggatgccaagaagaggcggcagcagaacttctag

SEQ ID NO: 20928 - DNA, 126 bp, synthetic construct
  source 1..126: mol_type = other DNA; note = Synthetic coding sequence
atgagcagcaagggcagcagcacagatggccgcacagacctggccaacggcagcctgagcagcagccctgaggagatgtctggagctgaggagggccgggagaccagcagcggcatcgaggtgtag

SEQ ID NO: 20929 - DNA, 945 bp, synthetic construct
  source 1..945: mol_type = other DNA; note = Synthetic coding sequence
atgcccaacgtggccgagacagagaggagcaatgattctggaaatggagagcacaagtctgagaggaagagccctgaggagaacctgcagggcgctgtgaagagcttctgcaccagcgccagcggggcccccctgggccccaagggagatggccactacccctggagctgccctgtgacccacacccgggagaagatctatgccatctgcagcgactatgccttcctgaaccaggccaccagcatctacaagacccccaaccccagccgcagcccctgcctgcctgacagcaccagcctgtctgctggcaacaacagcagccgctacatcggcatccccaccagcaccagcgagatcatctacaatgaggagaacagcctggagaacctgagcaacagcctgggcaagctgcccctggcctgggagattgacaagtcagaatttgatggagtgaccaccaacagcaagcacaagtctggaaatgccaagaagcaggtgtccaagaggaagaccagtgacaagaagggccgctaccagaaggaatgtccccagcacagccccctggaggacatcaagcagaggaaggtgctggacctgcggcgctggtactgcatcagccggccccagtacaagaccagctgtggcatcagcagcctcatcagctgctggaacttcctgtacagcaccatgggcgccggcaacctgccccccatcacccaggaggaggccctgcacatcctgggcttccagcccccatttgaggacatccgcttcggccccttcaccggcaacaccaccctgatgcgctggttccggcagatcaatgaccacttccacgtgaagggctgcagctatgtgctgtacaagccccacggcaagaacaagacagctggggagacagctggggacctgagccaccacaggaagctgaacatcggcagctag

SEQ ID NO: 20930 - DNA, 1500 bp, synthetic construct
  source 1..1500: mol_type = other DNA; note = Synthetic coding sequence
atgcctgagatccgggtgacccccctgggcgccggccaggatgtgggccgcagctgcatcctggtgtccattgctgggaagaatgtgatgctggactgtggcatgcacatgggcttcaatgatgatgtggatgatgagctggagatcaaggcctactatgccggccacgtgctgggcgccgccatgttccagatcaaggtgggcagcgagagcgtggtgtacacaggagactacaacatgaccccagacagacacctgggcgccgcctggattgacaagtgccggcccaacctgctgatcacagagagcacctacgccaccaccatccgggacagcaagcgctgccgggagcgggacttcctgaagaaggtgcatgaaacagtggagcggggcggcaaggtgctgatccctgtgtttgccctgggccgggcccaggagctgtgcatcctgctggagaccttctgggagaggatgaacctgaaggtgcccatctacttcagcacaggcctgacagagaaggccaaccactactacaagctgttcatcccctggaccaaccagaagatcaggaagacctttgtgcagaggaacatgtttgagttcaagcacatcaaggcctttgaccgggcctttgctgacaaccctggccccatggtggtgtttgccaccccaggcatgctgcatgctggccagagcctgcagatcttcaggaagtgggccggaaatgagaagaacatggtgatcatgcctggctactgtgtgcagggcaccgtgggccacaagatcctgagcggccagaggaagctggagatggagggccggcaggtgctggaggtgaagatgcaggtggagtacatgtccttcagcgcccacgcagatgccaagggcatcatgcagctggtgggccaggccgagcctgagagcgtgctgctggtgcatggagaggccaagaagatggagttcctgaagcagaagattgagcaggagctgcgggtgaactgctacatgcctgccaatggagagaccgtgaccctgcccaccagccccagcatccctgtgggcatcagcctgggcctgctgaagcgggagatggcccagggcctgctgcctgaggccaagaagccccggctgctgcacggcaccctcatcatgaaggacagcaacttccggctggtgagcagcgagcaggccctgaaggagctgggcctggccgagcaccagctgcgcttcacctgccgggtgcacctgcatgacaccaggaaggagcaggagacagccctgcgggtgtacagccacctgaagtctgtgctgaaggaccactgtgtgcagcacctgcctgatggctctgtgacagtggagagcgtgctgctgcaggccgccgcccccagcgaggaccccggcaccaaggtgctgctggtgtcctggacctaccaggatgaggagctgggcagcttcctgaccagcctgctgaagaagggcctgccccaggcccccagctag

SEQ ID NO: 20931 - DNA, 396 bp, synthetic construct
  source 1..396: mol_type = other DNA; note = Synthetic coding sequence
ggcaccatcagctgcagcacaggcaccctgcagaggaggaacctgggccctgagcggcagacaggcctgctgctgctgggcatgaaggagaaccaggagctgaagaccatccaggccaacctgagccggcagagggtggagcaccagtgcctgagcagcgaggagctgaagcagcgcttccccaacatccggctgcccagaggagaggtgggcctgctggacaacagcggcggcgtcatctatgcctacaaggccctgcgggccctgcaggatgccatccggcagctgggcggcatcgtgagagatggagagaaggtggtggagatcaaccctggcctgctggtgacagtgaagaccaccagccgcagctaccaggccaagagcctggtgatctag

SEQ ID NO: 20932 - DNA, 687 bp, synthetic construct
  source 1..687: mol_type = other DNA; note = Synthetic coding sequence
atgagccgggagcggggcagccgctctgaggagcccggggccggcaaccgggagagcggcagccgggagcccggcctggccgctgctgccatgagcacagtggacctggcccgggtgggcgcctgcatcctgaagcatgctgtgactggagaggccgtggagctgcggagcctgtggagggagcacgcctgtgtggtggccggcctgcggcgcttcggctgtgtggtgtgccgctggatcgcccaggacctgagcagcctggccggcctgctggaccagcacggcgtgcggctggtgggcgtgggccctgaggccctgggcctgcaggagttcctggatggagactactttgctggggagctgtacctggatgagagcaagcagctgtacaaggagctgggcttcaagcgctacaacagcctgagcatcctgcctgctgccctgggcaagcctgtgagagatgtggccgccaaggccaaggctgtgggcatccagggcaacctgagcggggacctgctgcagagcggcggcctgctggtggtgtccaaaggaggagacaaggtgctgctgcactttgtgcagaagagccctggggactatgtgcccaaggagcacatcctgcaggtgctgggcatctctgctgaggtgtgtgccagtgaccccccccagtgtgaccgggaggtgtag

SEQ ID NO: 20933 - DNA, 654 bp, synthetic construct
  source 1..654: mol_type = other DNA; note = Synthetic coding sequence
atgaacttcagcgaggtgttcaagctgagcagcctgctgtgcaagttctccccagatggcaagtacctggccagctgtgtgcagtaccgcctggtggtgagagatgtgaacaccctgcagatcctgcagctgtacacctgcctggaccagatccagcacatcgagtggagcgctgacagcctcttcatcctgtgtgccatgtacaagaggggcctggtgcaggtgtggagcctggagcagcctgagtggcactgcaagattgatgagggcagcgctggcctggtggccagctgctggagcccagatggccgccacatcctgaacaccacagagttccacctgcgcatcaccgtgtggagcctgtgcaccaagtctgtgtcctacatcaagtaccccaaggcctgcctgcagggcatcaccttcaccagagatggccgctacatggccctggccgagcggcgggactgcaaggactatgtgtccatctttgtgtgcagcgactggcagctgctgcgctacaagatcctgctgtacagcctggatggccgcctgctgagcacctacagcgcctatgagtggagcctgggcatcaagtctgtggcctggagccccagcagccagttcctggccgtgggcagctatgatggcaagtag

SEQ ID NO: 20934 - DNA, 483 bp, synthetic construct; identical to SEQ ID NO: 20009
  source 1..483: mol_type = other DNA; note = Synthetic coding sequence

SEQ ID NO: 20935 - DNA, 951 bp, synthetic construct
  source 1..951: mol_type = other DNA; note = Synthetic coding sequence
atggaggagaacaacctgcagtgcagctctgtggtggatggcaactttgaggaggtgccccgggagacagccatccagttcaagccacccctgtaccggcagcgctaccagtttgtgaagaacctggtggaccagcacgagcccaagaaggtggccgacctgggctgtggggacaccagcctgctgcggctgctgaaggtgaacccctgcatcgagctgctggtgggcgtggacatcaatgaagacaagctgcgctggaggggggacagcctggcccccttcctgggggacttcctgaagccccgggacctgaacctgaccatcaccctgtaccacggctctgtggtggagcgggacagccggctgctgggctttgacctgatcacctgcatcgagctgattgagcacctggacagcggggacctggcccgcttccctgaggtggtgtttggctacctgagccccagcatgatcgtcatcagcacccccaacagcgagttcaaccccctcttccccagcgtgaccctgcgggacagcgaccacaagtttgagtggaccaggatggagttccagacctgggccctgtatgtggccaacagatatgactacagcgtggagttcaccggggtgggggagcccccagctggagcagaaaatgtgggctactgcacccagatcggcatcttcaggaagaatggaggcaaggccacagagagctgcctgtctgagcagcacgaccagcacgtgtacaaggctgtgttcaccaccagctaccccagcctgcagcaggagcgcttcttcaagctggtgctggtgaatgaggtgtcccagcaggtggagagcctgcgggtgagccacctgcccaggaggaaggagcaggccggggagcggggggacaagcccaaggacatcggcggcagcaaggcccctgtgccctgcttcggcccctag

SEQ ID NO: 20936 - DNA, 1056 bp, synthetic construct
  source 1..1056: mol_type = other DNA; note = Synthetic coding sequence
atgtggacccccaggcctgccctgcacgtgcacgtgatcctgtacagccccatccaccgctgctacgcccgggctgaccccaccatgggccgcatctgggtggatgctgctgtgccctgcctggaggagtgtggcttcctgctgcacttcagagatggctgctaccacctggagaccagcacccaccacttcctgagccacgtggacaggctcttcagccagcccagcagccagacagccttccacatgcaggtgcggcctgggggcctggtggccctgtgtgatggagagggcggcatgctgtacccccagggcacccacctgctgctgggcatgggctgcaaccccatgagaggagaggagtggttcatcctgcagcactgccccacctgggtgtccctgcggagcaagacaggccgcttcatcagcgtcatctatgatggagaggtgcgggccgccagcgagcggctgaacaggatgagcctcttccagtttgaatgtgacagcgagagccccaccgtgcagctgcggagcgccaacggctactacctgagccagaggaggcacagagctgtgatggctgatggccaccccctggagagtgacaccttcttcaggatgcactggaactgtggccgcatcatcctgcagagctgccggggccgcttcctgggcatcgcccccaacagcctgctgatggccaacgtcatcctgcccggccccaatgaggagtttggcatcctgtttgccaacagaagcttcctggtgctgcggggccgctatggctacgtgggcagcagcagcggccatgacctgatccagtgcaaccaggaccagcctgaccgcatccacctgctgccctgccggcccggcatctaccacttccagggcggcatcctgctggtgaacaacatcctgtggcacctgagccccctgggccaggtgtgcccccagctgctgtaccgggccagcggggagcagctgacccactgcaccggcccccagtggctgctgcacgccagccggcccaagtggcaccctgtgggccggcagtag

SEQ ID NO: 20937 - DNA, 333 bp, synthetic construct
  source 1..333: mol_type = other DNA; note = Synthetic coding sequence
atgcagatcagcagcgagaaggaggaggatgacaatgagaagaggcaggaccccggggacaactgggaggagggcggcggcggcggcggcggcatggagaagagcagcggcccctggaacaagacagcccctgtgcaggcccccccagcccctgtgattgtgacagagaccccagagcccgccatgaccagcggcgtgtacagacctcctggggcccggctgaccaccaccaggaagaccccccagggccccccagagatctacagcgacacccagttccccagcctgcagagcacagccaagcacgtggagagcaggaagtacctgaagtag

SEQ ID NO: 20938 - DNA, 972 bp, synthetic construct
  source 1..972: mol_type = other DNA; note = Synthetic coding sequence
atggagggccatgaccccaaggagcctgagcagctgaggaagctgttcatcggcggcctgagctttgagaccacagatgacagcctgcgggagcactttgagaagtggggcaccctgacagactgtgtggtgatgagggacccccagaccaagaggagccggggcttcggctttgtgacctacagctgtgtggaggaggtggatgctgccatgtgtgcccggccccacaaggtggatggccgggtggtggagcccaagagagctgtgtcccgggaggacagcgtgaagccaggggcccacctgactgtgaagaagatctttgtgggcggcatcaaggaggacacagaggagtacaacctgcgggactactttgagaagtatggcaagattgagaccatcgaggtgatggaggaccggcagagcggcaagaagaggggctttgcctttgtgacctttgatgaccatgacacagtggacaagatcgtggtgcagaagtaccacaccatcaatggccacaactgtgaggtgaagaaggccctgagcaagcaggagatgcagagcgctggcagccagaggggccggggcggcggcagcggcaacttcatgggccggggcggcaactttggaggcggcggcggcaactttggccggggcggcggcaactacggcggcggccctggctacagcagccggggcggctacggcggcggcggccctggctacggcaaccagggcggcggctacggcggcggcggcggctatgatggctacaatgaaggaggcaactttggaggcggcaactacggcggcggcggcaactacaatgactttggaaactacagcggccagcagcagagcaactacggccccatgaagggcggcagctttggaggccgcagcagcggcagcccctatggaggcggctacggcagcggcggcggcagcggcggctacggcagccgccgcttctag

SEQ ID NO: 20939 - DNA, 291 bp, synthetic construct
  source 1..291: mol_type = other DNA; note = Synthetic coding sequence
aacatccagctggtggctgatggctgctgcaacctgcagaagcagatccagatcacccagctgtttggagtgcctgtggtggtggccctgaatgtgttcaagacagacaccagggctgagattgacctggtgtgtgagctggccaagagagctggggcctttgatgctgtgccctgctaccactggagcgtgggcggcaaaggatctgtggacctggcccgggctgtgcgggaggccgccagcaagaggagccgcttccagttcctgtatgatgtgcagcccttctcctag

SEQ ID NO: 20940 - DNA, 483 bp, synthetic construct
  source 1..483: mol_type = other DNA; note = Synthetic coding sequence
atgacagatgtgcctgccaccttcacccaggccgagtgcaatggagacaagcccccagaaaatggccagcagaccatcaccaagatcagcgaggagctgacagatgtggacagccccctgccccactacagagtggagcccagcctggagggcgccctgaccaagggcagccaggaggagaggaggaagctgcagggcaacatgctgctgaacagctccatggaggacaagatgctgaaggaaaatcctgaggagaagctgttcatcgtgcacaaggccatcacagacctgagcctgcaggagaccagcgcagatgagatgaccttccgggagggccaccagtgggagaagatccccctgagcggcagcaaccaggagatccggcggcagaaggagcgcatcacagagcagcccctgaaggaggaggaggatgaggacaggaagaacaagggccaccaggccgctgagattgagtggctgtag

SEQ ID NO: 20941 - DNA, 480 bp, synthetic construct; identical to SEQ ID NO: 20848
  source 1..480: mol_type = other DNA; note = Synthetic coding sequence

SEQ ID NO: 20942 - DNA, 432 bp, synthetic construct
  source 1..432: mol_type = other DNA; note = Synthetic coding sequence
atggacagcagccagcagaagaccttccggggccatgatgcccctgtgctgagcctgagctttgaccccaaggacatcttcctggccagcgccagctgtgatggctctgtgcgggtgtggcagatcagtgaccagacctgtgccatctcctggcccctgctgcagaagtgcaatgatgtgatcaatgccaagagcatctgccgcctggcctggcagcccaagagcggcaagctgctggccatccctgtggagaagtctgtgaagctgtacagaagagagagctggagccaccagtttgacctgagtgacaacttcatcagccagaccctgaacatcgtgacctggagcccctgtggccagtacctggccgccggcagcatcaatggcctcatcatcgtgtggaatgtggagaccaaggactgcatggagtag

SEQ ID NO: 20943 - DNA, 2109 bp, synthetic construct
  source 1..2109: mol_type = other DNA; note = Synthetic coding sequence
atgacagagcgctgcagcctgtggagcgccctgtctgctgctgcctgctgcttctaccggggcagctttgtgcaggtgcagttcagcaaggagaagtacatcctggacagcagccctgagaagctgcacaaggagctggaggaggagctgaagctgagcagcacagacctgcggagccacgcctggtaccacggccgcatcccccgggaggtgtctgagaccctggtgcagagaaatggagacttcctgatccgggacagcctgaccagcctgggggactatgtgctgacctgccgctggaggaaccaggccctgcacttcaagatcaacaaggtggtggtgaaggccggggagagctacacccacatccagtacctgtttgagcaggagagctttgaccacgtgcctgccctggtgcgctaccacgtgggcagcaggaaggctgtgtctgagcagagcggggccatcatctactgccctgtgaacagaaccttccccctgcgctacctggaggccagctatggcctgggccagggcagcagcaagccagccagccctgtgagccccagcggccccaagggcagccacatgaagagaagatctgtgaccatgacagatggcctgacagctgacaaggtgaccaggagtgatggctgccccaccagcaccagcctgccccggccccgggacagcatccgcagctgtgccctgtccatggaccagatcccagacctgcacagccccatgagccccatcagcgagagccccagcagccctgcctacagcacagtgaccagggtgcatgctgccccagctgcccccagcgccacagccctgcctgccagccctgtggcccggcgcagcagcgagccccagctgtgccccggcagcgcccccaagacccacggggagagtgacaagggcccccacaccagccccagccacaccctgggcaaggccagccccagccccagcctgagcagctacagcgaccctgacagcggccactactgccagctgcagccccctgtgcggggcagccgggagtgggccgccacagagaccagcagccagcaggcccggagctatggagagcggctgaaggagctgtctgaaaatggagcccctgagggggactggggcaagaccttcaccgtgcccatcgtggaggtgaccagcagcttcaacccagccaccttccagagcctgctgatcccccgggacaaccggcccctggaggtgggcctgctgaggaaggtgaaggagctgctggccgaggtggatgcccggaccctggcccggcacgtgaccaaggtggactgcctggtggcccgcatcctgggcgtgaccaaggagatgcagaccctgatgggcgtgcgctggggcatggagctgctgaccctgccccacggccggcagctgcggctggacctgctggagcgcttccacaccatgagcatcatgctggccgtggacatcctgggctgcaccggcagcgctgaggagcgggccgccctgctgcacaagaccatccagctggccgctgagctgcggggcaccatgggcaacatgttctcctttgctgctgtgatgggcgccctggacatggcccagatcagccggctggagcagacctgggtgaccctgcggcagaggcacacagagggcgccatcctgtatgagaagaagctgaagcccttcctgaagagcctgaatgaaggcaaggagggcccccccctgagcaacaccaccttcccccacgtgctgcccctcatcaccctgctggagtgtgacagcgcccctcctgagggccctgagccctggggcagcacagaacatggagtggaggtggtgctggcccacctggaggccgccaggacagtggcccaccacggcggcctgtaccacaccaatgctgaggtgaagctgcagggcttccaggcccggcctgagctgctggaggtgttcagcacagagttccagatgaggctgctgtggggcagccagggcgccagcagcagccaggccaggagatatgagaagtttgacaaggtgctgacagccctgagccacaagctggagcctgctgtgcgcagcagcgagctgtag

SEQ ID NO: 20944 - DNA, 585 bp, synthetic construct
  source 1..585: mol_type = other DNA; note = Synthetic coding sequence
atgacagaggacagccagaggaacttccgctctgtgtactatgagaaggtgggcttccggggcgtggaggagaagaagagcctggagatcctgctgaaggatgaccggctgggcatcctgcccccccaccacgagagccacgccaaggtgatgatgtacaggaaggagcagtacctggatgtgctgcacgccctgaaggtggtgcgctttgtgtctgatgccaccccccaggccgaggtgtacctgaggatgtaccagctggagagcggcaagctgcccaggagccccagcttccccctggagccagatgatgaggtgttcctggccatcgccaaggccatggaggagatggtggaggacagcgtggactgctactggatcaccaggagatttgtgaaccagctgaacaccaagtacagagacagcctgccccagctgcccaaggcctttgagcagtacctgaacctggaggatggccgcctgctgacccacctgaggatgtgcagcgctgcccccaagctgccctatgacctgtggttcaagcgctgctttgctggctgcctgcctgagagcagcctgcagtag

SEQ ID NO: 20945 - DNA, 2334 bp, synthetic construct
  source 1..2334: mol_type = other DNA; note = Synthetic coding sequence
atggagcccaaggaggccaccgggaaggagaacatggtgaccaagaagaagaacctggccttcctgcggagccggctgtacatgctggagaggaggaagacagacacagtggtggagagctctgtgtctggggaccacagcggcaccctgcggcgcagccagagcgacagaacagagtacaaccagaagctgcaggagaagatgaccccccagggagaatgttctgtggccgagaccctgaccccagaggaggagcaccacatgaagaggatgatggccaagcgggagaagatcatcaaggagctgatccagacagagaaggactacctgaatgacctggagctgtgtgtgcgggaggtggtgcagcccctgaggaacaagaagacagaccggctggatgtggacagcctcttcagcaacattgaatctgtgcaccagatcagcgccaagctgctgagcctgctggaggaggccaccacagatgtggagcccgccatgcaggtgattggagaggtgttcctgcagatcaagggccccctggaggacatctacaagatctactgctaccaccatgatgaggcccacagcatcctggagagctatgagaaggaggaggagctgaaggagcacctgagccactgcatccagagcctgaagaagatctacatgcaggagggcaagcccaacctgctggacatgggcagcctgatgatcaagcccatccagagggtgatgaagtaccccctgctgctgtgtgagctgaggaacagcaccccacccagccacccagactaccgggccctggatgatgcctttgctgctgtgaaggacatcaacgtgaacatcaatgagctgaagaggaggaaggacctggtgctgaagtacaagaagaatgatgaagatgagagcctgaaggacaagctgagcaagctgaacatccacagcatcagcaagaagagcaagagggtgaccaaccacctgaagatcctgaccagaggagagagccaggtgaaggacaacaccttcaaccgggaggagaagctgttccgggccctggagaagacagtgcggctgtgtgtgaagaacatcagcctgtgcctgcagcacatccaggatgccatgcccctggccctgcagagcgtgatggacctgcaggagatctcctacaacaaggatgatgagatggactacagcgagaccctgagcaatgccctgaacagctgccacgactttgccagccacctgcagaggctcatcctgacccccctgagcgccctgctgagcctcttccctggcccccacaagctgatccagaagagatatgacaagctgctggactgcaacagctacctgcagaggagcactggagaggagagtgacctggccaagaaggagtatgaggccctgaatgcccagctggtggaggagctgcaggccttcaaccaggccgccaggaagatcctgctgaactgcctgtgcagcttcatcaccctgctgcgggacctgatgctggtggcccagcaggcctacagcaccctggtgcccatgcccctgctggtgagcagcatcagcgagatccagaaccaggtgctggaggagatccagaacctgaactgtgtgaaggagaacagcgccaccttcatcgagaggaagctgagctttgagaagaagaagcctgtgcagatcctgcctgagatgccccaccagacagacatccacaggagcaagctgctgagcacctacagcgctgaggagctgtaccaggccaagaggaagtgcaatgccacccaggagtatgacatcaacctgctggagggggacctggtggccgtcatcgagcagaaggaccccctgggcagcaccagccgctggctggtggacacaggaaatgtgaagggctacgtgtacagcagcttcctgaagccctacaacccagccaagatgcagaaggtggatgctgagaaccgcttctgtgatgatgactttgagaacatcagcctgtttgtgagcagcaggcctgccagtgacagcgtgacaggcaccagcgagagcagcatcggggacagcagcagcagcctgagcggcacctgtgggaagtttgagaccaatggaacagatgtggacagcttccaggaggtggatgagcagatcttctatgctgtgcacgccttccaggcccggagtgaccacgagctgagcctgcaggagtaccagagggtgcacatcctgcgcttctgtgacctgagcggcaacaaggagtggtggctggccgaggcccagggccagaagggctacgtgcctgccaactacctgggcaagatgacctacgcctag

SEQ ID NO: 20946 - DNA, 543 bp, synthetic construct
  source 1..543: mol_type = other DNA; note = Synthetic coding sequence
tgaagccagcccaagagctttgagaacagccctggggacctgggcaacagcagcctgcccacagctggctacaagagggcccagaccagcggcatcgaggaggagaccgtgaaggagaagaagaggaaaggaaacaagcagagcaagcacggccctggccggcccaagggcaacaagaaccaggagaatgtgagccacctgtctgtgtcctctgccagccccaccagctctgtggccagcgctgctggcagcatcaccagcagcagcctgcagaagagccccaccctgctgagaaatggcagcctgcagagcctgtctgtgggcagcagccctgtgggcagcgagatctccatgcagtacagacatgatggagcctgccccaccaccagcatctacaacagcaatgatgtggccgtgtccttccccaacgtggtgtctggcagcggcagcagcacccctgtgagcagcagccacctgccccagcagagcagcggccacctgcagcaggtgggcgccctgagccccagcgctgtgagcagctag

SEQ ID NO: 20947 - DNA, 384 bp, synthetic construct
  source 1..384: mol_type = other DNA; note = Synthetic coding sequence
atgaccaccaagaacctggagaccaaggtgacagtgaccagcagccccatcagaggagctggagatggcatggagacagaggagccccccaagtctgtggaggtgaccagcggcgtgcagagcaggaagcaccacagcctgcagagcccctggaagaaggctgtgcccagcgagagccctggggtgctgcagctgggcaagatgctgacagagaaggccatggaggtgaaggctgtgcgcatcctggtgcccaaggccgccatcacccatgacatccccaacaagaacaccaaggtgaagagcctgggccaccacaagggggagttcctgggccagagcgagggcgtgattgagcccaacaaggagctgtctgaggtgaagtag

SEQ ID NO: 20948 - DNA, 1683 bp, synthetic construct
  source 1..1683: mol_type = other DNA; note = Synthetic coding sequence
atgtctgagcacagcaggaacagcgaccaggaggagctgctggatgaggagatcaatgaagatgagatcctggccaacctgtctgctgaggagctgaaggagctgcagagcgagatggaggtgatggccccagaccccagcctgcctgtgggcatgatccagaaggaccagacagacaagcccccaactggaaacttcaaccacaagagcctggtggactacatgtactgggagaaggccagcaggaggatgctggaggaggagcgggtgcctgtgacctttgtgaagtctgaggagaagacccaggaggagcacgaggagattgagaagaggaacaagaacatggcccagtacctgaaggagaagctgaacaatgaaattgtggccaacaagcgggagagcaagggcagcagcaacatccaggagacagatgaggaggatgaggaggaggaggatgatgatgatgatgatgaaggagaagatgatggagaggagagcgaggagaccaaccgggaggaggagggcaaggccaaggagcagatccggaactgtgagaacaactgccagcaggtgacagacaaggccttcaaggagcagagggacaggcctgaggcccaggagcagagcgagaagaagatcagcaagctggaccccaagaagctggccctggacaccagcttcctgaaggtgtccacccggcccagcggcaaccagacagacctggatggcagcctgcggcgggtgaggaagaatgaccctgacatgaaggagctgaacctgaacaacatcgagaacatccccaaggagatgctgctggactttgtgaatgccatgaagaagaacaagcacatcaagaccttcagcctggccaacgtgggcgcagatgaaaatgtggcctttgccctggccaacatgctgcgggagaacagaagcatcaccaccctgaacatcgagagcaacttcatcactggaaaaggaattgtggccatcatgcgctgcctgcagttcaatgagaccctgacagagctgcgcttccacaaccagaggcacatgctgggccaccacgccgagatggagatcgcccggctgctgaaggccaacaacaccctgctgaagatgggctaccactttgagctgcccggccccaggatggtggtgaccaacctgctgaccaggaaccaggacaagcagaggcagaagaggcaggaggagcagaagcagcagcagctgaaggagcagaagaagctgattgccatgctggagaatggcctgggcctgcccccaggcatgtgggagctgctgggcggccccaagccagacagcaggatgcaggagttcttccagcccccaccaccccggccccccaacccccagaatgtgcccttcagccagaggtctgagatgatgaagaagcccagccaggcccccaagtacagaacagatcctgacagcttccgggtggtgaagctgaagaggatccagaggaagagcaggatgcctgaggcccgggagcccccagagaagaccaacctgaaggatgtgatcaagaccctgaagcctgtgcccaggaaccggcccccacccctggtggagatcaccccccgggaccagctgctgaatgacatccgccacagctctgtggcctacctgaagcctgtgcagctgcccaaggagctggcctag

SEQ ID NO: 20949 - DNA, 51 bp, synthetic construct; identical to SEQ ID NO: 20857
  source 1..51: mol_type = other DNA; note = Synthetic coding sequence

SEQ ID NO: 20950 - DNA, 513 bp, synthetic construct
  source 1..513: mol_type = other DNA; note = Synthetic coding sequence
atgcccatcctgctcttcctgattgacaccagcgcctccatgaaccagaggagccacctgggcaccacctacctggacacagccaagggagctgtggagaccttcatgaagctgcgggcccgggaccctgccagcagaggagaccgctacatgctggtgacctttgaggagcccccctatgccatcaaggccggctggaaggagaaccacgccaccttcatgaatgagctgaagaacctgcaggccgagggcctgaccaccctgggccagagcctgaggacagcctttgacctgctgaacctgaaccggctggtgacaggcatcgacaactacggccagggcaggaaccccttcttcctggagcccgccatcatcatcaccatcacagatggcagcaagctgaccaccaccagcggcgtgcaggatgaggccgtgcacatcctgtgtgtgctgcaggagtgcctgatctctgtgtggagcccctggtgcaggaagtacaaggtgggctggtag

SEQ ID NO: 20951 - DNA, 204 bp, synthetic construct
  source 1..204: mol_type = other DNA; note = Synthetic coding sequence
atgagcagaagaagatttgactgccgcagcatcagcggcctgctgaccaccaccccccagatccccatcaagatggagaacttcaacaacttctacatcctgaccagcaaggagctgggccggggcaagtttgctgtggtgcggcagtgcatcagcaagagcacaggccaggagtatgctgccaagttcctgaagaagaggtag

SEQ ID NO: 20952 - DNA, 1107 bp, synthetic construct
  source 1..1107: mol_type = other DNA; note = Synthetic coding sequence
atgctgagcaagaggggctgccacgcccgcatctatgctgacttccccatccggcggctcatcagccagaggagcagcctggagaccctggaggacattgaagaaaatgcccccctgcggcgctgcaggaccctgagcggcagcccccggcccaagaacttcaagaagatccacttcatcaagaacatgaggcagcacgacaccagaaatggaagaattgtgctgatctctggaagaagaagcttctgcagcatcttctctgtgctgccctacagagacagcacccaggtgggggacctgaagctggatggcggccggcagagcactggagctgtgtccctgaaggagatcatcggcctggagggcgtggagctgggcgcagatggcaagacagtgtcctacacccagttcctgctgcccaccaatgccttcggggcccggaggaacaccatcgacagcaccagcagcttcagccagttcaggaacctgagccacaggagcctgagcatcggccgggccagcggcacccagggcagcctggacaccggcagtgacctgggggacttcatggactatgaccccaacctgctggatgacccccagtggccctgtgggaagcacaagagggtgctgatcttccccagctacatgaccaccgtgattgattatgtgaagcccagcgacctgaagaaggacatgaatgagaccttcaaggagaagttcccccacatcaagctgaccctgagcaagatccgcagcctgaagcgggagatgaggaagctggcccaggaggactgtggcctggaggagcccaccgtggccatggcctttgtgtactttgagaagctggccctgaagggcaagctgaacaagcagaacaggaagctgtgtgccggggcctgtgtgctgctggccgccaagattggaagtgacctgaagaagcatgaggtgaagcacctgattgacaagctggaggagaagttccggctgaacagaagagagctgattgcctttgagttccctgtgctggtggccctggagtttgccctgcacctgcctgagcacgaggtgatgccccactaccgccgcctggtgcagagcagctag

SEQ ID NO: 20953 - DNA, 795 bp, synthetic construct
  source 1..795: mol_type = other DNA; note = Synthetic coding sequence
atgacagatgtgcctgccaccttcacccaggccgagtgcaatggagacaagcccccagaaaatggccagcagaccatcaccaagatcagcgaggagctgacagatgtggacagccccctgccccactacagagtggagcccagcctggagggcgccctgaccaagggcagccaggaggagaggaggaagctgcagggcaacatgctgctgaacagctccatggaggacaagatgctgaaggagaccagcgcagatgagatgaccttccgggagggccaccagtgggagaagatccccctgagcggcagcaaccaggagatccggcggcagaaggagcgcatcacagagcagcccctgaaggaggaggaggatgaggacaggaagaacaagggccaccaggccgctgagattgagtggctgggcttcaggaagcccagccaggccgacatgctgcacagcaagcatgatgaggagcagaaggtgtgggatgaggagattgatgatgatgatgatgacaactgcaacaatgatgaagatgaggtgcgggtcatcgagttcaagaagaagcatgaggaggtgtcccagttcaaggaggagggagatgccagcgaggacagccccctgagcagcgccagcagccaggccgtgaccccagatgagcagcccaccctgggcaagaagagtgacatcagcagaaatgcctacagccgctacaacaccatctcctacaggaagatcaggaagggcaacaccaagcagagaattgatgaatttgagagcatgatgcacctgtag

SEQ ID NO: 20954 - DNA, 4302 bp, synthetic construct; identical to SEQ ID NO: 18796
  source 1..4302: mol_type = other DNA; note = Synthetic coding sequence

SEQ ID NO: 20955 - DNA, 810 bp, synthetic construct
  source 1..810: mol_type = other DNA; note = Synthetic coding sequence
atgtttcctgccctggagacccacctgaagcagaccatcccagacccctatgaggacttcatgtaccgccacctgcagtactacggctacttcaaggcccagaggggcagcctgcccaacagcgccacccaccagcacgtgaggaagaacaacccccagtgcctgctgaatggcagcctgggggagaaggatgacctgatcccagacaccctgcagaaggagaagctgctgtacagccacatgctgagcctgccccacctgcggagccggcagctgctgtatgatgagctggatgaggtgaacccccggctgcgggagccccaggagctgttcagcatcctgagcaccaagaggcccctgcaggccccccgctggcccattgaatgtgaggtgatcaaggagaacatccaccacatcgagtgggccccaccccagcctgagtacttctaccagcccaagggaaatgagaaggtgcctgagatcgtgggggagaagaagggcaccgtggtgtaccagctggacagcgtgcccatcgagggcagctacttcaccagcagccgggtgggcggcaagaggggcatcgtgaaggagctggccgtgaccctgcagggccctgaggacaacaccctgctgtttgagagcagatttgagagcggcaacctgcagaaggctgtgcgggtggaccccatgtccatgaacagcccctgtgagctgaccagcaccctgaccaacaccctgagcggcttcatctttgtgttccgcaccccagagaagatgctgcccatcgccagccccctgagcacctgctag

SEQ ID NO: 20956 - DNA, 975 bp, synthetic construct
  source 1..975: mol_type = other DNA; note = Synthetic coding sequence
atgcccctgcaggtgtctgactacagctggcagcagaccaagacagctgtgttcctgagcctgcccctgaagggcgtgtgtgtgcgggacacagatgtgttctgcacagagaactacctgaaggtgaacttcccccccttcctgtttgaggccttcctgtatgcccccattgatgatgagagcagcaaggccaagattggaaatgacaccatcgtgttcaccctgtacaagaaggaggccgccatgtgggagaccctgtctgtgactggagtggacaaggagatgatgcagaggatccgggagaagagcatcctgcaggcccaggagcgggccaaggaggccacagaggccaaggccgccgccaagcgggaggaccagaagtatgccctgtctgtgatgatgaagattgaggaggaggagaggaagaagattgaggacatgaaggaaaatgaaagaatcaaggccaccaaggccctggaggcctggaaggagtaccagaggaaggccgaggagcagaagaagatccagcgggaggagaagctgtgccagaaggagaagcagatcaaggaggagaggaagaagatcaagtacaagagcctgaccaggaacctggccagcaggaacctggcccccaagggcaggaacagcgagaacatcttcacagagaagctgaaggaggacagcatcccagcccccaggtctgtgggcagcatcaagatcaacttcacccccagggtcttccccacagccctgcgggagagccaggtggccgaggaggaggagtggctgcacaagcaggccgaggcccggcgggccatgaacacagacattgctgagctgtgtgacctgaaggaggaggagaagaaccctgagtggctgaaggacaagggcaagccagagcgctgcctgaagatccctgtgaccgtcatccacctggtggtgggcctgagctctgtgatgaggggccagatctag

SEQ ID NO: 20957 - DNA, 162 bp, synthetic construct
  source 1..162: mol_type = other DNA; note = Synthetic coding sequence
atgcagaccagcagcagccgctctgtgcacctgtctgagtggcagaagaactactttgccatcaccagcggcatctgcaccggccccaaggcagatgcctaccgggcccagatcctgcgcatccagtatgcctgggccaacagcgagatcagccaggtgtag

SEQ ID NO: 20958 - DNA, 2079 bp, synthetic construct
  source 1..2079: mol_type = other DNA; note = Synthetic coding sequence
atggtgaccaccctgggccccaagatggctgctgagtggggcggcggcgtgggctacagcggcagcggccctggccgcagccgctggcgctggagcggctctgtgtgggtgcgctctgtgctgctgctgctgggcggcctgcgggccagcgccaccagcacccctgtgtccctgggcagcagccccccctgccgccaccacgtgcccagcgacacagaggtgatcaacaaggtgcacctgaaggccaaccacgtggtgaagagagatgtggatgagcacctgcgcatcaagacagtgtatgacaagtctgtggaggagctgctgcctgagaagaagaacctggtgaagaacaagctgttcccccaggccatctcctacctggagaagaccttccaggtgcggcggcctgctggcaccatcctgctgagccggcagtgtgccaccaaccagtacctgaggaaagaaaatgacccccaccgctactgcacaggagaatgtgccgcccacaccaagtgtggccctgtgattgtgcctgaggagcacctgcagcagtgccgggtgtaccggggcggcaagtggccccatggagctgtgggcgtgcctgaccaggagggcatcagtgatgctgactttgtgctgtatgtgggcgccctggccacagagcgctgcagccatgagaacatcatctcctatgctgcctactgccagcaggaggccaacatggaccggcccatcgccggctacgccaacctgtgccccaacatgatcagcacccagccccaggagtttgtgggcatgctgagcacagtgaagcatgaggtgatccacgccctgggcttctctgctggcctgtttgccttctaccatgacaaggatggcaaccccctgaccagcagatttgctgatggcctgccccccttcaactacagcctgggcctgtaccagtggagcgacaaggtggtgaggaaggtggagcggctgtgggatgtgcgggacaacaagatcgtgcgccacacagtgtacctgctggtgaccccccgggtggtggaggaggccaggaagcactttgactgccctgtgctggagggcatggagctggagaaccagggcggcgtgggcacagagctgaaccactgggagaagaggctgctggagaatgaggccatgacaggcagccacacccagaacagagtgctgagccgcatcaccctggccctgatggaggacaccggctggtacaaggccaactacagcatggccgagaagctggactggggccggggcatgggctgtgactttgtgaggaagagctgcaagttctggattgaccagcagaggcagaagaggcagatgctgagcccctactgtgacaccctgcggagcaaccccctgcagctgacctgccggcaggaccagagagctgtggccgtgtgcaacctgcagaagttccccaagcccctgccccaggagtaccagtactttgatgagctgagcggcatcccagctgaggacctgccctactacggcggctctgtggagattgctgactactgccccttcagccaggagttctcctggcacctgtctggagagtaccagaggagcagtgactgccgcatcctggagaaccagcctgagatcttcaagaactatggagctgagaagtatggcccccacagcgtgtgcctgatccagaagagcgcctttgtgatggagaagtgtgagaggaagctgagctacccagactggggcagcggctgctaccaggtgtcctgcagcccccagggcctgaaggtgtgggtgcaggacaccagctacctgtgcagcagagctggccaggtgctgcctgtgtccatccagatgaatggctggattcatgatggcaacctgctgtgccccagctgctgggacttctgtgagctgtgccccccagagacagaccccccagccaccaacctgacccgggccctgcccctggacctgtgcagctgcagcagcagcctggtggtgaccctgtggctgctgctgggcaacctcttccccctgctggccggcttcctgctgtgcatctggcactag

SEQ ID NO: 20959 - DNA, 3021 bp, synthetic construct
  source 1..3021: mol_type = other DNA; note = Synthetic coding sequence
atggacagcagccagcagaagaccttccggggccatgatgcccctgtgctgagcctgagctttgaccccaaggacatcttcctggccagcgccagctgtgatggctctgtgcgggtgtggcagatcagtgaccagacctgtgccatctcctggcccctgctgcagaagtgcaatgatgtgatcaatgccaagagcatctgccgcctggcctggcagcccaagagcggcaagctgctggccatccctgtggagaagtctgtgaagctgtacagaagagagagctggagccaccagtttgacctgagtgacaacttcatcagccagaccctgaacatcgtgacctggagcccctgtggccagtacctggccgccggcagcatcaatggcctcatcatcgtgtggaatgtggagaccaaggactgcatggagcgggtgaagcatgagaagggctacgccatctgtggcctggcctggcaccccacctgtggccgcatctcctacacagatgctgagggcaacctgggcctgctggagaatgtgtgtgaccccagcggcaagaccagcagcagcaaggtgagcagccgggtggagaaggactacaatgacctgtttgatggagatgacatgagcaatgctggggacttcctgaatgacaatgctgtggagatccccagcttcagcaagggcatcatcaatgatgatgaagatgatgaggacctgatgatggccagcggccggccccggcagaggagccacatcctggaggatgatgagaacagcgtggacatctccatgctgaagacaggcagcagcctgctgaaggaggaggaggaggatggccaggagggcagcatccacaacctgcccctggtgaccagccagaggcccttctatgatggccccatgcccaccccccggcagaagcccttccagagcggcagcacccccctgcacctgacccaccgcttcatggtgtggaacagcatcggcatcatccgctgctacaatgatgagcaggacaatgccattgatgtggagttccatgacaccagcatccaccacgccacccacctgagcaacaccctgaactacaccatcgctgacctgagccatgaggccatcctgctggcctgtgagagcacagatgagctggccagcaagctgcactgcctgcacttcagctcctgggacagcagcaaggagtggatcatcgacctgccccagaatgaagacatcgaggccatctgcctgggccagggctgggccgccgccgccaccagcgccctgctgctgcggctcttcaccatcggcggcgtgcagaaggaggtgttcagcctggccggccctgtggtgtccatggccggccacggggagcagctgttcatcgtgtaccaccggggcaccggctttgatggagaccagtgcctgggcgtgcagctgctggagctgggcaagaagaagaagcagatcctgcacggggaccccctgcccctgaccaggaagagctacctggcctggattggcttctctgctgagggcaccccctgctacgtggacagcgagggcatcgtgaggatgctgaacagaggcctgggcaacacctggacccccatctgcaacacccgggagcactgcaagggcaagagtgaccactactgggtggtgggcatccacgagaacccccagcagctgcgctgcatcccctgcaagggcagccgcttcccccccaccctgcccaggcctgctgtggccatcctgtccttcaagctgccctactgccagatcgccacagagaagggccagatggaggagcagttctggaggagcgtcatcttccacaaccacctggactacctggccaagaatggctatgaatatgaggagagcaccaagaaccaggccaccaaggagcagcaggagctgctgatgaagatgctggccctgagctgcaagctggagcgggagttccgctgtgtggagctggccgacctgatgacccagaatgctgtgaacctggccatcaagtatgccagccgcagcaggaagctgatcctggcccagaagctgtctgagctggccgtggagaaggctgctgagctgacagccacccaggtggaggaggaggaggaggaggaggacttcaggaagaagctgaatgccggctacagcaacacagccacagagtggagccagccccgcttcaggaaccaggtggaggaggatgctgaagattctggagaggctgatgatgaggagaagccagagatccacaagccaggccagaacagcttcagcaagagcaccaacagcagtgatgtgtctgccaagtctggagctgtgaccttcagcagccagggccgggtgaaccccttcaaggtgtctgccagcagcaaggagcccgccatgtccatgaacagcgcccggagcaccaacatcctggacaacatgggcaagagcagcaagaagagcacagccctgagcaggaccaccaacaatgagaagagccccatcatcaagcccctcatccccaagcccaagcccaagcaggccagcgctgccagctacttccagaagaggaacagccagaccaacaagacagaggaggtgaaggaggagaacctgaagaatgtgctgtctgagaccccagccatctgccccccccagaacacagagaaccagaggcccaagacaggcttccagatgtggctggaggagaacagaagcaacatcctgagtgacaacccagacttcagtgatgaagctgacatcatcaaggagggcatgatccgcttccgggtgctgagcacagaggagaggaaggtgtgggccaacaaggccaagggggagacagccagcgagggcacagaggccaagaagaggaagagggtggtggatgaaagtgatgaaacagagaaccaggaggagaaggccaaggagaacctgaacctgagcaagaagcagaagcccctggacttcagcaccaaccagaagctgagcgcctttgccttcaagcaggagtag

SEQ ID NO: 20960 - DNA, 540 bp, synthetic construct
  source 1..540: mol_type = other DNA; note = Synthetic coding sequence
atgacagaggacagccagaggaacttccgctctgtgtactatgagaaggtgggcttccggggcgtggaggagaagaagagcctggagatcctgctgaaggatgaccggctggacacagagaagctgtgcaccttcagccagcgcttccccctgcccagcatgtaccgggccctggtgtggaaggtgctgctgggcatcctgcccccccaccacgagagccacgccaaggtgatgatgtacaggaaggagcagtacctggatgtgctgcacgccctgaaggtggtgcgctttgtgtctgatgccaccccccaggccgaggtgtacctgaggatgtaccagctggagagcggcaagctgcccaggagccccagcttccccctggagccagatgatgaggtgttcctggccatcgccaaggccatggaggagatggtggaggacagcgtggactgctactggatcaccaggagatttgtgaaccagctgaacaccaagtacagagacagcctgccccagctggagggcatcaacgtgggctag

SEQ ID NO: 20961 - DNA, 3189 bp, synthetic construct
  source 1..3189: mol_type = other DNA; note = Synthetic coding sequence
atgatcagcaagggcggcagcgaggccctgctgcagaccctggtggacacagccaggacagcccccccagactatgacatcctgctgcccctcttccggctgctggccaaggtgggcctgcgggacaagaagattggaaggaaggccctggagctggaggccctggatgtgaccctcatcctggccaggaagaacctgagccacggccagaacctgctgcactgcctgtgggccctgcgggtgtttgccagctctgtgtccatgggcgccatgctgggcatcaatggagccatggagctgctcttcaaggtgatcaccccctacaccaggaagaggacccaggccatccgggccgccacagaggtgctggccgccctgctgaagagcaagagcaatggccggcgggctgtgaacagaggctacgtgaccagcctgctgggcctgcaccaggactggcacagccatgacacagccaatgcctacgtgcagatcagaagaggcctgctgctgtgcctgcggcacatcgccgccctgcggagcggccgggaggccttcctggccgcccagggcatggagatcctcttcagcaccacccagaactgcctggatgacaagtccatggagcctgtgatctctgtggtgctgcagatcctgcggcagtgctaccccaccagccccctgcccctggtgacagccagcagcgcctatgccttccctgtgcccggctgcatcaccacagagccccctcatgacctgcctgaagaagattttgaagatgatggagatgatgaggtggacaaggacagcgacacagaagatggcaaggtggaggatgatgacctggagacagatgtgaacaagctgagcagcaagccaggcctggacaggcctgaggaggagctgatgcagtatgaggtgatgtgcctggagctgagctacagctttgaggagctgcagagcaagctgggagatgacctgaacagcgagaagacccagtatgccaaccaccaccacatcccagctgctgccagcagcaagcagcactgctacagcaaggaccagagcagctgtggccaggagcgggagtatgctgtgcagaccagcctgctgtgccgggtgaagacaggccgcagcacagtgcacctgggcagcaagaagaaccctggggtgaacctgtaccagaatgtgcagagcaacagcctgcggcgggacagcagcgagagcgagatcccagacatccaggccagccccaaggcagatgcctgggatgtggatgccatcttctgccccaggatgtctgccagcttcagcaacagcaccaggacccgggaggtggtgaaggtgattgacaagctgctgcagacccacctgaagagggtgcccttccatgacccctacctgtacatggccaaggcccggaggaccagctctgtggtggacttcaagatgatggccttcccagatgtgtggggccactgccccccacccaccacccagcccatgctggagaggaaatgtggggtgcagaggatccgcatctttgaggacatccggcggctcatccagcccagtgatgtgatcaacaaggtggtgttcagcctggatgagccctggcccctgcaggacaatgccagcaactgcctgcgcttcttcagcaagtttgagagcggcaacctgaggaaggccatccaggtgcgggagtttgaatatgacctgctggtgaatgctgatgtgaacagcacccagcaccagcagtggttctacttcaaggtgtctggcatgcaggccgccatcccctaccacttcaacatcatcaactgtgagaagcccaacagccagttcaactacggcatgcagcccaccctgtacagcgtgaaggaggccctgctgggcaagcccacctggatcagaacaggccacgagatctgctactacaagaaccactaccggcagagcacagctgtggccggcggggccagcggcaagtgctactacaccctgacctttgctgtgaccttcccccacagtgaagatgtgtgctacctggcctaccactacccctacacctacacagccctgatgacccacctggacatcctggagaagtctgtgaacctgaaggaggtgtacttccggcaggatgtgctgtgccagaccctgggcggcaacccctgccccctggtgaccatcacagccatgcctgagagcaacagtgatgagcacctggagcagttccgccaccggccctaccaggtgatcacagcccgggtgcaccctggagagagcaatgcctcctgggtgatgaagggcaccctggagttcctggtgtccagtgaccctgtggcccggctgctgcgggagaacttcatcttcaagatcatccccatgctgaacccagatggagtcatcaatggaaaccaccgctgcagcctgagcggggaggacctgaaccggcagtggctgagccccagcgcccacctgcagcccaccatctaccacgccaagggcctgctgtaccacctgagcagcatcggccgcagccctgtggtgttctgtgacttccacggccacagccagaagaagaatgtgttcctgtatggctgcagcatcaaggagaccctgtggcaggccgcctgcaccgtgggcaccagcaccatcctggaggaggtgaactaccgcaccctgcccaagatcctggacaagctggccccagccttcaccatgagcagctgcagcttcctggtggagaagagccgggccagcacagcccgggtggtggtgtggagggagatgggcgtgagccgcagctacaccatggagagcagctactgcggctgcaaccagggcccctaccagtgcacccagaggctgctggagaggaccaagaatgaaagagcccaccctgtggatggcctgcagggcctgcagtttggcacccgggagctggaggagatgggcgccatgttctgcctgggcctgctgatcctggagctgaagagcgccagctgcagccaccagctgctggcccaggccgccaccctgctgtctgcagaagaagatgccctggaccagcacctgcagaggctgaagagcagcaacttcctgcccaagcacatctggtttgcctaccacttctttgccatcaccaacttcttcaagatgaacctgctgctgcacgtgagcccctag

SEQ ID NO: 20962 - DNA, 738 bp, synthetic construct
  source 1..738: mol_type = other DNA; note = Synthetic coding sequence
atggctgctgcccctccttcctactgctttgtggccttccccccccgggccaaggatggcctggtggtgtttgggaagaacagcgcccggcccagagatgaggtgcaggaggtggtgtacttctctgctgctgaccacgagcctgagagcaaggtggagtgcacctacatcagcattgaccaggtgcccaggacctacgccatcatgatcagcaggcctgcctggctgtggggcgctgagatgggcgccaatgagcacggcgtgtgcatcgccaatgaggccatcaacacccgggagcctgctgctgagattgaggccctgctgggcatggacctggtgcggctgggcctggagcggggggagacagccaaggaggccctggatgtgattgtgtccctgctggaggagcacggccagggcggcaactactttgaagatgccaacagctgccacagcttccagagcgcctacctgattgtggacagagatgaggcctgggtgctggagaccatcggcaagtactgggccgctgagaaggtgacagaaggagtgcgctgcatctgcagccagctgagcctgaccaccaagatggatgctgagcaccctgagctgcggagctatgcccagagccagggctggtggacaggagagggggagttcaacttcagcgaggtgttcagccctgtggaggaccacctggactgtggggccggcaaggacagcctggagaagcagtag

SEQ ID NO: 20963 - DNA, 99 bp, synthetic construct
  source 1..99: mol_type = other DNA; note = Synthetic coding sequence
atgtctgagcagggcgacctgaaccaggccatcgccgaggagggcggcacagagcaggagacagccaccccagaaaatggcatcgtgaagtctgagtag

SEQ ID NO: 20964 - DNA, 132 bp, synthetic construct
  source 1..132: mol_type = other DNA; note = Synthetic coding sequence
tgagtgctgggcagccccaagccagaggagatccccctgacctggatccagcccggcaccaccgtgctgaactgcagccatgacttcctgtctgagagcctcatcatcatccggaggatggccatcttctag

SEQ ID NO: 20965 - DNA, 339 bp, synthetic construct
  source 1..339: mol_type = other DNA; note = Synthetic coding sequence
atgtttgccaagctgaagaagaagattgctgaggagacagctgtggcccagaggcctggaggagccacccgcatccccaggtctgtgtccaaggagagcgtggcctccatgggcgctgacagcggagatgactttgccagtgatggcagcagcagccgggaggacctgagcagccagctgctgcggagaaatgagcagatcaggaagctggaggcccggctgagtgactatgcagagcaggtgaggaacctgcagaagatcaaggagaagctggagatcgccctggagaagcaccaggacagctccatgaggaagttccaggagcagaatgagacctag

SEQ ID NO: 20966 - DNA, 579 bp, synthetic construct; identical to SEQ ID NO: 20257
  source 1..579: mol_type = other DNA; note = Synthetic coding sequence

SEQ ID NO: 20967 - DNA, 1458 bp, synthetic construct
  source 1..1458: mol_type = other DNA; note = Synthetic coding sequence
atggccccccggctgcagctggagaaggccgcctggcgctgggccgagaccgtgcggcctgaggaggtgtcccaggagcacatcgagacagcctaccgcatctggctggagccctgcatccggggcgtgtgcagaagaaactgcaagggcaaccccaactgcctggtgggcatcggggagcacatctggctgggggagattgatgaaaattccttccacaacattgatgaccccaactgtgagaggaggaagaagaacagctttgtgggcctgaccaacctgggcgccacctgctacgtgaacaccttcctgcaggtgtggttcctgaacctggagctgcggcaggccctgtacctgtgccccagcacctgcagcgactacatgctgggagatggcatccaggaggagaaggactatgagccccagaccatctgtgagcacctgcagtacctgtttgccctgctgcagaacagcaacagacgctacatcgaccccagcggctttgtgaaggccctgggcctggacaccggccagcagcaggatgcccaggagttcagcaagctgttcatgagcctgctggaggacaccctgagcaagcagaagaacccagatgtgaggaacatcgtgcagcagcagttctgtggggagtatgcctacgtgacagtgtgcaaccagtgtggccgggagagcaagctgctgagcaagttctatgagctggagctgaacatccagggccacaagcagctgacagactgcatcagcgagttcctgaaggaggagaagctggagggggacaaccgctacttctgtgagaactgccagagcaagcagaatgccaccaggaagatccggctgctgagcctgccctgcaccctgaacctgcagctgatgagatttgtgtttgaccggcagacaggccacaagaagaagctgaacacctacatcggcttcagcgagatcctggacatggagccctacgtggagcacaagggcggcagctatgtgtatgagctgtctgctgtgctgatccaccggggcgtgtctgcctacagcggccactacatcgcccacgtgaaggacccccagagcggggagtggtacaagttcaatgatgaggacatcgagaagatggagggcaagaagctgcagctgggcatcgaggaggacctggccgagcccagcaagagccagaccaggaagcccaagtgtgggaagggcacccactgcagcagaaatgcctacatgctggtgtaccgcctgcagacccaggagaagcccaacaccaccgtgcaggtgcctgccttcctgcaggagctggtggaccgggacaacagcaagtttgaggagtggtgcatcgagatggccgagatgaggaagcagagcgtggacaagggcaaggccaagcatgaggaggtgaaggagctgtaccagaggctgcctgctggagctggcctgtag

SEQ ID NO: 20968 - DNA, 1119 bp, synthetic construct; identical to SEQ ID NO: 18969
  source 1..1119: mol_type = other DNA; note = Synthetic coding sequence

SEQ ID NO: 20969 - DNA, 1548 bp, synthetic construct
  source 1..1548: mol_type = other DNA; note = Synthetic coding sequence
atgtctgagggggagagccagacctctgtgagcccccctgtgaccagcaccaccagcgctgccagccctgaggaggaggaggagagtgaagatgaaagtgagatcctggaggagagcccctgtggccgctggcagaagagaagagaggaggtgaaccagagaaatgtgcccggcattgattctgcctacctggccatggacacagaggagggcgtggaggtggtgtggaatgaggtgcagttcagcgagaggaagaactacaagctgcaggaggagaaggtgcgggctgtgtttgacaacctgatccagctggagcacctgaacatcgtgaagttccacaagtactgggccgacatcaaggagaacaaggcccgggtcatcttcatcacagagtacatgagcagcggcagcctgaagcagttcctgaagaagaccaagaagaaccacaagaccatgaatgagaaggcctggaagcgctggtgcacccagatcctgagcgccctgagctacctgcacagctgtgacccccccatcatccacggcaacctgacctgtgacaccatcttcatccagcacaacggcctcatcaagattggctctgtggccccagacaccatcaacaaccacgtgaagacctgccgggaggagcagaagaacctgcacttctttgccccagaatatggagaggtgaccaacgtgaccacagctgtggacatctacagctttggcatgtgtgccctggagatggctgtgctggagatccagggcaatggagagagcagctatgtgccccaggaggccatcagcagcgccatccagctgctggaggaccccctgcagcgggagttcatccagaagtgcctgcagagcgagcccgcccggcggcccacagcccgggagctgctcttccacccagccctgtttgaggtgcccagcctgaagctgctggccgcccactgcatcgtgggccaccagcacatgatcccagaaaatgccctggaggagatcaccaagaacatggacaccagcgctgtgctggccgagatcccagctggccctggccgggagcctgtgcagaccctgtacagccagagccctgccctggagctggacaagttcctggaggatgtgagaaatggcatctaccccctgacagccttcggcctgccccggccccagcagccccagcaggaggaggtgaccagccctgtggtgccccccagcgtgaagacccccaccccagagcctgctgaggtggagaccaggaaggtggtgctgatgcagtgcaacattgaatctgtggaggagggcgtgaagcaccacctgaccctgctgctgaagctggaggacaagctgaacagacacctgagctgtgacctgatgcccaatgaaaacatccctgagctggccgctgagctggtgcagctgggcttcatcagcgaggccgaccagagccggctgaccagcctgctggaggagaccctgaacaagttcaactttgccaggaacagcaccctgaacagcgctgctgtgacagtgagcagctag

SEQ ID NO: 20970 - DNA, 435 bp, synthetic construct
  source 1..435: mol_type = other DNA; note = Synthetic coding sequence
atgagcagccccctggccagcctgagcaagaccaggaaggtgcccctgcccagcgagcccatgaaccctggaagaagaggcatccgcatctatggagatgaagatgaggtggacatgctgagtgatggctgcggcagcgaggagaagatctctgtgcccagctgctacggcggcattggagcccctgtgtcccggcaggtgcctgccagccatgattctgagctgatggccttcatgaccaggaagctgtgggacctggagcagcaggtgaaggcccagacagatgagatcctgagcaaggaccagaagattgctgccctggaggacctggtgcagaccctgcggccccaccctgctgaggccaccctgcagaggcaggaggagctggagaccatgtgtgtgcagctgcagaggcaggtgcgggagatggagtag

SEQ ID NO: 20971 - DNA, 1047 bp, synthetic construct
  source 1..1047: mol_type = other DNA; note = Synthetic coding sequence
atgcctgccccaccctgtgccagctgccacgccgcccgggccgccctgcggcggcccctgagcggccaggccctgtgtggggcctgcttctgtgccgcctttgaggccgaggtgctgcacacagtgctggccggccgcctgctgcccccaggagctgtggtggccgtgggcgccagcggcggcaaggacagcacagtgctggcccacgtgctgcgggccctggccccccggctgggcatcagcctgcagctggtggccgtggatgagggcattggaggctacagagatgctgccctggccgctgtgcggcggcaggccgcccgctgggagctgcccctgactgtggtggcctatgaggacctgtttggaggctggaccatggatgctgtggcccggagcacagctggcagcggccgcagccgcagctgctgcaccttctgtggggtgctgcggcggcgggccctggaggagggcgcccggcgggtgggcgccacccacatcgtgacaggccacaatgctgatgacatggccgagaccgtgctgatgaacttcctgcggggagatgctggccgcctggcccggggcggcggcctgggcagccctggagagggcggggccctgccccgctgccggcccctgcagtttgccagccagaaggaggtggtgctgtatgcccacttccggcggctggactacttcagcgaggagtgtgtgtatgcccctgaggccttccggggccacgcccgggacctgctgaagaggctggaggccgcccggcccagcgctgtgctggacctggtgcacagcgctgagcggctggccctggccccagctgcccggccccccaggcctggggcctgcagccgctgtggggccctggccagccgggccctgtgccaggcctgtgccctgctggatggcctgaacagaggccggccccggctggccatcggcaaaggaagaagaggcctggatgaggaggccaccccaggcacccctggggaccctgcccggcccccagccagcaaggctgtgcccaccttctag

SEQ ID NO: 20972 - DNA, 321 bp, synthetic construct
  source 1..321: mol_type = other DNA; note = Synthetic coding sequence
atgcctgaggaccaggtgggcaagctggaggccacagagaacaccatcagcgccatggctgctgctgctgctgagcagcagcagttctacctgctgctgggcaacctgctgagcccagacaacgtggtgaggaagcaggccgaggagacctatgagaacatccctggccagagcaagatcaccttcctgctgcaggccatccggaacaccacagctgctgaggaggcccggcagatggctgctgtgctgctgcggcggctgctgagcagcgcctttgatgaggtgtacccagccctgcccagtgatgtgcagacagcctag

SEQ ID NO: 20973 - DNA, 198 bp, synthetic construct
  source 1..198: mol_type = other DNA; note = Synthetic coding sequence
atggagctgcgctgtggcggcctgctcttcagcagcagatttgacagcggcaacctggcccacgtggagaaggtggagagcctgagcagtgatggagagggcgtgggcggcggggccagcgccctgaccagcggcatcgccagcagcccagactatgagttcaacgtgtggaccaggccagactgtgccgagacctag

SEQ ID NO: 20974 - DNA, 1371 bp, synthetic construct; identical to SEQ ID NO: 20778
  source 1..1371: mol_type = other DNA; note = Synthetic coding sequence

SEQ ID NO: 20975 - DNA, 1275 bp, synthetic construct
  source 1..1275: mol_type = other DNA; note = Synthetic coding sequence
atggaccagcccagcggccgctccttcatgcaggtgctgtgtgagaagtacagccctgagaacttcccctacagaagaggccctggcatgggcgtgcacgtgcctgccaccccccagggcagccccatgaaggaccggctgaacctgcccagcgtgctggtgctgaacagctgtggcatcacctgtgctggagatgagaaggagattgctgccttctgtgcccacgtgtctgagctggacctgagtgacaacaagctggaggactggcatgaggtgtccaagatcgtgtccaatgtgccccagctggagttcctgaacctgagcagcaaccccctgaacctgtctgtgctggagaggacctgtgccggcagcttcagcggcgtgaggaagctggtgctgaacaacagcaaggcctcctgggagaccgtgcacatgatcctgcaggagctgcctgacctggaggagctgttcctgtgcctgaatgactatgaaacagtgtcctgccccagcatctgctgccacagcctgaagctgctgcacatcacagacaacaacctgcaggactggacagagatcaggaagctgggcgtgatgttccccagcctggacaccctggtgctggccaacaaccacctgaatgccatcgaggagccagatgacagcctggcccggctcttccccaacctgcggagcatcagcctgcacaagagcggcctgcagagctgggaggacatcgacaagctgaacagcttccccaagctggaggaggtgcggctgctgggcatccccctgctgcagccctacaccacagaggagaggaggaagctggtgattgcccggctgcccagcgtgtccaagctgaatggatctgtggtgacagatggagagcgggaggacagcgagcgcttcttcatccgctactacgtggatgtgccccaggaggaggtgcccttccgctaccacgagctgatcaccaagtatggcaagctggagcccctggccgaggtggacctgcggccccagagcagcgccaaggtggaggtgcacttcaatgaccaggtggaggagatgagcatccggctggaccagacagtggccgagctgaagaagcagctgaagaccctggtgcagctgcccaccagcaacatgctgctgtactactttgaccacgaggcccccttcggccctgaggagatgaagtacagcagccgggccctgcacagctttggcatcagagatggagacaagatctacgtggagagcaagaccaagtag

SEQ ID NO: 20976 - DNA, 264 bp, synthetic construct
  source 1..264: mol_type = other DNA; note = Synthetic coding sequence
atgagcatcagcagtgatgaggtgaacttcctggtgtaccgctacctgcaggagagcggcttcagccacagcgccttcaccttcggcatcgagagccacatcagccagagcaacatcaacggggccctggtgcccccagctgccctgatcagcatcatccagaagggcctgcagtatgtggaggccgaggtgtccatcaatgaagatggcaccctgtttgatggccggcccatcgagagcctgagcctgattgatgctgtgtag

SEQ ID NO: 20977 - DNA, 360 bp, synthetic construct; identical to SEQ ID NO: 19124
  source 1..360: mol_type = other DNA; note = Synthetic coding sequence

SEQ ID NO: 20978 - DNA, 23907 bp, synthetic construct
  source 1..23907: mol_type = other DNA; note = Synthetic coding sequence
atggaccagccccagttcagcggggccccccgcttcctgacccggcccaaggcctttgtggtgtctgtgggcaaggatgccaccctgagctgccagatcgtgggcaaccccaccccccaggtgtcctgggagaaggaccagcagcctgtggccgccggggcccgcttccggctggcccaggatggagacctgtaccgcctgaccatcctggacctggccctgggggacagcggccagtatgtgtgccgggccagaaatgccatcggggaggcctttgctgctgtgggcctgcaggtggatgctgaggccgcctgtgccgagcaggccccccacttcctgctgcggcccaccagcatccgggtgcgggagggcagcgaggccaccttccgctgccgggtgggcggcagccccaggcctgctgtgtcctggagcaaggatggccggcggctgggggagccagatggcccccgggtgcgggtggaggagctgggggaggccagcgccctgcgcatccgggccgcccggcccagagatggcggcacctatgaggtgcgggcagagaaccccctgggcgccgccagcgctgctgctgccctggtggtggacagtgatgctgctgacacagccagccggcccggcaccagcacagctgccctgctggcccacctgcagaggcggcgggaggccatgagagctgagggcgccccagccagcccccccagcacaggcaccaggacctgcaccgtgacagagggcaagcacgcccggctgagctgctacgtgactggagagcccaagccagagaccgtgtggaagaaggatggccagctggtgacagagggccgccgccacgtggtgtatgaagatgcccaggagaactttgtgctgaagatcctcttctgcaagcagagcgaccggggcctgtacacctgcacagccagcaacctggtgggccagacctacagctctgtgctggtggtggtgcgggagcctgctgtgcccttcaagaagaggctgcaggacctggaggtgcgggagaaggagagcgccaccttcctgtgtgaggtgccccagcccagcacagaagctgcctggttcaaggaggagacccggctgtgggccagcgccaagtatggcatcgaggaggagggcacagaaagaaggctgactgtgagaaatgtgtctgcagatgatgatgctgtgtacatctgtgagaccccagagggcagcaggacagtggccgagctggccgtgcagggcaacctgctgaggaagctgcccaggaagacagctgtgcgggtgggggacacagccatgttctgtgtggagctggccgtgcctgtgggccctgtgcactggctgaggaaccaggaggaggtggtggccggcggccgggtggccatctctgctgagggcaccaggcacaccctgaccatcagccagtgctgcctggaggatgtgggccaggtggccttcatggccggggactgccagaccagcacccagttctgtgtgtctgcccccaggaagccacccctgcagccccctgtggaccctgtggtgaaggccaggatggagagcagcgtcatcctgtcctggagccccccaccccacggggagaggcctgtgaccattgatggctacctggtggagaagaagaagctgggcacctacacctggatccgctgccacgaggccgagtgggtggccaccccagagctgactgtggctgatgtggccgaggagggcaacttccagttccgggtgtctgccctgaacagctttggccagagcccctacctggagttccctggcaccgtgcacctggcccccaagctggccgtgaggacccccctgaaggctgtgcaggccgtggagggcggggaggtgaccttctctgtggacctgactgtggccagcgctggggagtggttcctggatggccaggccctgaaggccagctctgtgtatgagatccactgtgacaggaccaggcacaccctgaccatccgggaggtgcctgccagcctgcacggggcccagctgaagtttgtggccaatggaattgagagcagcatccgcatggaggtgcgggccgcccctggcctgacagccaacaagcccccagctgctgctgcccgggaggtgctggcccggctgcacgaggaggcccagctgctggccgagctgagtgaccaggccgctgctgtgacctggctgaaggatggccgcaccctgagccctggccccaagtatgaggtgcaggccagcgctggccggcgggtgctgctggtgagagatgtggccagagatgatgctggcctgtatgaatgtgtgtcccggggcggcagaattgcctaccagctgtctgtgcagggcctggcccgcttcctgcacaaggacatggccggcagctgtgtggatgctgtggccggcggccctgcccagtttgaatgtgagaccagcgaggcccacgtgcacgtgcactggtacaaggatggcatggagctgggccacagcggggagcgcttcctgcaggaggatgtgggcaccaggcaccggctggtggccgccaccgtgacccggcaggatgagggcacctacagctgccgggtgggggaggacagcgtggacttccggctgcgggtgtctgagcccaaggtggtgtttgccaaggagcagctggcccggaggaagctgcaggccgaggccggggccagcgccaccctgagctgtgaggtggcccaggcccagacagaggtgacctggtacaaggatggcaagaagctgagcagcagcagcaaggtgtgcatggaggccaccggctgcacccggcggctggtggtgcagcaggccggccaggctgatgctggggagtacagctgtgaggccggcggccagaggctgtccttccacctggatgtgaaggagcccaaggtggtgtttgccaaggaccaggtggcccacagcgaggtgcaggccgaggccggggccagcgccaccctgagctgtgaggtggcccaggcccagacagaggtgatgtggtacaaggatggcaagaagctgagcagcagcctgaaggtgcacgtggaggccaagggctgcagaagaaggctggtggtgcagcaggccggcaagacagatgctggggactacagctgtgaggcccggggccagagggtgtccttccggctgcacatcacagagcccaagatgatgtttgccaaggagcagagcgtgcacaatgaggtgcaggccgaggccggggccagcgccatgctgagctgtgaggtggcccaggcccagacagaggtgacctggtacaaggatggcaagaagctgagcagcagcagcaaggtgggcatggaggtgaagggctgcacccggcggctggtgctgccccaggccggcaaggcagatgctggggagtacagctgtgaggccggcggccagagggtgtccttccacctgcacatcacagagcccaagggcgtgtttgccaaggagcagagcgtgcacaatgaggtgcaggccgaggccggcaccacagccatgctgagctgtgaggtggcccagccccagacagaggtgacctggtacaaggatggcaagaagctgagcagcagcagcaaggtgaggatggaggtgaagggctgcacccggcggctggtggtgcagcaggtgggcaaggcagatgctggggagtacagctgtgaggccggcggccagagggtgtccttccagctgcacatcacagagcccaaggctgtgtttgccaaggagcagctggtgcacaatgaggtgaggacagaggccggggccagcgccaccctgagctgtgaggtggcccaggcccagacagaggtgacctggtacaaggatggcaagaagctgagcagcagcagcaaggtgcgcatcgaggccgccggctgcatgaggcagctggtggtgcagcaggccggccaggctgatgctggggagtacacctgtgaggccggcggccagaggctgtccttccacctggatgtgtctgagcccaaggctgtgtttgccaaggagcagctggcccacaggaaggtgcaggccgaggccggggccatcgccaccctgagctgtgaggtggcccaggcccagacagaggtgacctggtacaaggatggcaagaagctgagcagcagcagcaaggtgaggatggaggccgtgggctgcacccggcggctggtggtgcagcaggcctgccaggccgacacaggagagtacagctgtgaggccggcggccagaggctgtccttcagcctggatgtggccgagcccaaggtggtgtttgccaaggagcagcctgtgcaccgggaggtgcaggcccaggccggggccagcaccaccctgagctgtgaggtggcccaggcccagacagaggtgatgtggtacaaggatggcaagaagctgtccttcagcagcaaggtgaggatggaggccgtgggctgcacccggcggctggtggtgcagcaggccggccaggccgtggccggggagtacagctgtgaggccggcagccagaggctgtccttccacctgcacgtggccgagcccaaggctgtgtttgccaaggagcagcctgccagccgggaggtgcaggccgaggccggcaccagcgccaccctgagctgtgaggtggcccaggcccagacagaggtgacctggtacaaggatggcaagaagctgagcagcagcagcaaggtgaggatggaggccgtgggctgcacccggcggctggtggtgcaggaggccggccaggctgatgctggggagtacagctgcaaggccggggaccagaggctgtccttccacctgcacgtggccgagcccaaggtggtgtttgccaaggagcagcctgcccaccgggaggtgcaggccgaggccggggccagcgccaccctgagctgtgaggtggcccaggcccagacagaggtgacctggtacaaggatggcaagaagctgagcagcagcagcaaggtgcgggtggaggccgtgggctgcacccggcggctggtggtgcagcaggccggccaggccgaggccggggagtacagctgtgaggccggcggccagcagctgtccttccggctgcaggtggccgagctggagccccagatcagcgagcggccctgccggcgggagcccctggtggtgaaggagcacgaggacatcatcctgacagccaccctggccacccccagcgctgccaccgtgacctggctgaaggatggagtggagatccgccgcagcaagagacatgaaacagccagccagggcgacacccacaccctgactgtgcatggagcccaggtgctggacagcgccatctacagctgccgggtgggcgctgagggccaggacttccctgtgcaggtggaggaggtggccgccaagttctgccgcctgctggagcctgtgtgtggggagctgggcggcaccgtgaccctggcctgtgagctgagccctgcctgtgccgaggtggtgtggaggtgtggcaacacccagctgcgggtgggcaagcgcttccagatggtggccgagggccctgtgcgcagcctgactgtgctgggcctgcgggcagaagatgctggggagtatgtgtgtgagagcagagatgaccacaccagcgcccagctgactgtgtctgtgccccgggtggtgaagttcatgagcggcctgagcacagtggtggccgaggagggcggggaggccaccttccagtgtgtggtgagccccagtgatgtggccgtggtgtggttcagagatggagccctgctgcagcccagcgagaagtttgccatcagccagagcggggccagccacagcctgaccatcagtgacctggtgctggaggatgctggccagatcaccgtggaggccgagggcgccagcagcagcgctgccctgcgggtgcgggaggcccctgtgctcttcaagaagaagctggagccccagacagtggaggagaggagctctgtgaccctggaggtggagctgacccggccctggccagagctgcgctggaccagaaatgccacagccctggcccctgggaagaatgtggagatccatgctgagggcgcccggcaccggctggtgctgcacaacgtgggctttgctgaccggggcttcttcggctgtgagaccccagatgacaagacccaggccaagctgactgtggagatgaggcaggtgcggctggtgcggggcctgcaggccgtggaggcccgggagcagggcacagccaccatggaggtgcagctgagccatgctgatgtggatggctcctggaccagagatggcctgcgcttccagcagggccccacctgccacctggccgtgcggggccccatgcacaccctgaccctgagcggcctgcggccagaagattctggcctgatggtgttcaaggccgagggcgtgcacaccagcgcccggctggtggtgacagagctgcctgtgtccttcagccggcccctgcaggatgtggtgaccacagagaaggagaaggtgaccctggagtgtgagctgagccggcccaacgtggatgtgcgctggctgaaggatggagtggagctgcgggccggcaagaccatggccatcgccgcccagggcgcctgccgcagcctgaccatctaccgctgtgaatttgctgaccagggcgtgtatgtgtgtgatgcccatgatgcccagagcagcgcctctgtgaaggtgcagggccgcacctacaccctcatctaccgccgggtgctggctgaagatgctggggagatccagtttgtggctgaaaatgctgagagccgggcccagctgcgggtgaaggagctgcctgtgaccctggtgcggcccctgcgggacaagatcgccatggagaagcacagaggagtgctggagtgccaggtgtcccgggccagcgcccaggtgcgctggttcaagggcagccaggagctgcagcccggccccaagtatgagctggtgtctgatggcctgtacaggaagctgatcatcagtgatgtgcatgctgaagatgaggacacctacacctgtgatgctggagatgtgaagaccagcgcccagttctttgtggaggagcagagcatcaccatcgtgcggggcctgcaggatgtgacagtgatggagcccgccccagcctggtttgaatgtgagaccagcatccccagcgtgcggccccccaagtggctgctgggcaagacagtgctgcaggccggcggcaatgtgggcctggagcaggagggcaccgtgcaccggctgatgctgcggaggacctgcagcaccatgacaggccctgtgcacttcaccgtgggcaagagccgcagcagcgcccggctggtggtgtctgacatccctgtggtgctgacccggcccctggagcccaagacaggccgggagctgcagagcgtggtgctgagctgtgacttccggcctgcccccaaggctgtgcagtggtacaaggatgacacccccctgagccccagcgagaagttcaagatgagcctggagggccagatggccgagctgcgcatcctgcggctgatgccagcagatgctggggtgtaccgctgccaggccggcagcgcccacagcagcacagaggtgacagtggaggcccgggaggtgacagtgacaggccccctgcaggatgctgaggccacagaggagggctgggccagcttcagctgtgagctgagccatgaagatgaggaggtggagtggagcctgaatggcatgcccctgtacaatgacagcttccacgagatcagccacaagggccgccgccacaccctggtgctgaagagcatccagagagcagatgctggcatcgtgcgggccagcagcctgaaggtgtccaccagcgcccggctggaggtgcgggtgaagcctgtggtgttcctgaaggccctggatgacctgtctgctgaggagcggggcaccctggccctgcagtgtgaggtgtctgaccctgaggcccacgtggtgtggaggaaggatggagtgcagctgggccccagcgacaagtatgacttcctgcacacagctggcacccggggcctggtggtgcatgatgtgtccccagaagatgctggcctgtacacctgccacgtgggcagcgaggagacccgggcccgggtgcgggtgcatgacctgcacgtgggcatcaccaagaggctgaagaccatggaggtgctggagggggagagctgcagctttgaatgtgtgctgagccatgaaagtgccagtgaccctgccatgtggacagtgggcggcaagacagtgggcagcagcagccgcttccaggccacccggcagggcaggaagtacatcctggtggtgcgggaggccgcccccagtgatgctggggaggtggtgttttctgtgcggggcctgaccagcaaggccagcctgattgtgcgggagaggcctgctgccatcatcaagcccctggaggaccagtgggtggcccctggagaagatgtggagctgcgctgtgagctgagcagagctggcacccctgtgcactggctgaaggacaggaaggccatcaggaagagccagaagtatgatgtggtgtgtgagggcaccatggccatgctggtgatccggggggccagcctgaaggatgctggggagtacacctgtgaggtggaggccagcaagagcacagccagcctgcacgtggaggagaaggccaactgcttcacagaggagctgaccaacctgcaggtggaggagaagggcacagctgtgttcacctgcaagacagagcaccctgctgccaccgtgacctggaggaagggcctgctggagctgcgggccagcggcaagcaccagcccagccaggagggcctgaccctgcggctgaccatcagcgccctggagaaggctgacagcgacacctacacctgtgacatcggccaggcccagagccgggcccagctgctggtgcagggcagaagagtgcacatcatcgaggacctggaggatgtggatgtgcaggagggcagcagcgccaccttccgctgccgcatcagccctgccaactatgagcctgtgcactggttcctggacaagacccccctgcacgccaatgagctgaatgaaattgatgcccagcccggcggctaccacgtgctgaccctgcggcagctggccctgaaggacagcggcaccatctactttgaggccggggaccagagggccagcgctgccctgcgggtgacagagaagcccagcgtcttcagccgggagctgacagatgccaccatcacagaaggagaggacctgaccctggtgtgtgagaccagcacctgtgacatccctgtgtgctggaccaaggatggcaagaccctgcggggcagcgcccgctgccagctgagccatgagggccaccgggcccagctgctgatcactggagccaccctgcaggacagcggccgctacaagtgtgaggccggcggggcctgcagcagcagcatcgtgcgggtgcacgcccggcctgtgcgcttccaggaggccctgaaggacctggaggtgctggagggcggggccgccaccctgcgctgtgtgctgagctctgtggccgcccctgtgaagtggtgctacggcaacaacgtgctgcggcctggggacaagtacagcctgcggcaggagggcgccatgctggagctggtggtgaggaacctgcggccccaggacagcggccgctacagctgcagctttggagaccagaccaccagcgccaccctgactgtgacagccctgcctgcccagttcatcggcaagctgaggaacaaggaggccacagagggcgccacagccaccctgcgctgtgagctgagcaaggccgcccctgtggagtggaggaaaggaagtgagaccctgagagatggagaccgctactgcctgcggcaggatggagccatgtgtgagctgcagatccggggcctggccatggtggatgctgctgagtacagctgtgtgtgtggggaggagaggaccagcgccagcctgaccatccggcccatgcctgcccacttcatcggccgcctgcggcaccaggagagcattgagggcgccacagccaccctgcgctgtgagctgagcaaggccgcccctgtggagtggaggaagggccgggagagcctgagagatggagacagacacagcctgcggcaggatggagctgtgtgtgagctgcagatctgtggcctggccgtggctgatgctggggagtacagctgtgtgtgtggggaggagaggaccagcgccaccctgactgtgaaggccctgcctgccaagttcacagagggcctgagaaatgaggaggccgtggagggcgccacagccatgctgtggtgtgagctgagcaaggtggcccctgtggagtggaggaaaggacctgagaacctgagagatggagaccgctacatcctgcggcaggagggcacccgctgtgagctgcagatctgtggcctggccatggctgatgctggggagtacctgtgtgtgtgtggccaggagaggaccagcgccaccctgaccatccgggccctgcctgcccgcttcattgaagatgtgaagaaccaggaggcccgggagggcgccacagctgtgctgcagtgtgagctgaacagcgctgcccctgtggagtggaggaaaggaagtgagaccctgagagatggagaccgctacagcctgcggcaggacggcaccaagtgtgagctgcagatccggggcctggccatggctgacacaggagagtacagctgtgtgtgtggccaggagaggaccagcgccatgctgactgtgcgggccctgcccatcaagttcacagagggcctgagaaatgaggaggccacagagggcgccacagctgtgctgcgctgtgagctgagcaagatggcccctgtggagtggtggaagggccacgagaccctgagagatggagacagacacagcctgcggcaggatggagcccgctgtgagctgcagatccggggcctggtggctgaagatgctggggagtacctgtgcatgtgtgggaaggagaggaccagcgccatgctgactgtgcgggccatgcccagcaagttcatcgagggcctgagaaatgaggaggccacagaaggagacacagccaccctgtggtgtgagctgagcaaggccgcccctgtggagtggaggaaaggacatgagaccctgagagatggagacagacacagcctgcggcaggacggcagccgctgtgagctgcagatccggggcctggccgtggtggatgctggggagtacagctgtgtgtgtggccaggagaggaccagcgccaccctgactgtgcgggccctgcctgcccgcttcattgaagatgtgaagaaccaggaggcccgggagggcgccacagctgtgctgcagtgtgagctgagcaaggccgcccctgtggagtggaggaaaggaagtgagaccctgcggggcggggaccgctacagcctgcggcaggacggcacccgctgtgagctgcagatccacggcctgtctgtggccgacacaggagagtacagctgtgtgtgtggccaggagaggaccagcgccaccctgactgtgcgggccccccagcccgtcttccgggagcccctgcagagcctgcaggccgaggagggcagcacagccaccctgcagtgtgagctgtctgagcccacagccaccgtggtgtggagcaagggcggcctgcagctgcaggccaacggccggcgggagccccggctgcagggctgcacagctgagctggtgctgcaggacctgcagcgggaggacaccggggagtacacctgcacctgtggcagccaggccaccagcgccaccctgactgtgacagctgcccctgtgcgcttcctgcgggagctgcagcaccaggaggtggatgaaggaggaacagcccacctgtgctgtgagctgagcagagctggggcctctgtggagtggaggaagggcagcctgcagctgttcccctgtgccaagtaccagatggtgcaggatggagctgctgctgagctgctggtgcggggcgtggagcaggaggatgctggggactacacctgtgacaccggccacacccagagcatggccagcctgtctgtgcgggtgccccggcccaagttcaagacccggctgcagagcctggagcaggagactggagacatcgcccggctgtgctgccagctgagtgatgctgagagcggggctgtggtgcagtggctgaaggagggcgtggagctgcatgctggccccaagtatgagatgaggagccagggcgccacccgggagctgctgatccaccagctggaggccaaggacaccggggagtatgcctgtgtgactggaggccagaagacagctgccagcctgcgggtgacagagcctgaggtgaccatcgtgcggggcctggtggatgctgaggtgacagcagatgaagatgtggagttcagctgtgaggtgtccagagctggggccaccggggtgcagtggtgcctgcagggcctgcccctgcagagcaatgaggtgacagaggtggccgtgagagatggccgcatccacaccctgcggctgaagggcgtgaccccagaagatgctggcaccgtgtccttccacctgggcaaccacgccagcagcgcccagctgactgtgcgggcccctgaggtgaccatcctggagcccctgcaggatgtgcagctgtctgagggccaggatgccagcttccagtgccgcctgagccgggccagcggccaggaggcccgctgggccctgggcggcgtgcccctgcaggccaatgagatgaatgacatcaccgtggagcagggcaccctgcacctgctgaccctgcacaaggtgaccctggaggatgctggcaccgtgtccttccacgtgggcacctgcagcagcgaggcccagctgaaggtgacagccaagaacacagtggtgcggggcctggagaatgtggaggccctggagggcggggaggccctgtttgagtgccagctgagccagcctgaggtggccgcccacacctggctgctggatgatgagcctgtgcacaccagtgaaaatgctgaggtggtgttctttgaaaatggcctgcggcacctgctgctgctgaagaacctgcggccccaggacagctgccgggtgaccttcctggccggggacatggtgaccagcgccttcctgactgtgcggggctggaggctggagatcctggagcccctgaagaatgctgctgtgcgggccggggcccaggcctgcttcacctgcaccctgtctgaggccgtgcctgtgggggaggcctcctggtacatcaatggagctgctgtgcagccagatgacagcgactggacagtgacagcagatggcagccaccacgccctgctgctgcggagcgcccagccccaccacgccggggaggtgacctttgcctgcagagatgctgtggccagcgcccggctgactgtgctgggcctgcctgaccccccagaagatgctgaggtggtggcccggagcagccacacagtgaccctgtcctgggccgcccccatgtctgatggcggcggcggcctgtgtggctacagagtggaggtgaaggagggcgccaccggccagtggaggctgtgccacgagctggtgcccggcccagaatgtgtggtggatggcctggcccctggagagacctaccgcttccgggtggccgctgtgggccctgtgggcgctggggagcctgtgcacctgccccagacagtgcggctggccgagccccccaagcctgtgcccccccagcccagcgcccctgagagccggcaggtggccgctggagaagatgtgtccctggagctggaggtggtggccgaggccggggaggtgatctggcacaagggcatggagcgcatccagcccggcggccgctttgaggtggtgtcccagggccggcagcagatgctggtgatcaagggcttcaccgctgaggaccagggcgagtaccactgcggcctggcccagggcagcatctgcccagctgctgccaccttccaggtggccctgagccctgcctctgtggatgaggccccccagcccagcctgcccccagaggccgcccaggagggggacctgcacctgctgtgggaggccctggccaggaagaggaggatgagccgggagcccaccctggacagcatcagcgagctgcctgaggaggatggccgcagccagaggctgccccaggaggccgaggaggtggccccagacctgtctgagggctacagcacagcagatgagctggccaggactggagatgctgacctgagccacaccagcagtgatgatgagagcagagctggcacccccagcctggtgacctacctgaagaaggccggccggcccggcaccagccccctggccagcaaggtgggcgccccagctgcccccagcgtgaagccccagcagcagcaggagcccctggccgctgtgcggccccccctgggggacctgagcaccaaggacctgggggaccccagcatggacaaggctgctgtgaagatccaggccgccttcaagggctacaaggtgaggaaggagatgaagcagcaggagggccccatgttcagccacaccttcggggacacagaggcccaggtgggagatgccctgcggctggagtgtgtggtggccagcaaggcagatgtgcgggcccgctggctgaaggatggagtggagctgacagatggccgccaccaccacatcgaccagctgggagatggcacctgcagcctgctgatcaccggcctggacagagcagatgctggctgctacacctgccaggtgagcaacaagtttggccaggtgacccacagcgcctgtgtggtggtgtctggcagcgagagcgaggccgagagcagcagtggaggagagctggatgatgccttccggcgggccgcccggcggctgcacaggctcttccgcaccaagagccctgctgaggtgtctgatgaggagctgttcctgtctgcagatgagggccctgctgagcctgaggagcctgctgactggcagacctacagagaagatgagcacttcatctgcatccgctttgaggccctgacagaggcccggcaggccgtgacccgcttccaggagatgtttgccaccctgggcatcggcgtggagatcaagctggtggagcagggcccccggcgggtggagatgtgcatcagcaaggagaccccagcccctgtggtgcccccagagcccctgcccagcctgctgaccagtgatgctgcccctgtgttcctgacagagctgcagaaccaggaggtgcaggacggctaccctgtgtcctttgactgtgtggtgacaggccagcccatgcccagcgtgcgctggttcaaggatggcaagctgctggaggaggatgaccactacatgatcaatgaagaccagcagggcggccaccagctgatcatcacagctgtggtgcctgctgacatgggcgtgtaccgctgcctggccgagaacagcatgggcgtgagcagcaccaaggccgagctgcgggtggacctgaccagcacagattatgacacagctgctgatgccacagagagcagcagctacttcagcgcccagggctacctgagcagccgggagcaggagggcacagagagcaccacagatgagggccagctgccccaggtggtggaggagctgcgggacctgcaggtggcccctggcacccggctggccaagttccagctgaaggtgaagggctacccagccccccggctgtactggttcaaggatggccagcccctgacagccagcgcccacatccgcatgacagacaagaagatcctgcacaccctggagatcatctctgtgacccgggaggacagcggccagtatgctgcctacatcagcaatgccatgggcgccgcctacagcagcgcccggctgctggtgcggggcccagatgagcctgaggagaagccagccagtgatgtgcatgagcagctggtgccccccaggatgctggagcgcttcacccccaagaaggtgaagaagggcagcagcatcaccttctctgtgaaggtggagggccggcctgtgcccaccgtgcactggctgcgggaggaggccgagcggggcgtgctgtggattggccctgacaccccaggctacacagtggccagcagcgcccagcagcacagcctggtgctgctggatgtgggccggcagcaccagggcacctacacctgcatcgccagcaatgctgctggccaggccctgtgcagcgccagcctgcacgtgtctggcctgcccaaggtggaggagcaggagaaggtgaaggaggccctgatcagcaccttcctgcagggcaccacccaggccatcagcgcccagggcctggagacagccagctttgctgacctgggcggccagaggaaggaggagcccctggccgccaaggaggccctgggccacctgagcctggccgaggtgggcacagaggagttcctgcagaagctgaccagccagatcacagagatggtgtctgccaagatcacccaggccaagctgcaggtgcctggaggagacagtgatgaggacagcaagaccccatctgccagccccaggcatggccgcagccggcccagcagcagcatccaggagagcagcagcgagagtgaagatggagatgcccggggggagatctttgacatctacgtggtgacagctgactacctgcccctgggcgctgagcaggatgccatcaccctgcgggagggccagtatgtggaggtgctggatgctgcccaccccctgcgctggctggtgaggaccaagcccaccaagagcagccccagccggcagggctgggtgtccccagcctacctggaccggcggctgaagctgagccctgagtggggcgctgctgaggcccctgagttccctggagaggccgtgtctgaagatgagtacaaggcccggctgagcagcgtcatccaggagctgctgagcagcgagcaggcctttgtggaggagctgcagttcctgcagagccaccacctgcagcacctggagcgctgcccccacgtgcccatcgctgtggccggccagaaggccgtcatcttcagaaatgtgcgggacatcggccgcttccacagcagcttcctgcaggagctgcagcagtgtgacacagatgatgatgtggccatgtgcttcatcaagaaccaggccgcctttgagcagtacctggagttcctggtgggccgggtgcaggccgagagcgtggtggtgtccacagccatccaggagttctacaagaagtatgcagaggaggccctgctggccggggaccccagccagcccccacctccacccctgcagcactacctggagcagcctgtggagcgggtgcagcgctaccaggccctgctgaaggagctgatccggaacaaggccaggaaccggcagaactgtgccctgctggagcaggcctatgctgtggtgtctgccctgccccagagagctgagaacaagctgcacgtgtccctgatggagaactacccaggcaccctgcaggccctgggggagcccatccggcagggccacttcatcgtgtgggagggcgcccctggggccaggatgccctggaagggccacaacagacatgtgttcctgttcaggaaccacctggtgatctgcaagccccggcgggacagcaggacagacacagtgtcctatgtgttcaggaacatgatgaagctgagcagcattgacctgaatgaccaggtggagggagatgaccgggcctttgaggtgtggcaggagcgggaggacagcgtgaggaagtacctgctgcaggccaggacagccatcatcaagagctcctgggtgaaggagatctgtggcatccagcagaggctggccctgcctgtgtggaggcccccagactttgaggaggagctggccgactgcacagctgagctgggggagaccgtgaagctggcctgccgggtgacaggcacccccaagcctgtgatctcctggtacaaggatggcaaggctgtgcaggtggacccccaccacatcctgattgaggaccctgatggcagctgtgccctgatcctggacagcctgactggagtggacagcggccagtacatgtgctttgctgccagcgctgctggcaactgcagcaccctgggcaagatcctggtgcaggtgcccccaagatttgtgaacaaggtgcgggccagcccctttgtggagggagaagatgcccagttcacctgcaccattgaaggagccccctacccccagatccgctggtacaaggatggagccctgctgaccaccggcaacaagttccagaccctgtctgagcccaggagcggcctgctggtgctggtgatccgggccgccagcaaagaagacctgggcctgtatgaatgtgagctggtgaaccggctgggcagcgcccgggccagcgctgagctgcgcatccagagccccatgctgcaggcccaggagcagtgccaccgggagcagctggtggccgctgtggaggacaccaccctggagagagctgaccaggaggtgacctctgtgctgaagaggctgctgggccccaaggcccctggccccagcactggagacctgaccggccctggcccctgccccaggggggccccagccctgcaggagaccggcagccagccccctgtgacaggcaccagcgaggccccagctgtgcccccccgggtgccccagcccctgctgcacgagggccctgagcaggagcctgaggccatcgcccgggcccaggagtggacagtgcccatccgcatggagggcgccgcctggccaggggccggcaccggggagctgctgtgggatgtgcacagccacgtggtgcgggagaccacccagaggacctacacctaccaggccatcgacacccacacagcccggccccccagcatgcaggtgaccattgaagatgtgcaggcccagacaggaggaacagcccagtttgaggccatcatcgagggggacccccagcccagcgtgacctggtacaaggacagcgtgcagctggtggacagcacccggctgagccagcagcaggagggcaccacctacagcctggtgctgcggcacgtggccagcaaggatgctggggtgtacacctgcctggcccagaacacaggaggccaggtgctgtgcaaggccgagctgctggtgctgggcggggacaatgaaccagattctgagaagcagagccacaggaggaagctgcacagcttctatgaggtgaaggaggagatcggccggggcgtgtttggatttgtgaagagggtgcagcacaagggcaacaagatcctgtgtgccgccaagttcatccccctgcggagcaggacccgggcccaggcctaccgggagcgggacatcctggccgccctgagccaccccctggtgacaggcctgctggaccagtttgagaccaggaagaccctcatcctgatcctggagctgtgcagcagcgaggagctgctggaccggctgtacaggaagggcgtggtgacagaggccgaggtgaaggtgtacatccagcagctggtggagggcctgcactacctgcacagccatggagtgctgcacctggacatcaagcccagcaacatcctgatggtgcacccagcccgggaggacatcaagatctgtgactttggatttgcccagaacatcaccccagctgagctgcagttcagccagtatggcagccctgagtttgtgtccccagagatcatccagcagaaccctgtgtctgaggccagtgacatctgggccatgggcgtcatctcctacctgagcctgacctgcagcagcccctttgctggggagagtgaccgggccaccctgctgaatgtgctggagggccgggtgtcctggagcagccccatggccgcccacctgtctgaagatgccaaggacttcatcaaggccaccctgcagagggccccccaggcccggcccagcgctgcccagtgcctgagccacccctggttcctgaagtccatgcctgctgaggaggcccacttcatcaacaccaagcagctgaagttcctgctggcccggagccgctggcagaggagcctgatgagctacaagagcatcctggtgatgaggagcatccctgagctgctgcggggccccccagacagccccagcctgggcgtggcccggcacctgtgccgggacaccggcggcagcagcagcagcagcagcagcagtgacaatgagctggccccctttgcccgggccaagagcctgccccccagccctgtgacccacagccccctgctgcacccccggggcttcctgcggcccagcgccagcctgcctgaggaggccgaggccagcgagaggagcacagaggccccagcccccccagccagccctgagggcgccggccccccagctgcccagggctgtgtgcccaggcacagcgtcatccgcagcctcttctaccaccaggccggggagagccctgagcacggggccctggcccctggcagccgccgccacccagcccggcggcggcacctgctgaagggcggctacatcgccggggccctgcccggcctgcgggagcccctgatggagcaccgggtgctggaggaggaggccgcccgggaggagcaggccaccctgctggccaaggcccccagctttgaaacagccctgcggctgcctgccagcggcacccacctggcccctggccacagccacagcctggagcatgacagccccagcaccccccggcccagcagcgaggcctgtggggaggcccagaggctgcccagcgcccccagcggcggggcccccatccgggacatgggccacccccagggcagcaagcagctgcccagcactggaggccaccctggaacagcccagcctgagcggcccagcccagacagcccctggggccagcctgcccccttctgccaccccaagcagggcagcgccccccaggagggctgcagcccccaccctgctgtggccccctgccccccaggcagcttccccccaggcagctgcaaggaggcccccctggtgcccagcagccccttcctgggccagccccaggcccccccagccccagccaaggccagcccccccctggacagcaagatgggccctggggacatcagcctgcccggccggcccaagccaggcccctgcagcagccctggcagcgccagccaggccagcagcagccaggtgagcagcctgcgggtgggcagcagccaggtgggcacagagcccggccccagcctggatgctgagggctggacccaggaggccgaggacctgagtgacagcacccccaccctgcagaggccccaggagcaggccaccatgaggaagttcagcctgggcggccggggcggctacgccggcgtggccggctacggcacctttgcctttggaggagatgctgggggcatgctgggccagggccccatgtgggccagaattgcctgggccgtgtcccagagcgaggaggaggagcaggaggaggcccgggcagagagccagagcgaggagcagcaggaggcccgggcagagagccccctgccccaggtgtctgcccggcctgtgcctgaggtgggccgggcccccaccaggagcagccctgagcccaccccctgggaggacatcggccaggtgtccctggtgcagatccgggacctgtctggagatgctgaggccgctgacaccatcagcctggacatcagcgaggtggaccctgcctacctgaacctgagtgacctgtatgacatcaagtacctgccctttgagttcatgatcttcaggaaggtgcccaagagcgcccagcctgagccccccagccccatggccgaggaggagctggccgagttccctgagcccacctggccctggccaggagagctgggcccccatgctggcctggagatcacagaggagagtgaagatgtggatgccctgctggccgaggccgctgtgggcaggaagaggaagtggagcagccccagccgcagcctcttccacttccctggccgccacctgcccctggatgagcctgctgagctgggcctgcgggagcgggtgaaggcctctgtggagcacatcagccgcatcctgaagggccggcctgagggcctggagaaggagggcccccccaggaagaagccaggcctggccagcttccggctgagcggcctgaagtcctgggaccgggcccccaccttcctgcgggagctgagtgatgaaacagtggtgctgggccagagcgtgaccctggcctgccaggtgtctgcccagcctgctgcccaggccacctggagcaaggatggagcccccctggagagcagcagccgggtgctgatcagcgccaccctgaagaacttccagctgctgaccatcctggtggtggtggccgaggacctgggcgtgtacacctgcagcgtgtccaatgccctgggcaccgtgaccaccaccggggtgctgaggaaggccgagcggcccagcagcagcccctgcccagacattggagaggtgtatgcagatggagtgctgctggtgtggaagcctgtggagagctatggccctgtgacctacatcgtgcagtgcagcctggagggcggctcctggaccaccctggccagtgacatctttgactgctgctacctgaccagcaagctgagcagaggaggcacctacaccttcagaacagcctgtgtgtccaaggccggcatgggcccctacagcagccccagcgagcaggtgctgctgggcggccccagccacctggccagcgaggaggagagccagggccgcagcgcccagcccctgcccagcaccaagacctttgccttccagacccagatccagaggggccgcttctctgtggtgcggcagtgctgggagaaggccagcggccgggccctggccgccaagatcatcccctaccaccccaaggacaagacagctgtgctgcgggagtatgaggccctgaagggcctgcggcacccccacctggcccagctgcatgctgcctacctgagccccaggcacctggtgctgatcctggagctgtgcagcggccctgagctgctgccctgcctggccgagcgggccagctacagcgagagcgaggtgaaggactacctgtggcagatgctgagcgccacccagtacctgcacaaccagcacatcctgcacctggacctgcggtctgagaacatgatcatcacagagtacaacctgctgaaggtggtggacctgggcaatgcccagagcctgagccaggagaaggtgctgcccagcgacaagttcaaggactacctggagaccatggcccctgagctgctggagggccagggcgctgtgccccagacagacatctgggccatcggcgtgacagccttcatcatgctgtctgctgagtaccctgtgtcctctgagggcgcccgggacctgcagaggggcctgaggaagggcctggtgcggctgagccgctgctacgccggcctgagcggcggcgctgtggccttcctgcggagcaccctgtgtgcccagccctggggccggccctgtgccagcagctgcctgcagtgcccctggctgacagaggagggccctgcctgcagcaggcctgcccctgtgaccttccccacagcccggctgcgggtgtttgtgaggaaccgggagaagaggcgggccctgctgtacaagaggcacaacctggcccaggtgaggtag

SEQ ID NO: 20979 - DNA, 750 bp, synthetic construct
  source 1..750: mol_type = other DNA; note = Synthetic coding sequence
atgacagaggacagccagaggaacttccgctctgtgtactatgagaaggtgggcttccggggcgtggaggagaagaagagcctggagatcctgctgaaggatgaccggctggacacagagaagctgtgcaccttcagccagcgcttccccctgcccagcatgtaccgggccctggtgtggaaggtgctgctgggcatcctgcccccccaccacgagagccacgccaaggtgatgatgtacaggaaggagcagtacctggatgtgctgcacgccctgaaggtggtgcgctttgtgtctgatgccaccccccaggccgaggtgtacctgaggatgtaccagctggagagcggcaagctgcccaggagccccagcttccccctggagccagatgatgaggtgttcctggccatcgccaaggccatggaggagatggtggaggacagcgtggactgctactggatcaccaggagatttgtgaaccagctgaacaccaagtacagagacagcctgccccagctgcccaaggcctttgagcagtacctgaacctggaggatggccgcctgctgacccacctgaggatgtgcagcgctgcccccaagctgccctatgacctgtggttcaagcgctgctttgctggctgcctgcctgagagcagcctgcagagggtgtgggacaaggtggtgtctggcagctgcaagatcctggtgtttgtggccgtggagatcctgctgaccttcaagatcaagtag

SEQ ID NO: 20980 - DNA, 417 bp, synthetic construct
  source 1..417: mol_type = other DNA; note = Synthetic coding sequence
atgagcagcctgggcgccagctttgtgcagatcaagtttgatgacctgcagttctttgagaactgtggcggcggcagctttggatctgtgtaccgggccaagtggatcagccaggacaaggaggtggccgtgaagaagctgctgaagattgagaaggaggccgagatcctgtctgtgctgagccacaggaacatcatccagttctatggagtcatcctggagccccccaactacggcatcgtgacagaatatgccagcctgggcagcctgtatgactacatcaacagcaacagaagtgaggagatggacatggaccacatcatgacctgggccacagatgtggccaagggcatgcactacctgcacatggaggcccctgtgaaggtgatccaccgggacctgaagagcagaaattag

SEQ ID NO: 20981 - DNA, 1122 bp, synthetic construct
  source 1..1122: mol_type = other DNA; note = Synthetic coding sequence
atggccagcagctctgtgcccccagccaccgtgtctgctgccacagctggccctggccctggcttcggctttgccagcaagaccaagaagaagcactttgtgcagcagaaggtgaaggtgttccgggctgctgaccccctggtgggcgtcttcctgtggggcgtggcccacagcatcaatgagctgagccaggtgcccccacctgtgatgctgctgcctgatgacttcaaggccagcagcaagatcaaggtgaacaaccacctgttccaccgggagaacctgcccagccacttcaagttcaaggagtactgcccccaggtgttcaggaacctgcgggacagatttggaattgatgaccaggactacctgtacatcgtgaagtgccacggcaacaccctgctgccccagttcctgggcatgtacagagtgtctgtggacaatgaagacagctacatgctggtgatgaggaacatgttcagccaccggctgcctgtgcacaggaaatatgacctgaagggcagcctggtgtcccgggaggccagtgacaaggagaaggtgaaggagctgcccaccctgaaggacatggacttcctgaacaagaaccagaaggtgtacatcggggaggaggagaagaagatcttcctggagaagctgaagagagatgtggagttcctggtgcagctgaagatcatggactacagcctgctgctgggcatccatgacatcatccggggcagcgagcctgaggaggaggcccctgtgcgggaggatgaaagtgaggtggatggagactgcagcctgaccggccccccagccctggtgggcagctatggcaccagccctgagggcatcggcggctacatccacagccaccggcccctgggccctggagaatttgagagcttcattgatgtgtatgccatccgctctgctgagggcgccccccagaaggaggtgtacttcatgggcctgattgacatcctgacccagtatgatgccaagaagaaggccgcccacgccgccaagacagtgaagcacggggccggggctgagatcagcacagtgcaccctgagcagtatgccaagcgcttcctggacttcatcaccaacatctttgcctag

SEQ ID NO: 20982 - DNA, 549 bp, synthetic construct
  source 1..549: mol_type = other DNA; note = Synthetic coding sequence
atggaggagatcccagcccaggaggccgccggcagcccccgggtgcagttccagagcctggagacccagagtgaatgtctgagccctgagccccagtttgtgcaggacacagacatggagcagggcctgaccggcggcttccccatcagcaagccagatggcatcagccagctggagcaggacctgcaggtgtttgacctggagaccaagacccgggaggtgctgagagatgactgcagtgatggagagacccgggaggagaacaagctgctgatccccaagcagaagatcagcgaggaggtgcacagctacaaggtgcgggtgggccgcctgaagcatgacatcacccaggtgcctgagacccgggaggtgtacaagtctgaggaccggctggagcggctgcaggagatcctgaggaagttcctgtacctggagcgggagttccggcagatcaccatcagcaaggagaccttcaccagcgagaagaacaatgaatgtcatgagcctgagaagagcttcagcctggacagcaccattgatgctgactag

SEQ ID NO: 20983 - DNA, 2253 bp, synthetic construct
  source 1..2253: mol_type = other DNA; note = Synthetic coding sequence
atgagcctgggcaaggcctatggagtggagagccacgtgctgagccctgctgagaccaagaccctgtaccccctgatgaatgtggatgacctgtatggcaccctgtatgtgccccatgatggcaccatggaccctgctggcacctgcaccaccctggcccgggccgccagcgcccggggggcccaggtgattgagaactgccctgtgacaggcatccgggtgtggacagatgactttggagtgcggcgggtggccggcgtggagacccagcacggcagcatccagaccccctgtgtggtgaactgtgccggcgtgtgggccagcgctgtgggccgcatggccggcgtgaaggtgcccctggtggccatgcaccacgcctacgtggtgacagaaagaattgagggcatccagaacatgcccaacgtgcgggaccatgatgcctctgtgtacctgcggctgcagggagatgccctgtctgtgggcggctatgaggccaaccccatcttctgggaggaggtgtctgacaagtttgccttcggcctgtttgacctggactgggaggtgttcacccagcacattgaaggagccatcaacagagtgcctgtgctggagaagacaggcatcaagagcacagtgtgtggccctgagagcttcaccccagaccacaagcccctgatgggagaggcccctgagctgcggggcttcttcctgggctgcggcttcaacagcgctggcatgatgctgggcggcggctgcggccaggagctggcccactggatcatccacggccggcctgagaaggacatgcacggctatgacatccgccgcttccaccacagcctgacagaccacccccgctggatccgggagaggagccatgagagctatgccaagaactacagcgtggtgttcccccatgatgagcccctggccggcaggaacatgaggcgggaccccctgcacgaggagctgctgggccagggctgtgtgttccaggagagacatggctgggagcggcccggctggttccacccccggggccctgcccctgtgctggagtatgactactatggagcctacggcagccgggcccacgaggactatgcctacagaaggctgctggctgatgagtacacctttgccttccccccccaccacgacaccatcaagaaggagtgcctggcctgcagaggagctgctgctgtgtttgacatgagctactttgggaagttctacctggtgggcctggatgccaggaaggctgctgactggctgttcagcgcagatgtgtccaggcctcctggcagcacagtgtacacctgcatgctgaaccacagaggaggaacagaaagtgacctgactgtgtcccggctggcccccagccaccaggccagccccctggccccagcctttgaaggagatggctactacctggccatgggcggcgctgtggcccagcacaactggagccacatcaccaccgtgctgcaggaccagaagagccagtgccagctgattgacagcagcgaggacctgggcatgatcagcatccagggccctgccagccgggccatcctgcaggaggtgctggatgctgacctgagcaatgaggccttccccttcagcacccacaagctgctgcgggccgccggccacctggtgcgggccatgaggctgagctttgtgggggagctgggctgggagctgcacatccccaaggccagctgtgtgcctgtgtacagagctgtgatggccgccggggccaagcacggcctcatcaatgccggctaccgggccatcgacagcctgagcattgagaagggctaccgccactggcacgccgacctgcggccagatgacagccccctggaggccggcctggccttcacctgcaagctgaagagccctgtgcccttcctgggccgggaggccctggagcagcagagagctgctggcctgcggcggcggctggtgtgcttcaccatggaggacaaggtgcccatgtttggcctggaggccatctggagaaatggccaggtggtgggccacgtgagaagagctgactttggatttgccatcgacaagaccatcgcctacggctacatccatgaccccagcggcggccctgtgtccctggactttgtgaagagcggggactatgccctggagaggatgggcgtgacctatggagcccaggcccacctgaagagcccctttgaccccaacaacaagagggtgaagggcatctactag

SEQ ID NO: 20984 - DNA, 459 bp, synthetic construct; identical to SEQ ID NO: 20899
  source 1..459: mol_type = other DNA; note = Synthetic coding sequence

SEQ ID NO: 20985 - DNA, 1620 bp, synthetic construct; identical to SEQ ID NO: 19050
  source 1..1620: mol_type = other DNA; note = Synthetic coding sequence

SEQ ID NO: 20986 - DNA, 1266 bp, synthetic construct
  source 1..1266: mol_type = other DNA; note = Synthetic coding sequence
atgatggaggacaacaagcagctggccctgagaattgatggagctgtgcagagcgccagccaggaggtgaccaacctgcgggcagagctgacagccaccaacagaaggctggccgagctgagcggcggcggcggccctggccctggccctggagctgctgccagcgccagcgctgctggggacagcgctgccaccaacatggagaacccccagctgggcgcccaggtgctgctgcgggaggaggtgtcccggctgcaggaggaggtgcacctgctgcggcagatgaaggagatgctggccaaggacctggaggagagccagggcggcaagagcagcgaggtgctgagcgccacagagctgcgggtgcagctggcccagaaggagcaggagctggcccgggccaaggaggccctgcaggccatgaaggctgacaggaagaggctgaagggggagaagacagacctggtgtcccagatgcagcagctgtatgccaccctggagagccgggaggagcagctgcgggacttcatccggaactatgagcagcacaggaaggagagtgaagatgctgtgaaggccctggccaaggagaaggacctgctggagcgggagaagtgggagctgcggcggcaggccaaggaggccacagaccacgccacagccctgcggagccagctggacctgaaggacaacaggatgaaggagctggaggccgagctggccatggccaagcagagcctggccaccctgaccaaggatgtgcccaagaggcacagcctggccatgcctggagagaccgtgctgaatggaaaccaggagtgggtggtgcaggccgacctgcccctgacagctgccatccggcagagccagcagaccctgtaccacagccaccccccccaccctgctgaccggcaggccgtgcgggtgagcccctgccacagccggcagcccagcgtcatcagtgatgccagcgctgctgagggggacaggagcagcacccccagcgacatcaacagccccaggcacaggacccacagcctgtgcaatggagacagccctggccctgtgcagaagaacctgcacaaccccatcgtgcagagcctggaggacctggaggaccagaagaggaagaagaagaaggagaagatgggcttcggcagcatcagccgggtgtttgcccggggcaagcagaggaagagcctggaccccggcctgtttgatggaacagccccagactactacattgaagaagatgctgactggtag

SEQ ID NO: 20987 - DNA, 492 bp, synthetic construct
  source 1..492: mol_type = other DNA; note = Synthetic coding sequence
atggtgggcggcggcggcgtgggcggcggcctgctggagaatgccaaccccctcatctaccagaggtctggagagaggcctgtgacagctggggaggaggatgagcaggtgcctgacagcattgatgcccgggagatctttgacctgatccgcagcatcaatgaccctgagcaccccctgaccctggaggagctgaatgtggtggagcaggtgcgggtgcaggtgtctgaccctgagagcacagtggccgtggccttcacccccaccatcccccactgcagcatggccaccctgattggcctgagcatcaaggtgaagctgctgcggagcctgccccagcgcttcaagatggatgtgcacatcaccccaggcacccacgccagcgagcacgctgtgaacaagcagctggccgacaaggagcgggtggccgccgccctggagaacacccacctgctggaggtggtgaaccagtgcctgagcgcccggagctag

SEQ ID NO: 20988 - DNA, 207 bp, synthetic construct
  source 1..207: mol_type = other DNA; note = Synthetic coding sequence
atgagcatcagcagtgatgaggtgaacttcctggtgtaccgctacctgcaggagagcggcttcagccacagcgccttcaccttcggcatcgagagccacatcagccagagcaacatcaacggggccctggtgcccccagctgccctgatcagcatcatccagaagggcctgcagtatgtggaggccgaggtgtccatcaatgaatag

SEQ ID NO: 20989 - DNA, 534 bp, synthetic construct
  source 1..534: mol_type = other DNA; note = Synthetic coding sequence
atgagcagcaatgaatgcttcaagtgtggccgcagcggccactgggcccgggagtgccccactggaggcggccggggccggggcatgaggagccggggccggggcggcttcaccagtgaccggggcttccagtttgtgagcagcagcctgcctgacatctgctaccgctgtggggagagcggccacctggccaaggactgtgacctgcaggaggatgcctgctacaactgtggccggggcggccacatcgccaaggactgcaaggagcccaagcgggagcgggagcagtgctgctacaactgtgggaagccaggccacctggcccgggactgtgaccacgcagatgagcagaagtgctacagctgtggggagtttggccacatccagaaggactgcaccaaggtgaagtgctaccgctgtggggagactggacatgtggccatcaactgcagcaagaccagcgaggtgaactgctaccgctgtggggagagcggccacctggcccgggagtgcaccatcgaggccacagcctag

SEQ ID NO: 20990 - DNA, 429 bp, synthetic construct
  source 1..429: mol_type = other DNA; note = Synthetic coding sequence
atgacccagctgcggcaggtgctggagagccggctgcagaggcccctgcctgaggacctggcccggctgtggcctgtggtgatcctgtgccagctggccaaccagctgcggcccaggtctgtgcccttcatccacgtgcccagccctgctgtgcccaagctgagcgccctgaaggccaggaagaatgtggagagcttcctggaggcctgcaggaagatgggcgtgcctgaggccgacctgtgcagccccagcgacctgctgcagggcacagcccggggcctgaggacagccctggaggccgtgaagagggtgggcggcaaggccctgccccccctgtggccacccagcggcctgggcggctttgtggtgttctacgtggtgctgatgctgctgctgtatgtgacctacacccggctgctgggcagctag

SEQ ID NO: 20991 - DNA, 1296 bp, synthetic construct
  source 1..1296: mol_type = other DNA; note = Synthetic coding sequence
atggaggacctgaagggccccaccgtgtcctccttcctgagcggcatgaagacagagctgtacccaggagtgacagccatcgacatgatgtacaaggagggcctgcacggcgtggacaatggcatcctgatctttgacaaggtgcgcatcccccgggagaacctgctggacaagtttggatctgtggccccagatggccagtaccacagccccatccggaacaagagcgcccgcttcaatgccatgctggccgccctgacccccagccggctggccgtggccttccaggccatgggcgccatgaagctgggcctgaccatcgccatccgctacagccacagccggcggcagtttggccccaagaccaaggaggaggtgaagatcatcgagcaccagacccagaccctgcggctgatgccccacctggccacagccctggccctgacctttgtgagccgctatgctggggccctgctggatgaagatgtgttccagggcaaggagctggtgaacagccgcagcctgcaggccctggtggccggcctgaaggcctacagcacctgggagaacatccgctgcctgcaggactgcagagaatgtactggaggcatggtggtgggccgggagctgctggcccagtacaccaagcagtatgaggagaagcccctgtttggcctgctgcagaactgggccgagagcgtgggggacaagctgcggaccagcttcctggccttcaacatggacacagtggatgacctggccttcctgctgaaggctgtgaagttccgggagcgggtgctgcagaggggcctggtggcccgcatctactacaaggtgaagaccaagaaggaggacttcttccacgcctggaacagctgcctgcaccacgtggccagcctgagcctggcccacacccaccgggtgaccctggagcagttcagcctggccgtgaagagctgcccagaccaggaggaccagaccctgctgatgaagttctgcctgctgtatggcaccaagctggtgttccaggagcgggcctggtacctggagcacaagtacctgacccccatggccagcacccgcatccggaaccagctgctggacctgtgtgacagcgtgaaggatgatgcccggcgggtcatcagcaccttcaacatcccccacacctacctgcacgcccccatcgccggcatcagcaaccccagggctgcctgggccttctacccagcccccctgcagccccggccccgggaggaggcccggagcagaagacccaagctgggcgccaagctgtag

SEQ ID NO: 20992 - DNA, 1443 bp, synthetic construct
  source 1..1443: mol_type = other DNA; note = Synthetic coding sequence
atggccgagctgcagatgctgctggaggaggagatccctgggggccggcgggccctgtttgacagctacaccaacctggagcgggtggccgactactgtgagaacaactacatccagagcgctgacaagcagagggccctggaggagaccaaggcctacaccacccagagcctggcctctgtggcctacctgatcaacaccctggccaacaacgtgctgcagatgctggacatccaggccagccagctgcggaggatggagagcagcatcaaccacatcagccagacagtggacatccacaaggagaaggtggcccggcgggagatcggcatcctgaccaccaacaagaacaccagcaggacccacaagatcatcgccccagccaacctggagaggcctgtgcgctacatcaggaagcccatcgactacaccatcctggatgacattggacatggagtgaagtggctgctgcgcttcaaggtgtccacccagaacatgaagatgggcggcctgcccaggaccaccccacccacccagaagccacccagcccccccatgtctgggaagggcaccctgggccgccacagcccctaccgcaccctggagcctgtgcggccccctgtggtgcccaatgactatgtgcccagccccaccaggaacatggcccccagccagcagagccctgtgaggacagcctctgtgaaccagaggaacagaacctacagcagcagcggcagcagcggcggcagccaccccagcagccgcagcagcagccgggagaacagcggcagcggctctgtgggcgtgcccatcgctgtgcccacccccagcccccccagcgtcttcccagatgctgctgctggaggagcccagaccctggctgatggcttcaccagccccaccccacctgtggtgagcagcaccccacccaccggccaccctgtgcagttctacagcatgaacagacctgccagccgccacaccccacccaccatcggcggcagcctgccctacagaagacctccttccatcaccagccagaccagcctgcagaaccagatgaatggaggccccttctacagccagaaccctgtgtctgacaccccacctcctcctcctcctgtggaggagcctgtgtttgatgagagccccccacctcctcctcctccagaagattatgaggaggaggaggccgctgtggtggagtacagcgacccctatgcagaggaggaccccccctgggcccccaggagctacctggagaaggtggtggccatctatgactacaccaaggacaaggaggatgagctgtccttccaggagggcgccatcatctacgtgatcaagaagaatgatgatggctggtatgagggcgtgatgaatggagtgacaggcctcttccctggcaactacgtggagagcatcatgcactacagcgagtag

SEQ ID NO: 20993 - DNA, 3102 bp, synthetic construct
  source 1..3102: mol_type = other DNA; note = Synthetic coding sequence
atggatgaggaggagaaccactacgtgtcccagctgcgggaggtgtacagcagctgtgacaccaccggcaccggcttcctggaccggcaggagctgacccagctgtgcctgaagctgcacctggagcagcagctgcctgtgctgctgcagaccctgctgggcaatgaccactttgcccgggtgaactttgaggagttcaaggagggctttgtggccgtgctgagcagcaatgctggggtgcggcccagtgatgaggacagcagcagcctggagagcgctgccagcagcgccatcccccccaagtatgtgaatggcagcaagtggtatggaagaagaagcaggcctgagctgtgtgatgctgccacagaggccaggagagtgcctgagcagcagacccaggccagcctgaagagccacctgtggaggtctgccagcctggagagcgtggagagccccaagagtgatgaggaggccgagagcaccaaggaggcccagaatgagctgtttgaggcccagggccagctgcagacctgggacagtgaagattttggcagcccccagaagagctgcagccccagctttgacaccccagagagccagatccggggcgtgtgggaggagctgggcgtgggcagcagcggccacctgtctgagcaggagctggccgtggtgtgccagagcgtgggcctgcagggcctggagaaggaggagctggaggacctcttcaacaagctggaccaggatggagatggcaaggtgtccctggaggagttccagctgggcctcttcagccatgagcccgccctgctgctggagagcagcaccagggtgaagcccagcaaggcctggagccactaccaggtgcctgaggagagcggctgccacaccaccaccaccagcagcctggtgtccctgtgcagcagcctgcggctcttcagcagcattgatgatggcagcggctttgccttcccagaccaggtgctggccatgtggacccaggagggcatccagaatggccgggagatcctgcagagcctggacttctctgtggatgagaaggtgaacctgctggagctgacctgggccctggacaatgagctgatgacagtggacagcgctgtgcagcaggccgccctggcctgctaccaccaggagctgagctaccagcagggccaggtggagcagctggcccgggagcgggacaaggcccggcaggacctggagcgggcagagaagaggaacctggagtttgtgaaggagatggatgactgccacagcaccctggagcagctgacagagaagaagatcaagcacctggagcagggctaccgggagcggctgagcctgctgcggtctgaggtggaggccgagcgggagctgttctgggagcaggcccaccggcagagagctgccctggagtgggatgtgggccgcctgcaggccgaggaggccggcctgcgggagaagctgaccctggccctgaaggagaacagccggctgcagaaggagatcgtggaggtggtggagaagctgagtgacagcgagcggctggccctgaagctgcagaaggacctggagtttgtgctgaaggacaagctggagccccagagcgctgagctgctggcccaggaggagagatttgctgctgtgctgaaggagtatgagctgaagtgccgggacctgcaggacagaaatgatgagctgcaggccgagctggagggcctgtgggcccggctgcccaagaacagacacagccccagctggagcccagatggaagaagacggcagctgcccggcctgggccctgctggcatctccttcctgggcaacagcgcccctgtgtccattgaaacagagctgatgatggagcaggtgaaggagcactaccaggacctgcggacccagctggagaccaaggtgaactactatgagcgggagattgctgccctgaagaggaactttgagaaggagaggaaggacatggagcaggcccggcggcgggaggtgtctgtgctggagggccagaaggctgacctggaggagctgcacgagaagagccaggaggtgatctggggcctgcaggagcagctgcaggacacagcccggggccctgagcctgagcagatgggcctggccccctgctgcacccaggccctgtgtggcctggccctgcggcaccacagccacctgcagcagatccggctggagttccaccggctgtctgaggagaacaccctgctgaagaatgacctgggccgggtgcggcaggagctggaggccgctgagagcacccatgatgcccagaggaaggagattgaggtgctgaagaaggacaaggagaaggcctgcagcgagatggaggtgctgaaccggcagaaccagaactacaaggaccagctgagccagctgaatgtgcgggtgctgcagctgggccaggaggccagcacccaccaggcccagaatgaggagcaccgggtgaccatccagatgctgacccagagcctggaggaggtggtgcgcagcggccagcagcagagcgaccagatccagaagctgcgggtggagctggagtgcctgaaccaggagcaccagagcctgcagctgccctggagcgagctgacccagaccctggaggagagccaggaccaggtgcagggcgcccacctgcggctgcggcaggcccaggcccagcacctgcaggaggtgcggctggtgccccaggacagagtggccgagctgcaccggctgctgagcctgcagggcgagcaggcccggcggcggctggatgcccagcgggaggagcacgagaagcagctgaaggccacagaggagcgggtggaggaggccgagatgatcctgaagaacatggagatgctgctgcaggagaaggtggacaagctgaaggagcagtttgagaagaacaccaagagtgacctgctgctgaaggagctgtatgtggagaatgcccacctggtgcgggccctgcaggccacagaggagaagcagagaggagctgagaagcagagccggctgctggaggagaaggtgcgggccctgaacaagctggtgagccgcatcgccccagctgccctgtctgtgtag

SEQ ID NO: 20994 - DNA, 627 bp, synthetic construct
  source 1..627: mol_type = other DNA; note = Synthetic coding sequence
tgctgcggctgcagcggcggctgcggcagcggctgcggcggccggggcagcggctgcggcggctgcggcagcggctgcggcggctgcggcagcggctgcggcggctgcggcagcggctgcggcggctgcggcggctgcggcagcggctgtgccggctgcggcggctgcaagggcggctgcggcagctgtggcggcagcaagaggggctgtgtgtcctgtggggtgtccaaaggagcctgtggcagctgtggcggcagcaaaggaggctgcggcagctgtggcggcagcaaaggaggctgcggcagctgtggcggcagcaaaggaggctgcggcagctgtggcggcagcaaaggaggctgcggcagctatggctgcagccagagcagctgctgcaagccctgctgctgcagcagcggctgcggcagcagctgctgccagagcagctgctgcaagccctactgctgccagagcagctgctgcaagccctactgctgccagagcagctgctgcaagccctgcagctgcttcagcggctgcggcagcagctgctgccagagcagctgctacaagccctgctgctgccagagcagctgctgcgtgcctgtgtgctgccagtgcaagatctag

SEQ ID NO: 20995 - DNA, 642 bp, synthetic construct
  source 1..642: mol_type = other DNA; note = Synthetic coding sequence
atggccggcagccctgagctggtggtgctggaccccccctgggacaaggagctggccgccggcacagagagccaggccctggtgtctgccaccccccgggaggacttccgggtgcgctgcaccagcaagagagctgtgacagagatgctgcagctgtgtggccgctttgtgcagaagctgggagatgccctgcctgaggagatccgggagcccgccctgagagatgcccagtggacctttgagagcgctgtgcaggagaacatcagcatcaatggccaggcctggcaggaggccagtgacaactgcttcatggacagcgacatcaaggtgctggaggaccagtttgatgagatcatcgtggacatcgccaccaagaggaagcagtaccccaggaagatcctggagtgtgtgatcaagaccatcaaggccaagcaggagatcctgaagcagtaccaccctgtggtgcaccccctggacctgaagtatgaccctgaccctgtgctgaatggaaatgccttcaacttcagccccttcaacatgatgctggccgtggacctgagctacatggtgttcatcaccagcagccccagctatggcaagtttgagatgcagaggggcaacagcagcaagggggaccagtag

SEQ ID NO: 20996 - DNA, 3720 bp, synthetic construct
  source 1..3720: mol_type = other DNA; note = Synthetic coding sequence
atgaccatctggcagatgcagaagcaggcccagaggggcagccctgcccggacccacagcatgatgagcctgtctgtgcggccccagaggcggctgctgagcgcccgggtgaacagaagccagagctttgctggggtgctgggcagccatgagcggggccccaggagcttccctgtgttcagccccccaggcccccccaggaagcccccagccctgagccgggtgtccaggatgttttctgtggcccaccctgctgccaaggtgccccagcctgagcggctggacctggtgtacacagccctgaagaggggcctgacagcctacctggaggtgcaccagcaggagcaggagaagctgcagggccagatccgggagagcaagaggaacagccggctgggcttcctgtatgacctggacaagcaggtgaagagcattgagcgcttcctgcggcggctggagttccacgccagcaagattgatgagctgtatgaggcctactgtgtgcagaggcggctgagagatggagcctacaacatggtgcgggcctacaccaccggcagccctggcagccgggaggcccgggacagcctggccgaggccacccggggccaccgggagtacacagagagcatgtgcctgctggagagcgagctggaggcccagctgggggagttccacctgaggatgaagggcctggccggctttgcccggctgtgtgtgggggaccagtatgagatctgcatgaagtatggccggcagcgctggaagctgcggggcagaattgagggcagcggcaagcaggtgtgggacagcgaggagaccatcttcctgcccctgctgacagagttcctgagcatcaaggtgacagagctgaagggcctggccaaccacgtggtggtgggctctgtgtcctgtgagaccaaggacctgtttgctgccctgccccaggtggtggccgtggacatcaatgacctgggcaccatcaagctgagcctggaggtgacctggagcccctttgacaaggatgaccagcccagcgctgccagctctgtgaacaaggccagcacagtgaccaagcgcttcagcacctacagccagagccccccagacacccccagcctgcgggagcaggccttctacaacatgctgcggcggcaggaggagctggagaatggaacagcctggagcctgagcagcgagagcagtgatgacagcagcagcccccagctgtctggaacagcccggcacagccctgccccccggcccctggtgcagcagcctgagcccctgcccatccaggtggccttcagaagacctgagacccccagcagcggccccctggatgaggagggcgctgtggcccctgtgctggccaatggacatgccccctacagcaggaccctgagccacatcagcgaggcctctgtggatgctgccctggccgaggcctctgtggaggccgtgggccctgagagcctggcctggggccccagcccccccacccacccagcccccacccatggagagcaccccagccctgtgcccccagccctggaccccggccacagcgccaccagcagcaccctgggcaccaccggctctgtgcccaccagcacagatcctgcccccagcgcccacctggacagcgtgcacaagagcacagacagcggccccagcgagctgcccggccccacccacaccaccaccggcagcacctacagcgccatcaccaccacccacagcgcccccagccccctgacccacaccaccaccggcagcacccacaagcccatcatcagcaccctgaccaccaccggccccaccctgaacatcatcggccctgtgcagaccaccaccagccccacccacaccatgcccagccccacccacaccacagccagccccacccacaccagcaccagccccacccacacccccaccagccccacccacaagacctccatgagcccccccaccaccaccagccccacccccagcggcatgggcctggtgcagacagccaccagccccacccaccccaccaccagccccacccaccccaccaccagccccatcctgatcaacgtgagccccagcaccagcctggagctggccaccctgagcagccccagcaagcacagcgaccccaccctgcctggaacagacagcctgccctgcagcccccctgtgagcaacagctacacccaggccgaccccatggcccccaggaccccccaccccagccctgcccacagcagcaggaagcccctgaccagccctgccccagaccccagcgagagcacagtgcagagcctgagccccacccccagcccccccaccccagccccccagcacagcgacctgtgcctggccatggctgtgcagacccctgtgcccacagctgctgggggcagcggggacaggagcctggaggaggccctgggcgccctgatggccgccctggatgactaccggggccagtttcctgagctgcagggcctggagcaggaggtgacccggctggagagcctgctgatgcagaggcagggcctgaccaggagccgggccagcagcctgagcatcaccgtggagcacgccctggagagcttctccttcctgaatgaagatgaagatgaagataatgatgtgcctggggaccggccccccagcagccctgaggccggggctgaagattccattgacagccccagcgcccggcccctgagcacaggctgcccagccctggatgctgccctggtgcgccacctgtaccactgcagccggctgctgctgaagctgggcaccttcggccccctgcgctgccaggaggcctgggccctggagcggctgctgcgggaggcccgggtgctggaggccgtgtgtgagttcagccgccgctgggagatcccagccagcagcgcccaggaggtggtgcagttcagcgccagcaggcctggcttcctgaccttctgggaccagtgcacagagcggctgagctgcttcctgtgccctgtggagcgggtgctgctgaccttctgcaaccagtacggggcccggctgagcctgcggcagcccggcctggccgaggccgtgtgtgtgaagttcctggaggatgccctgggccagaagctgccccggcggccccagcccggccctggagagcagctgactgtgttccagttctggagctttgtggagaccctggacagccccaccatggaggcctacgtgacagaaacagctgaggaggtgctgctggtgaggaacctgaacagtgatgaccaggccgtggtgctgaaggccctgcggctggcccctgagggccgcctgcggagagatggcctgcgggccctgagcagcctgctggtgcacggcaacaacaaggtgatggctgctgtgtccacccagctgcggagcctgagcctgggccccaccttccgggagcgggccctgctgtgcttcctggaccagctggaggatgaagatgtgcagaccagggtggccggctgcctggccctgggctgcatcaaggcccctgagggcatcgagcccctggtgtacctgtgccagacagacacagaagctgtgcgggaggccgcccggcagagcctgcagcagtgtggggaggagggccagagcgcccaccggcggctggaggagagcctggatgccctgccccgcatctttggacctggctccatggccagcacagccttctag

SEQ ID NO: 20997 - DNA, 732 bp, synthetic construct
  source 1..732: mol_type = other DNA; note = Synthetic coding sequence
atggtgacagattatggagccttcatcaagatccctggctgcaggaagcagggcctggtgcacaggacccacatgagcagctgccgggtggacaagcccagcgagatcgtggatgtgggggacaaggtgtgggtgaagctgattggccgggagatgaagaatgaccgcatcaaggtgtccctgtccatgaaggtggtgaaccagggcaccgggaaggacctggaccccaacaacgtcatcatcgagcaggaggagaggagaagaagaagcttccaggactacacaggccagaagatcaccctggaggccgtgctgaacaccacctgcaagaagtgtggctgcaagggccgggtgaagcccctgcccttcccccgcttcagcccctgtggctggaccctcttctggaagaaggaggccgcccagtgccactttgccaaggactgcttcatgcagcccggcggcaccaagtacagcctcatcccagatgaggaggaggagaaggaggaggccaagtctgctgagtttgagaagccagaccccaccaggaaccccagcaggaagaggaagaaggagaagaagaagaagaagcaccgggacaggaagagcagtgacagcgacagcagtgacagcgagagtgacaccgggaagagggcccggcacaccagcaaggacagcaaggccgccaagaagaagaagaagaagaagaagcacaagaagaagcacaaggagtag

SEQ ID NO: 20998 - DNA, 330 bp, synthetic construct
  source 1..330: mol_type = other DNA; note = Synthetic coding sequence
atggaggagatcccagcccaggaggccgccggcagcccccgggtgcagttccagagcctggagacccagagtgaatgtctgagccctgagccccagtttgtgcaggacacagacatggagcagggcctgaccggcggcttccccatcagcaagccagatggcatcagccagctggagcaggacctgcaggtgtttgacctggagaccaagacccgggaggtgctgagagatgactgcagtgatggagagacccgggaggagaacaagctgctgatccccaagcagaagatcagcgaggaggtgcacagctacaaggtgcgggtgggctag

SEQ ID NO: 20999 - DNA, 4134 bp, synthetic construct
  source 1..4134: mol_type = other DNA; note = Synthetic coding sequence
atgagcctggagcgggagctgcggcagctgagcaaggccaaggccaaggcccagagagctggccagaggcgggaggaggccgccctgtgccaccagctgggggagctgctggccggccacggccgctatgcagaggccctggagcagcactggcaggagctgcagctgcgggagcgggcagatgaccccctgggctgtgctgtggcccacaggaagattggagagcggctggccgagatggaggactacccagctgccctgcagcaccagcaccagtacctggagctggcccacagcctgaggaaccacacagagctgcagagggcctgggccaccatcggccgcacccacctggacatctatgaccactgccagagcagagatgccctgctgcaggcccaggccgcctttgagaagagcctggccatcgtggatgaggagctggagggcaccctggcccagggcgagctgaatgagatgaggacccggctgtacctgaacctgggcctgacctttgagagcctgcagcagacagccctgtgcaatgactacttcaggaagagcatcttcctggccgagcagaaccacctgtatgaagatctcttccgggcccgctacaacctgggcaccatccactggagggctggccagcacagccaggccatgcgctgcctggagggcgcccgggagtgtgcccacaccatgaggaagcgcttcatggagagcgagtgctgcgtggtgattgcccaggtgctgcaggacctgggggacttcctggccgccaagagggccctgaagaaggcctaccgcctgggcagccagaagcctgtgcagagagctgccatctgccagaacctgcagcacgtgctggccgtggtgcggctgcagcagcagctggaggaggccgagggccgggacccccagggcgccatggtgatctgtgagcagctgggggacctcttcagcaaggccggggacttccccagggctgctgaggcctaccagaagcagctgcgctttgctgagctgctggacaggcctggagctgagcgggccatcatccacgtgtccctggccaccaccctgggggacatgaaggaccaccacggggctgtgcgccactatgaggaggagctgcggctgcggtctggaaatgtgctggaggaggccaagacctggctgaacatcgccctgagccgggaggaggccggagatgcctatgagctgctggccccctgcttccagaaggccctgagctgtgcccagcaggcccagaggccccagctgcagaggcaggtgctgcagcacctgcacacagtgcagctgcggctgcagccccaggaggcccctgagacagagacccggctgcgggagctgtctgtggctgaagatgaagatgaggaggaggaggccgaggaggccgccgccacagctgagagcgaggccctggaggccggggaggtggagctgtctgagggggaggatgacacagatggcctgaccccccagctggaggaggatgaggagctgcagggccacctgggccgcaggaagggcagcaagtggaacagaagaaatgacatgggagagaccctgctgcaccgggcctgcatcgagggccagctgcggcgggtgcaggacctggtgcggcagggccaccccctgaacccccgggactactgcggctggacccccctgcacgaggcctgcaactacggccacctggagatcgtgcgcttcctgctggaccacggggctgctgtggatgatcctgggggccagggctgtgagggcatcacccccctgcatgatgccctgaactgtggccactttgaggtggccgagctgctgctggagcggggggcctctgtgaccctgcggaccaggaaggccagcgcccgctggaggcgctgcagcagcggcaagctgtacagaagagacctggacctggagacccggcagaaggcccgggccatggagatgctgctgcaggccgccgccagcggccaggacccccacagcagccaggccttccacacccccagcagcctgctgtttgatcctgagaccagcccccccctgagcccctgcccagagccccccagcaacagcacccggctgcctgaggccagccaggcccacgtgcgggtgtccccaggccaggccgccccagccatggcccggccccggcgcagccgccacggccctgccagcagcagcagcagcagcgagggggaggacagcgctggccctgcccggcccagccagaagaggccccgctgcagcgccacagcccagagggtggccgcctggaccccaggccctgccagcaaccgggaggccgccacagccagcaccagcagagctgcctaccaggccgccatccggggcgtgggcagcgcccagagccggctgggccctggccccccccggggccacagcaaggccctggccccccaggccgccctgatccctgaggaggagtgcctggccggggactggctggagctggacatgcccctgaccaggagcagaagaccccggccccggggcaccggggacaacagaagacccagcagcaccagcggcagtgacagcgaggagagccggccccgggcccgggccaagcaggtgcggctgacctgcatgcagagctgcagcgcccctgtgaatgccggccccagcagcctggccagcgagcccccaggcagccccagcaccccccgggtgtctgagcccagcggggacagcagcgctgctggccagcccctgggccctgcccctcctccacccatccgggtgcgggtgcaggtgcaggaccacctgttcctgatccctgtgccccacagcagtgacacccacagcgtggcctggctggccgagcaggccgcccagcgctactaccagacctgtggcctgctgccccggctgaccctgaggaaggagggcgccctgctggccccccaggacctgatcccagatgtgctgcagagcaatgatgaggtgctggccgaggtgacctcctgggacctgccccccctgacagaccgctacagaagagcctgccagagcctgggccagggcgagcaccagcaggtgctgcaggccgtggagctgcagggcctgggcctgtccttcagcgcctgcagcctggccctggaccaggcccagctgacccccctgctgcgggccctgaagctgcacacagccctgcgggagctgcggctggccggcaaccggctgggggacaagtgtgtggccgagctggtggccgccctgggcaccatgcccagcctggccctgctggacctgagcagcaaccacctgggccctgagggcctgcggcagctggccatgggcctgcccggccaggccaccctgcagagcctggaggagctggacctgtccatgaaccccctgggagatggctgcggccagagcctggccagcctgctgcacgcctgccccctgctgagcaccctgcggctgcaggcctgtggcttcggccccagcttcttcctgagccaccagacagccctgggcagcgccttccaggatgctgagcacctgaagaccctgagcctgagctacaatgccctgggcgccccagccctggcccggaccctgcagagcctgcctgctggcaccctgctgcacctggagctgagctctgtggccgccgggaaaggagacagcgacctgatggagcctgtgttccgctacctggccaaggagggctgtgccctggcccacctgaccctgagcgccaaccacctgggggacaaggctgtgcgggacctgtgccgctgcctgagcctgtgccccagcctcatcagcctggacctgagcgccaaccctgagatcagctgtgccagcctggaggagctgctgagcaccctgcagaagaggccccagggcctgtccttcctgggcctgagcggctgtgctgtgcagggccccctgggcctgggcctgtgggacaagattgctgcccagctgcgggagctgcagctgtgcagccggcggctgtgtgccgaggacagagatgccctgcggcagctgcagcccagcaggcctggccctggagaatgtaccctggaccacggcagcaagctgttcttccggcggctgtag

SEQ ID NO: 21000 - DNA, 675 bp, synthetic construct
  source 1..675: mol_type = other DNA; note = Synthetic coding sequence
atgcccaccctcttcaagggcgtgtggggcgtggtggagcacagccgggccctgggccgcttctgcccagcctgcctgcccagcggcccccacctgcacacccagcctgccctgggcacagctgagatgaccctgctgagcagccagagcagcagcctggtggcccccagcggctctgtgtctgcagaaaatcctgagcagaggatgctggagaagagggccaaggtgattgaggagctgctgcagacagagcgggactacatccgggacctggagatgtgcatcgagcgcatcatggtgcccatgcagcaggcccaggtgcccaacatcgactttgagggcctgtttggaaacatgcagatggtgatcaaggtgtccaagcagctgctggccgccctggagatcagtgatgctgtgggccctgtgttcctgggccacagagatgagctggagggcacctacaagatctactgccagaaccatgatgaggccatcgccctgctggagatctatgagaaggatgagaagatccagaagcacctgcaggacagcctggccgacctgaagagcctgtacaatgagtggggctgcaccaactacatcaacctgggcagcttcctgatcaagcctgtgcagagggtgatgagataccccctgctgctgatggagctgtag

SEQ ID NO: 21001 - DNA, 354 bp, synthetic construct
  source 1..354: mol_type = other DNA; note = Synthetic coding sequence
gtgtgtggggactacctgctgagcaggatggatgtgaccagctgcatctcctacagaaactttgccagctgcatgggagacagccggctgctgaacaaggtggatgcctacatccaggagcacctgctgcagatcagcgaggaggaggagttcctgaagctgccccggctgaagctggaggtgatgctggaggacaacgtgtgcctgcccagcaatggcaagctgtacaccaaggtgatcaactgggtgcagaggagcatctgggagaatggagacagcctggaggagctgatggaggaggtgtccttcaaggtgaatggcatccagcccttcctgaagatcatcctgctgtag

SEQ ID NO: 21002 - DNA, 285 bp, synthetic construct
  source 1..285: mol_type = other DNA; note = Synthetic coding sequence
atgctgtgctggggctactggagcctgggccagcccggcatcagcaccaacctgcagggcatcgtggccgagccccaggtgtgtggcttcatcagtgacagatctgtgaaggaggtggcctgtggcggcaaccacagcgtcttcctgctggaggatggagaggtgtacacctgtggcctgaacaccaagggccagctgggccacgagcgggagggcaacaagccagagcagatcggggccctggccgaccagcacatcatccacgtggcctgtggggagagctag

SEQ ID NO: 21003 - DNA, 747 bp, synthetic construct; identical to SEQ ID NO: 20797
  source 1..747: mol_type = other DNA; note = Synthetic coding sequence

SEQ ID NO: 21004 - DNA, 2814 bp, synthetic construct
  source 1..2814: mol_type = other DNA; note = Synthetic coding sequence
atggagccagacatcatccgcatgtacagcagcagccccccacccctggacaacggggctgaagatgatgatgatgatgaatttggagaatttggaggcttcagcgaggtgagccccagcggcgtgggctttgtggactttgacaccccagactacacccggcccaaggaggagtttgtgcccagcaaccacttcatgcccatccacgagttctctgaaaatgtggacagcctgaccagcttcaagagcatcaagaatggaaatgacaaggacatcacagctgagctgagcgcccctgtgaagggccagagtgatgtgctgctgagcaccaccagcaaggagatcatcagcagcgagatgctggccaccagcattgatggcatggagaggcctggcaacctgaacaaggtggtggagcagaggcagaatgtgggcaccctggagagcttcagccctggggacttccgcaccaacatgaatgtggtgcaccagaacaagcagctggagagctgcaatggagagaagccaccctgcctggagatcctgaccaacggctttgctgtgctggagaccgtgaacccccagggcacagatgacctggacaacgtggccgacagcaaaggaaggaagcccctgagcacccacagcacagagtacaacctggacagcgtgcccagccctgctgaggagtttgctgactttgccaccttcagcaagaaggagcgcatccagctggaggagattgaatgtgctgtgctgaatgaccgggaggccctgaccatccgggagaacaacaagatcaacagagtgaatgagctgaacagcgtgaaggaggtggccctgggccgcagcctggacaacaagggggacacagatggagaggaccaggtgtgtgtgtctgagatcagcatcgtgaccaacagaggcttctctgtggagaagcagggcctgcccaccctgcagcaggatgagttcctgcagagcggcgtgcagagcaaggcctggagcctggtggacagcgctgacaacagcgaggccatccggcgggagcagtgcaagacagaggagaagctggacctgctgaccagcaaatgtgcccacctgtgcatggacagcgtgaagaccagtgatgatgaggtgggcagccccaaggaggagagcaggaagttcaccaacttccagagccccaacatcgaccccacagaagaaaatgacctggatgacagcctgtctgtgaagaatggagacagcagcaatgactttgtgacctgcaatgacatcaatgaagatgactttggagactttggagactttggcagcgccagcggcagcaccccaccatttgtgacaggcacccaggacagcatgtctgatgccacctttgaggagagcagcgagcacttcccccacttcagcgagcctggagatgactttggagaatttggagacatcaatgctgtgtcctgccaggaggagaccatcctgaccaagagtgacctgaagcagaccagtgacaacctgtctgaggagtgccagctggccaggaagagcagcggcaccggcacagagcctgtggccaagctgaagaatggccaggagggggagatcggccactttgattctgtgcccaacatccaggatgactgcaatggcttccaggacagtgatgactttgctgacttcagcagcgctggccccagccaggtggtggactggaatgcctttgaagatgagcagaaggacagctgctcctgggccgccttcggggaccagcaggccacagagagccaccacaggaaggaggcctggcagagccacaggacagatgagaacatcgacaccccaggcacccccaagacccacagcgtgcccagcgccaccagcaaaggagctgtggccagcggccacctgcaggagagcgccacctctgtgcagacagccctgctgaaccggctggagcgcatctttgaggcctgcttccccagcatcctggtgcctgatgctgaggaggaggtgaccagcctgaagcacctgctggagaccagcaccctgcccatcaagacccgggaggccctgcctgagagcggggagctgctggatgtgtggacagagctgcaggacatccatgatgcccacggcctgcgctaccagtggggcggcagccacagcaacaagaagctgctgagcagcctgggcatcgacaccaggaacatcctcttcaccggcaacaagaagcagcctgtgattgtgcccatgtatgctgctggcctgggcatgctggagcccaccaaggagcccctgaagcccctgtctgctgctgagaagatcgccagcatcggccagacagccaccatgagcccagacatgaacacctgcaccagtgaccagttccaggagagcctgccccctgtgcagtttgactggagcagcagcggcctgaccaaccccctggatgccagcggcggcagcaccctgctgaacctggacttctttggacctgtggatgacagcagcagcagcagcagcaccaccatccctggggtggaccctgagctgtatgagctgaccaccagcaagctggagatcagcaccagcagcctgaaggtgacagatgcctttgcccggctgatgagcacagtggagaagaccagcaccagcaccagcaggaagcccaagcgggaggagcacctgtctgaggaggccatcaaggtgattgctggcctgcctgacctgaccttcatgcacgccaaggtgctgatgtttcctgccaccctgacccccagcaccagcagccaggagaaggcagatggatag

SEQ ID NO: 21005 - DNA, 114 bp, synthetic construct
  source 1..114: mol_type = other DNA; note = Synthetic coding sequence
atggccagcgaggacatcgccaagctggccgagaccctggccaagacccaggtggccggcggccagctgtccttcaagggcaagagcctgaagctgaacacagctgaggactag

SEQ ID NO: 21006 - DNA, 309 bp, synthetic construct
  source 1..309: mol_type = other DNA; note = Synthetic coding sequence
atgcagaccagcagcagccgctctgtgcacctgtctgagtggcagaagaactactttgccatcaccagcggcatctgcaccggccccaaggcagatgcctaccgggcccagatcctgcgcatccagtatgcctgggccaacagcgagatcagccaggtgtgtgccaccaagctgttcaagaagtatgcagagaagtacagcgccatcatcgacagcgacaacgtggagagcggcctgaacaactatgcagagaacatcctgaccctggccggcagccagcagacagacagcgacaagtggcagagctag

SEQ ID NO: 21007 - DNA, 474 bp, synthetic construct; identical to SEQ ID NO: 20844
  source 1..474: mol_type = other DNA; note = Synthetic coding sequence

SEQ ID NO: 21008 - DNA, 348 bp, synthetic construct
  source 1..348: mol_type = other DNA; note = Synthetic coding sequence
atggccggggcccccaccgtgtccctgcctgagctgcggagcctgctggccagcggccgggcccggctgtttgatgtgcgcagccgggaggaggccgccgccggcaccatccctggggccctgaacatccctgtgtctgagctggagagcgccctgcagatggagcctgctgccttccaggccctgtacagcgctgagaagcccaagctggaggatgagcacctggtgttcttctgccagatgggcaagaggggcctgcaggccacccagctggcccggagcctgggctacaccggggccagaaattatgctggggcctaccgggagtggctggagaaggagagctag

SEQ ID NO: 21009 - DNA, 4767 bp, synthetic construct; identical to SEQ ID NO: 19038
  source 1..4767: mol_type = other DNA; note = Synthetic coding sequence

SEQ ID NO: 21010 - DNA, 381 bp, synthetic construct
  source 1..381: mol_type = other DNA; note = Synthetic coding sequence
atggctgctgccactggagaccccggcctgagcaagctgcagtttgcccccttcagcagcgccctggatgtgggcttctggcatgagctgacccagaagaagctgaatgagtaccgcctggatgaggcccccaaggacatcaagggctactactacaatggagacagcgctggcctgcctgcccggctgaccctggagttcagcgcctttgacatgtctgcccccaccccagcccgctgctgcccagccatcggcaccctgtacaacaccaacaccctggagagcttcaagacagctgacaagaagctgctgctggagcaggccgccaatgagatctgggagagcatcaagagcggcacagccctggagaaccctgtgtag

SEQ ID NO: 21011 - DNA, 1434 bp, synthetic construct
  source 1..1434: mol_type = other DNA; note = Synthetic coding sequence
atggctgatggccaggtggccgagctgctgctgcggcggctggaggccagtgatggcggcctggacagcgctgagctggccgctgagctgggcatggagcaccaggccgtggtgggcgctgtgaagagcctgcaggccctgggggaggtgattgaagctgagctgcggagcaccaagcactgggagctgacagctgagggggaggagatcgcccgggagggcagccatgaggcccgggtcttccgcagcatccccccagagggcctggcccagagcgagctgatgaggctgcccagcggcaaggtgggcttcagcaaggccatgagcaacaagtggatccgggtggacaagtctgctgctgatggccccagggtcttccgggtggtggacagcatggaggatgaggtgcagaggcggctgcagctggtgcggggcggccaggccgagaagctgggggagaaggagaggtctgagctgaggaagaggaagctgctggccgaggtgggctcctggagggaccggcccttcaagccctacaacttcctggcccacggcgtgctgcctgacagcggccacctgcaccccctgctgaaggtgcgcagccagttccggcagatcttcctggagatgggcttcacagagatgcccacagacaacttcatcgagagcagcttctggaactttgatgccctcttccagccccagcagcacccagcccgggaccagcacgacaccttcttcctgcgggaccctgctgaggccctgcagctgcccatggactatgtgcagagggtgaagaggacccacagccagggcggctacggcagccagggctacaagtacaactggaagctggatgaggccaggaagaacctgctgcggacccacaccaccagcgccagcgcccgggccctgtaccgcctggcccagaagaagcccttcacccctgtgaagtacttcagcattgacagagtcttcagaaatgagaccctggatgccacccacctggccgagttccaccagatcgagggcgtggtggccgaccacggcctgaccctgggccacctgatgggcgtgctgcgggagttcttcaccaagctgggcatcacccagctgcgcttcaagccagcctacaacccctacacagagcccagcatggaggtgttctcctaccaccagggcctgaagaagtgggtggaggtgggcaacagcggggtcttccggcctgagatgctgctgcccatgggcctgcctgaaaatgtgtctgtcatcgcctggggcctgagcctggagcggcccaccatgatcaagtatggcatcaacaacatccgggagctggtgggccacaaggtgaacctgcagatggtgtatgacagccccctgtgccgcctggatgctgagccccggcccccacccacccaggaggccgcctag

SEQ ID NO: 21012 - DNA, 3195 bp, synthetic construct
  source 1..3195: mol_type = other DNA; note = Synthetic coding sequence
atgcctgtgcaggccgcccagtggacagagttcctgagctgccccatctgctacaatgaatttgatgaaaatgtgcacaagcccatcagcctgggctgcagccacacagtgtgcaagacctgcctgaacaagctgcacaggaaggcctgcccctttgaccagacagccatcaacacagacattgatgtgctgcctgtgaactttgccctgctgcagctggtgggcgcccaggtgcctgaccaccagagcatcaagctgagcaacctgggggagaacaagcactatgaggtggccaagaagtgtgtggaggacctggccctgtacctgaagcccctgagcggcggcaagggcgtggccagcctgaaccagagcgccctgagccggcccatgcagaggaagctggtgaccctggtgaactgccagctggtggaggaggagggccgggtgcgggccatgagagctgcccggagcctgggggagaggacagtgacagagctgatcctgcagcaccagaacccccagcagctgagcgccaacctgtgggccgctgtgcgggcccggggctgccagttcctgggccctgccatgcaggaggaggccctgaagctggtgctgctggccctggaggatggcagcgccctgagcaggaaggtgctggtgctgtttgtggtgcagaggctggagccccgcttcccccaggccagcaagaccagcattggacatgtggtgcagctgctgtaccgggccagctgcttcaaggtgaccaagagagatgaggacagcagcctgatgcagctgaaggaggagttccgctcctatgaggccctgcggcgggagcatgatgcccagatcgtgcacatcgccatggaggccggcctgcgcatcagccctgagcagtggagcagcctgctgtatggagacctggcccacaagagccacatgcagagcatcatcgacaagctgcagagccctgagagctttgccaagtctgtgcaggagctgaccatcgtgctgcagaggactggagaccctgccaacctgaaccggctgcggccccacctggagctgctggccaacatcgaccccaacccagatgctgtgagccccacctgggagcagctggagaatgccatggtggccgtgaagacagtggtgcacggcctggtggacttcatccagaactacagcaggaagggccacgagaccccccagccccagcccaacagcaagtacaagacctccatgtgccgggacctgcggcagcagggcggctgcccccggggcaccaactgcacctttgcccacagccaggaggagctggagaagtaccgcctgaggaacaagaagatcaatgccaccgtgaggaccttccccctgctgaacaaggtgggcgtgaacaacacagtgaccaccacagctggaaatgtcatcagcgtcatcggcagcacagagaccaccgggaagatcgtgcccagcaccaacggcatcagcaatgctgagaacagcgtgtcccagctgatcagccgcagcacagacagcaccctgcgggccctggagaccgtgaagaaggtgggcaaggtgggcgccaacggccagaatgctgctggccccagcgctgacagcgtgacagagaacaagattggcagcccccccaagacccctgtgtccaatgtggccgccaccagcgctggccccagcaatgtgggcacagagctgaacagcgtgccccagaagagcagccccttcctgaccagggtgcctgtgtacccaccccacagcgagaacatccagtacttccaggaccccaggacccagatcccctttgaggtgccccagtacccccagacaggctactacccacctccacccaccgtgcctgctggggtggccccctgtgtgcccaggtttgtgcgcagcaacaacgtgcctgagagcagcctgcccccagcctccatgccctatgctgaccactacagcaccttcagcccccgggacaggatgaacagcagcccctaccagcccccaccaccccagccctacggccctgtgccccctgtgcccagcggcatgtatgcccctgtgtatgacagccgccgcatctggaggcctcccatgtaccagagagatgacatcatccgcagcaacagcctgccccccatggatgtgatgcacagctctgtgtaccagaccagcctgcgggagcgctacaacagcctggatggctactacagcgtggcctgccagcccccatctgagcccaggaccaccgtgcccctgccccgggagccctgtggccacctgaagaccagctgtgaggagcagatccggaggaagccagaccagtgggcccagtaccacacccagaaggcccccctggtgagcagcaccctgcctgtggccacccagagccccaccccacccagccccctcttctctgtggacttccgggctgacttcagcgagagcgtgtctggcaccaagtttgaggaggaccacctgagccactacagcccctggagctgtggcaccatcggcagctgcatcaatgccattgattctgagcccaaggatgtgattgccaacagcaatgctgtgctgatggacctggacagcggagatgtgaagagaagagtgcacctgtttgagacccagaggaggaccaaggaggaggaccccatcatccccttcagtgatggccccatcatcagcaagtggggcgccatcagccgcagcagcaggacaggctaccacaccacagatcctgtgcaggccacagccagccagggcagcgccaccaagcccatctctgtgtctgactatgtgccctacgtgaatgctgtggacagccgctggagcagctatggaaatgaggccaccagcagcgcccactacgtggagcgggaccgcttcatcgtgacagacctgagcggccacaggaagcacagcagcactggagacctgctgagcctggagctgcagcaggccaagagcaacagcctgctgctgcagcgggaggccaatgccctggccatgcagcagaagtggaacagcctggatgagggccgccacctgaccctgaacctgctgagcaaggagattgagctgagaaatggagaggtgaagaagctgaacctgagcgccagctgcctgatgtacctgttctctgctgctgcctcctggctgtaccactactag

SEQ ID NO: 21013 - DNA, 1548 bp, synthetic construct
  source 1..1548: mol_type = other DNA; note = Synthetic coding sequence
tgagctgggggcagccccagcgtggtggactacttccccagcgaggacttctaccgctgtggctactgcaagaatgaaagtggcagccgcagcaatggcatgtgggcccacagcatgacagtgcaggactaccaggacctgattgaccggggctggaggagaagtggcaagtatgtgtacaagcctgtgatgaaccagacctgctgcccccagtacaccatccgctgccggcccctgcagttccagcccagcaagagccacaagaaggtgctgaagaagatgctgaagttcctggccaagggggaggtgcccaagggcagctgtgaagatgagcccatggacagcaccatggatgatgctgtggccggggactttgccctgatcaacaagctggacatccagtgtgacctgaagaccctgagtgatgacatcaaggagagcctggagagcgagggcaagaacagcaagaaggaggagccccaggagctgctgcagagccaggactttgtgggggagaagctgggcagcggggagcccagccacagcgtgaaggtgcacacagtgcccaagccaggaaaaggagctgacctgagcaagccaccctgcaggaaggccaaggagatcaggaaggagaggaagaggctgaagctgatgcagcagaacccagctggggagctggagggcttccaggcccagggccacccccccagcctcttcccccccaaggccaagagcaaccagcccaagagcctggaggacctgatctttgagagcctgcctgaaaatgccagccacaagctggaggtgcgggtggtgcgcagcagcccccccagcagccagttcaaggccaccctgctggagagctaccaggtgtacaagcgctaccagatggtgatccacaagaaccccccagacacccccacagagagccagttcacccgcttcctgtgcagcagccccctggaggccgagaccccacccaacggccctgactgtggctacggcagcttccaccagcagtactggctggatggcaagatcatcgctgtgggcgtgattgacatcctgcccaactgtgtgtcctctgtgtacctgtactatgaccctgactacagcttcctgagcctgggcgtgtacagcgccctgcgggagatcgccttcacccggcagctgcacgagaagaccagccagctgagctactactacatgggcttctacatccacagctgccccaagatgaagtacaagggccagtaccggcccagcgacctgctgtgcccagagacctacgtgtgggtgcccatcgagcagtgcctgcccagcctggagaacagcaagtactgccgcttcaaccaggaccctgaggccgtggatgaagatagaagcacagagccagaccggctgcaggtgttccacaagagggccatcatgccctatggagtgtacaagaagcagcagaaggaccccagcgaggaggccgctgtgctgcagtatgccagcctggtgggccagaagtgcagcgagaggatgctgctcttcaggaactag

SEQ ID NO: 21014 - DNA, 225 bp, synthetic construct
  source 1..225: mol_type = other DNA; note = Synthetic coding sequence
atggccatggcccccagccccagcctggtgcaggtgtacaccagccctgctgctgtggccgtgtgggagtggcaggacggcctgggcacctggcacccctacagcgccaccgtgtgcagcttcatcgagcagcagtttgtgcagcagaagggccagcgcttcggcctgggcagcctggcccacagcatccccctgggccaggccgaccccagcctggccccctag

SEQ ID NO: 21015 - DNA, 594 bp, synthetic construct
  source 1..594: mol_type = other DNA; note = Synthetic coding sequence
atggccgccttccgggacatcgaggaggtgtcccagggcctgctgagcctgctgggcgccaacagagctgaggcccagcagaggcggctgctgggcagacatgagcaggtggtggagcggctgctggagacccaggatggagctgagaagcagctgcgggagatcctgaccatggagaaggaggtggcccagagcctgctgaatgccaaggagcaggtgcaccagggcggcgtggagctgcagcagctggaggccggcctgcaggaggccggggaggaggacacccggctgaaggccagcctgctgcagctgacccgggagctggaggagctgaaggagattgaggccgacctggagcggcaggagaaggaggtggatgaggacaccaccgtgaccatccccagcgctgtgtatgtggcccagctgtaccaccaggtgtccaagattgagtgggactatgaatgtgagcccggcatggtgaagggcatccaccacggccccagcgtggcccagcccatccacctggacagcacccagctgagcaggaagttcatcagtgactacctgtggagcctggtggacacagagtggtag

SEQ ID NO: 21016 - DNA, 2271 bp, synthetic construct; identical to SEQ ID NO: 19884
  source 1..2271: mol_type = other DNA; note = Synthetic coding sequence

SEQ ID NO: 21017 - DNA, 1941 bp, synthetic construct
  source 1..1941: mol_type = other DNA; note = Synthetic coding sequence
gcccagggctctgtgtccttcaatgatgtgacagtggacttcacccaggaggagtggcagcacctggaccacgcccagaagaccctgtacatggatgtgatgctggagaactactgccacctgatctctgtgggctgccacatgaccaagccagatgtgatcctgaagctggagcggggggaggagccctggaccagctttgctggccacacctgcctggaggagaactggaaggccgaggacttcctggtgaagttcaaggagcaccaggagaagtacagccgctctgtggtgtccatcaaccacaagaagctggtgaaggagaagagcaagatctatgagaagaccttcaccctgggcaagaaccctgtgaacagcaagaacctgcccccagaatatgacacccacggccgcatcctgaagaatgtgtctgagctgatcatcagcaacctgaacccagccaggaagaggctgtctgagtacaacggctacggcaagagcctgctgagcaccaagcaggagaccacccaccctgaggtgaagagccacaaccagagcgcccgggccttcagccacaatgaggtgctgatgcagtaccagaagacagagaccccagcccagagctttggctacaatgactgtgagaagagcttcctgcagaggggcggcctcatcacccacagccggccctacaagggggagaaccccagcgtgtacaacaagaagagaagagccaccaacatcgagaagaagcacacctgcaatgaatgtgggaagagcttctgcaggaagtctgtgctgatcctgcaccagggcatccacagcgaggagaagccctaccagtgccaccagtgtggaaatgccttccggaggaagagctacctgattgaccaccagaggacccacactggagagaagccctttgtgtgcaatgaatgtgggaagagcttccggctgaagacagccctgacagaccaccagaggacccacactggagagaagagctatgaatgtctgcagtgcagaaatgccttccggctgaagagccacctgatccgccaccagaggacccacactggagagaagccctatgaatgtaatgactgtgggaagagcttccggcagaagaccaccctgagcctgcaccagaggatccacactggagagaagccctacatctgcaaggaatgtgggaagagcttccaccagaaggccaacctgactgtgcaccagaggacccacactggagagaagccctacatctgcaatgaatgtgggaagagcttcagccagaagaccaccctggccctgcacgagaagacccacaatgaggagaagccctacatctgcagtgaatgtgggaagagcttccggcagaagaccaccctggtggcccaccagaggacccacactggagagaagagctatgaatgtccccactgcggcaaggccttcaggatgaagagctacctgattgaccaccacaggacccacactggagagaagccctatgaatgtaatgaatgtgggaagagcttcagccagaagaccaacctgaacctgcaccagaggatccacactggagagaagccctacgtgtgcaatgaatgtgggaagagcttccggcagaaggccaccctgactgtgcaccagaagatccacacaggccagaagagctatgaatgtccccagtgtgggaaggccttcagcaggaagagctacctgatccaccaccagaggacccacactggagagaagccctacaagtgcagtgaatgtgggaagtgcttccggcagaagaccaacctgattgtgcaccagaggacccacactggagagaagccctacgtgtgcaatgaatgtgggaagagcttctcctacaagaggaacctgattgtgcaccagaggacccacaagggagaaaatattgagatgcagtag

SEQ ID NO: 21018 - DNA, 594 bp, synthetic construct
  source 1..594: mol_type = other DNA; note = Synthetic coding sequence
atgggcggcaggaagcgggagaggaaggctgctgtggaggaggacaccagcctgtctgagagcgagggcccccggcagccagatggagatgaggaggagagcacagccctgagcatcaatgaggagatgcagaggatgctgaaccagctgcgggagtatgactttgaagatgactgtgacagcctgacctgggaggagacagaggagaccctgctgctgtgggaggacttcagcggctacgccatggctgctgctgaggcccagggcgagcaggaggacagcctggagaaggtgatcaaggacacagagagcctcttcaagacccgggagaaggagtaccaggagaccatcgaccagatcgagctggagctggccacagccaagaatgacatgaacagacacctgcacgagtacatggagatgtgcagcatgaagaggggcctggatgtgcagatggagacctgccggcggctcatcacccagagcggggacaggaagagccctgccttcaccgctgtgcccctgagtgaccccccaccccggcaggcccggctgcggacccccatcgccatgagccacctgacagccccctag

SEQ ID NO: 21019 - DNA, 423 bp, synthetic construct
  source 1..423: mol_type = other DNA; note = Synthetic coding sequence
atggccatggcccccagccccagcctggtgcaggtgtacaccagccctgctgctgtggccgtgtgggagtggcaggacggcctgggcacctggcacccctacagcgccaccgtgtgcagcttcatcgagcagcagtttgtgcagcagaagggccagcgcttcggcctgggcagcctggcccacagcatccccctgggccaggccgaccccagcctggccccctacatcatcgacctgcccagctggacccagttccggcaggacaccggcaccatgagagctgtgcggcggcacctgttcccccagcacagcgcccctggccggggcgtggtgtgggagtggctgagtgatgatggctcctggacagcctatgaggcctctgtgtgtgactacctggagcagcaggtggcccggggcaactag

SEQ ID NO: 21020 - DNA, 3237 bp, synthetic construct
  source 1..3237: mol_type = other DNA; note = Synthetic coding sequence
gtgtgcatgcacccccacaacgtgctgagtgatgtggtgaactacaccctgtggctgatggagtgcagccacgccagcggctgctgccacgccaccatgttcttcagcatctgcttctccttccgggctgtgctggagctgtttgacagatatgatggcctgcggcggctggtgaacctgatcagcaccctggagatcctgaacctggaggaccagggcgccctgctgagtgatgatgagatctttgccagccggcagacaggcaagcacacctgcatggccctgaggaagtactttgaggcccacctggccatcaagctggagcaggtgaagcagagcctgcagaggacagaaggaggcatcctggtgcacccccagcccccctacaaggcctgcagctacacccatgagcagatcgtggagatgatggagttcctgattgaatatggccctgcccagctgtactgggagcctgctgaggtgttcctgaagctgagctgtgtgcagctgctgctgcagctgatcagcatcgcctgcaactggaagacctactatgccagaaatgacacagtgcgctttgccctggatgtgctggccatcctgactgtggtgcccaagatccagctgcagctggccgagagcgtggatgtgctggatgaagctggcagcacagtgtccacagtgggcatcagcatcatcctgggcgtggccgagggggagttcttcatccatgatgctgagatccagaagagcgccctgcagatcatcatcaactgtgtgtgtggccctgacaaccgcatcagcagcatcggcaagttcatcagcggcacccccaggaggaagctgccccagaaccccaagagcagcgagcacaccctggccaagatgtggaatgtggtgcagagcaacaacggcatcaaggtgctgctgagcctgctgagcatcaagatgcccatcacagatgctgaccagatccgggccctggcctgcaaggccctggtgggcctgagccgcagcagcacagtgcggcagatcatcagcaagctgcccctcttcagcagctgccagatccagcagctgatgaaggagcctgtgctgcaggacaagagaagtgaccacgtgaagttctgcaagtatgctgctgagctgattgaaagagtgtctgggaagcccctgctgattggaacagatgtgtccctggcccggctgcagaaggcagatgtggtggcccagagccgcatctccttccctgagaaggagctgctgctgctgatccggaaccacctgatcagcaagggcctgggggagacagccaccgtgctgaccaaggaggccgacctgcccatgacagctgccagccacagcagcgccttcacccctgtgacagctgctgccagccctgtgtccctgcccaggaccccccgcatcgccaacggcatcgccacccggctgggcagccacgccgctgtgggcgccagcgcccccagcgcccccacagcccacccccagccccggcccccccagggccccctggccctgcccggccccagctatgccggcaacagccccctgattggccgcatctccttcatccgggagcggcccagcccctgcaatggaaggaagatccgggtgctgcggcagaagagtgaccacggggcctacagccagagccctgccatcaagaagcagctggacagacacctgcccagcccccccaccctggacagcatcatcacagagtacctgcgggagcagcacgcccgctgcaagaaccctgtggccacctgcccccccttcagcctcttcaccccccaccagtgcccagagcccaagcagaggcggcaggcccccatcaacttcaccagccggctgaacagaagagccagcttccccaagtatggaggagtggatggcggctgctttgacagacacctgatcttcagccgcttccggcccatctctgtgttccgggaggccaatgaagatgaaagtggcttcacctgctgtgccttcagcgcccgggagcgcttcctgatgctgggcacctgcaccggccagctgaagctgtacaacgtgttttctggccaggaggaggccagctacaactgccacaacagcgccatcacccacctggagcccagcagagatggcagcctgctgctgaccagcgccacctggagccagcccctgagcgccctgtggggcatgaagtctgtgtttgacatgaagcacagcttcacagaggaccactacgtggagttcagcaagcacagccaggacagagtcatcggcaccaagggggacatcgcccacatctatgacatccagacaggcaacaagctgctgaccctcttcaacccagacctggccaacaactacaagaggaactgtgccaccttcaaccccacagatgacctggtgctgaatgatggagtgctgtgggatgtgcgcagcgcccaggccatccacaagtttgacaagttcaacatgaacatcagcggggtcttccaccccaacggcctggaggtgatcatcaacacagagatctgggacctgcggaccttccacctgctgcacacagtgcctgccctggaccagtgccgggtggtgttcaaccacactggaacagtgatgtacggggccatgctgcaggctgatgatgaagatgacctgatggaggagaggatgaagagccccttcggcagcagcttccgcaccttcaatgccacagactacaagcccatcgccaccattgatgtgaagaggaacatctttgacctgtgcacagacaccaaggactgctacctggccgtgattgagaaccagggctccatggatgccctgaacatggacacagtgtgccgcctgtatgaggtgggccggcagaggctggctgaagatgaagatgaggaggaggaccaggaggaggaggagcaggaggaggaggatgatgatgaagatgatgatgacacagatgacctggatgagctggacacagaccagctgctggaggccgagctggaggaggatgacaacaatgaaaatgctggagaagatggagacaatgacttcagccccagtgatgaggagctggccaacctgctggaggagggggaggatggagaagatgaagattctgatgctgatgaggaggtggagctgatcctgggggacacagacagcagtgacaacagcgacctggaggatgacatcatcctgagcctgaatgaatag

SEQ ID NO: 21021 - DNA, 447 bp, synthetic construct
  source 1..447: mol_type = other DNA; note = Synthetic coding sequence
atgctgagtgatggctgcggcagcgaggagaagatctctgtgcccagctgctacggcggcattggagcccctgtgtcccggcaggtgcctgccagccatgattctgagctgatggccttcatgaccaggaagctgtgggacctggagcagcaggtgaaggcccagacagatgagatcctgagcaaggaccagaagattgctgccctggaggacctggtgcagaccctgcggccccaccctgctgaggccaccctgcagaggcaggaggagctggagaccatgtgtgtgcagctgcagaggcaggtgcgggagatggagcgcttcctgagtgactatggcctgcagtgggtgggggagcccatggaccaggaggacagcgagagcaagacagtgtctgagcacggggagcgggactggatgacagccaagaagttctggaagccctag

SEQ ID NO: 21022 - DNA, 1755 bp, synthetic construct
  source 1..1755: mol_type = other DNA; note = Synthetic coding sequence
atgagcctgcccccagagaaggccagcgagctgaagcagctgatccaccagcagctgagcaagatggatgtgcacggccgcatccgggagatcctggccgagaccatccgggaggagctggccccagaccagcagcacctgagcacagaggacctgatcaaggccctgcggcggcggggcatcattgatgatgtgatgaaggagctgaactttgtgacagattctgtggagcaggagctgcccagcagccccaagcagcccatctgctttgaccggcagagcaccctgaagaagagtgatggcaccaggatggctgacagcaccaccatgctgagcatcagtgaccccatccacatggtgctgatcaagacagacatctttggagagaccaccctggtggccagctacttcctggagtggaggtctgtgctgggctctgaaaatggagtgaccagcctgactgtggagctgatgggcgtgggcacagagagcaaggtgtctgtgggcatcctgaacatcaagctggagatgtacccacccctgaaccagaccctgagccaggaggtggtgaacacccagctggccctggagcggcagaagacagctgagaaggagcggctcttcctggtgtatgccaagcagtggtggagggagtacctgcagatccggcccagccacaacagccggctggtgaagatctttgcccaggatgaaaatggcatcaacagacctgtgtgcagctatgtgaagcccctgcgggccggccgcctgctggacaccccccggcaggccgccaggtttgtgaatgtgctgggctatgagcgggcccctgtgattggaggcggcggcaagcaggagcagtggtgcaccctgctggccttcctgtgcagaaataaaggagactgtgaagatcatgccaacctgctgtgcagcctgctgctgggctacggcctggaggcctttgtgtgtgtgggcaccaaggccaagggcgtgccccacgcctgggtgatgacctgtggcacagatggagccatcaccttctgggagagcctgaccggccaccgctacatccacaagcccaccaacccagatgagccccctgtggccgagcagcccaagcccctgtacccctaccgcaccatcggctgtgtgttcaaccaccagatgttcctgggcaactgccagcccagtgatgctgtggagacctgtgtgtttgacctgaatgatgagagcaagtggaagcccatgtctgaggaggccatcaagtctgtgtgtgcccctggggccaccaccagcctgccccccttcccccccctgtgtgccagcaccattgatgcctctgtgaccagcaatgaaattgagatgcagctgcggctgctggtgtctgagcacaggaaggacctgggcctgaccaccgtgtgggaggaccagctgagctacctgctgagccctgccctggccagctatgaatttgagaggaccaccagcatctctgctggaaatgaggagttccaggatgccatcagaagagctgtgcctgatggccacaccttcaagggcttccccatccactttgtgtacagaaatgcccggcgggcctttgccacctgcctgcggagccccttctgtgaggagatcatctgctgccgcggggaccaggtgcggctggccgtgcgggtgcgggtcttcacctacccagagagcgcctgtgctgtgtggatcatgtttgcctgcaagtacagatctgtgctgtag

SEQ ID NO: 21023 - DNA, 4515 bp, synthetic construct
  source 1..4515: mol_type = other DNA; note = Synthetic coding sequence
atggtgtctgagagtgacttcagcaaggatgtggccgtgcaggtgctgcccctggacaagattgaggagaacaacaagcagaaggccaatgacatcttcatcagccagtacaccatgggccagaaggatgccctgaggacagtgctgaagcagaatgtgtccctgtgcctgaccggctggagcgaccacagcggggtcatcaccacccactgcagcctgtacctgctgcggctgatgaggagcagccacctgagcctgcccagctcctgggactaccgggcccagagcatgcctgtgttcaaggaggtgaaggtgcacctgctggaggatgctggcatcgagaaggatgctgtgacccaggagacccgcatcagccccagcggcattgattctgccaccaccgtggccgccgccacagctgctgccatcgccacagctgcccccctcatcaaggtgcagagcgacctggaggccaaggtgaacagcgtgacagagctgctgagcaagctgcaggagacagacaagcacctgcagagggtgacagagcagcagaccagcatccagaggaagcaggagaagctgcactgccacgaccacgagaagcagatgaatgtgttcatggagcagcacatccgccacctggagaagctgcagcagcagcagattgacatccagacccacttcatctctgctgccctgaagaccagcagcttccagcctgtgtccatgcccagcagcagagctgtggagaagtacagcgtgaagccagagcaccccaacctgggcagctgcaaccccagcctgtacaacacctttgccagcaagcaggcccccctgaaggaggtggaggacaccagctttgacaagcagaagagccccctggagaccccagcccccaggagatttgcccctgtgcctgtgtccagagatgatgagctgagcaagcgggagaacctgctggaggagaaggagaacatggaggtgtcctgccacagaggaaatgtgcggctgctggagcagatcctgaacaacaatgacagcctgaccaggaagtctgagagcagcaacaccaccagcctgaccaggagcaagattggctggaccccagagaagaccaaccgcttccccagctgtgaggagctggagaccaccaaggtgaccatgcagaagagtgatgatgtgctgcatgacctgggccagaaggagaaggagaccaacagcatggtgcagcccaaggagagcctgtccatgctgaagctgcctgacctgccccagaacagcgtgaagctgcagaccaccaacaccaccaggtctgtgctgaaggatgctgagaagatcctgcggggcgtgcagaacaacaagaaggtgctggaggagaacctggaggccatcatccgggccaaggatggagctgccatgtacagcctcatcaatgccctgagcaccaaccgggagatgtctgagaagatccgcatcaggaagacagtggatgagtggatcaagaccatctctgctgagatccaggatgagctgagcaggacagattatgagcagaagagatttgaccagaagaaccagaggaccaagaagggccagaacatgaccaaggacatccgcaccaacacccaggacaagacagtgaacaagagcgtcatccccaggaagcacagccagaagcagatcgaggagcacttcaggaacctgcccatgaggggcatgcctgccagcagcctgcagaaggagaggaaggagggcctgctgaaggccaccaccgtcatccaggatgaggactacatgctgcaggtgtatggcaagcctgtgtaccagggccacaggagcaccctgaagaagggcccctacctgcgcttcaacagccccagccccaagagccggccccagaggcccaaggtgattgaaagagtgaagggcaccaaggtgaagagcatccgcacccagacagacttctacgccaccaagcccaagaagatggacagcaagatgaagcacagcgtgcctgtgctgccccacggggaccagcagtacctgttcagccccagccgggagatgcccaccttcagcggcaccctggagggccacctgatccccatggccatcctgctgggccagacccagagcaacagcgacaccatgcccccagctggggtgattgtgtccaagccccaccctgtgacagtgaccaccagcatcccccccagcagcaggaaggtggagactggagtgaagaagcccaacatcgccatcgtggagatgaagtctgagaagaaggaccccccccagctgactgtgcaggtgctgcccagcgtggacatcgacagcatcagcaacagcagcgcagatgtgctgagccccctgagcagccccaaggaggccagcctgccccctgtgcagacctggatcaagaccccagagatcatgaaggtggatgaggaggaggtgaagtttcctggcaccaactttgatgagatcattgatgtgatccaggaggaggagaagtgtgatgagatcccagattctgagcccatcctggagttcaacagatctgtgaaggctgacagcaccaagtacaatggaccacccttcccccctgtggccagcaccttccagcccacagctgacatcctggacaaggtgattgaaaggaaggagaccctggagaacagcctcatccagtgggtggagcaggagatcatgagccgcatcatcagcggcctcttccctgtgcagcagcagatcgcccccagcatctctgtgtctgtgtctgagaccagcgagcccctgaccagtgacatcgtggagggcaccagcagcggggccctgcagctgtttgtggatgctggggtgcctgtgaacagcaatgtcatcaagcactttgtgaatgaggccctggccgagaccatcgctgtgatgctgggggaccgggaggccaagaagcagggccctgtggccaccggggtgtctggagatgccagcaccaatgagacctacctgcctgcccgggtgtgcacccccctgcccaccccccagcccaccccaccctgcagccccagcagccctgccaaggaatgtgtgctggtgaagaccccagacagcagcccctgtgacagcgaccatgacatggccttccctgtgaaggagatctgtgccgagaagggagatgacatgcctgccatcatgctggtgaacacccccaccgtgacccccaccaccaccccacctcctgctgctgctgtgttcacccccaccctgagtgacatcagcattgacaagctgaaggtgagcagccctgagctgcccaagccctggggagatggagacctgcccctggaggaggagaaccccaacagcccccaggaggagctgcacccccgggccatcgtgatgtctgtggccaaggatgaggagcctgagagcatggacttccctgcccagcccccacctcctgagcctgtgcccttcatgcccttccctgctggcaccaaggcccccagccccagccagatgcctggcagtgacagcagcaccctggagagcaccctgtctgtgacagtgacagaaacagagaccctggacaagcccatcagcgagggggagatcctcttcagctgtggccagaagctggcccccaagatcctggaggacatcggcctgtacctgaccaacctgaatgacagcctgagcagcaccctgcatgatgctgtggagatggaggatgacccccccagcgagggccaggtgatccgcatgagccacaagaagttccacgcagatgccatcctgagctttgccaagcagaaccaggagagcgctgtgtcccagcaggccgtgtaccacagcgaggacctggagaacagcgtgggggagctgtctgagggccagaggccccagctgacagctgctgctgagaacatcctgatgggccacagcctgtacatgcagccccctgtgaccaacacccagagcctggaccagcagtgtgaccccaagcccctgagccggcagtttgacacagtgtctggcagcatctatgaggacagctgtgccagccacggccccatgagcctgggggagctggagctggagcccaacagcaagctggtgctgcccaccaccctgctgacagcccaggagaatgatgtgaacctgcctgtggccgctgaggacttcagccagtaccagctgaagcagaaccaggatgtgaagcaggtggagcacaagcccagccagagctacctgcgggtgaggaacaagagtgacatcgcccccagccagcagcaggtgtcccctggggacatggacaggacccagatcgagctgaacccctacctgacctgtgtgttcagcggcggcaaggctgtgcccctgagcgccagccagatgcccccagccaagatgtctgtgatgctgcccagcgtgaacctggaggactgcagccagagcctgagcctgagcaccatgcaggaggacatggagagcagtggagctgacaccttctag

SEQ ID NO: 21024 - DNA, 2271 bp, synthetic construct
  source 1..2271: mol_type = other DNA; note = Synthetic coding sequence
atggtggcccctgtgctggagaccagccacgtgttctgctgccccaacagagtgcggggcgtgctgaactggagcagcggcccccggggcctgctggccttcggcaccagctgcagcgtggtgctgtatgaccccctgaagagggtggtggtgaccaacctgaatggccacacagcccgggtgaactgcatccagtggatctgcaagcaggacggcagccccagcacagagctggtgtctgggggcagtgacaaccaggtgatccactgggagattgaggacaaccagctgctgaaggctgtgcacctgcagggccacgagggccctgtgtatgctgtgcatgctgtgtaccagaggaggaccagtgaccctgccctgtgcaccctcatcgtgtctgctgctgctgacagcgctgtgcggctgtggagcaagaagggccctgagggccgggacctcttcctggccagctgcagccaggactgcctgatccgcatctggaagctgtacatcaagagcaccagcctggagacccaggatgatgacaacatccggctgaaggagaacaccttcaccattgaaaatgaatctgtgaagatcgcctttgctgtgaccctggagaccgtgctggccggccacgagaactgggtgaatgctgtgcactggcagcctgtgttctacaaggatggagtgctgcagcagcctgtgcggctgctgagcgcctccatggacaagaccatgatcctgtgggccccagatgaggagagcggcgtgtggctggagcaggtgcgggtgggggaggtgggcggcaacaccctgggcttctatgactgccagttcaatgaagatggctccatgatcatcgcccacgccttccacggggccctgcacctgtggaagcagaacacagtgaacccccgggagtggaccccagagatcgtcatcagcggccactttgatggagtgcaggacctggtgtgggaccctgagggggagttcatcatcaccgtgggcacagaccagaccacccggctgtttgccccctggaagaggaaggaccagagccaggtgacctggcatgaaattgcccggccccagatccacggctatgacctgaagtgcctggccatgatcaaccgcttccagtttgtgtctggagcagatgagaaggtgctgcgggtcttcagcgcccccaggaactttgtggagaacttctgtgccatcaccggccagagcctgaaccacgtgctgtgcaaccaggacagcgacctgcctgagggcgccaccgtgcctgccctgggcctgagcaacaaggctgtgttccagggcgacatcgccagccagcccagtgatgaggaggagctgctgaccagcacaggctttgagtaccagcaggtggccttccagcccagcatcctgacagagcccccaacagaggaccacctgctgcagaacaccctgtggccagaggtgcagaagctgtatggccacggctatgagatcttctgtgtgacctgcaacagcagcaagaccctgctggccagcgcctgcaaggccgccaagaaggagcacgccgccatcatcctgtggaacaccacctcctggaagcaggtgcagaacctggtgttccacagcctgactgtgacccagatggccttcagccccaatgagaagttcctgctggccgtgtcccgggacaggacctggagcctgtggaagaagcaggacaccatcagccctgagtttgagcctgtgttcagcctgtttgccttcaccaacaagatcacctctgtgcacagccgcatcatctggagctgtgactggagcccagacagcaagtacttcttcaccggcagccgggacaagaaggtggtggtgtggggagaatgtgacagcacagatgactgcatcgagcacaacatcggcccctgcagctctgtgctggatgtgggcggcgctgtgacagctgtgtctgtgtgccctgtgctgcaccccagccagcgctacgtggtggccgtgggcctggagtgtgggaagatctgcctgtacacctggaagaagacagaccaggtgcctgagatcaatgactggacccactgtgtggagaccagccagagccagagccacaccctggccatcaggaagctgtgctggaagaactgcagcggcaagacagagcagaaggaggccgagggcgctgagtggctgcactttgccagctgtggggaggaccacacagtgaagatccaccgggtgaacaagtgtgccctgtag

SEQ ID NO: 21025 - DNA, 345 bp, synthetic construct
  source 1..345: mol_type = other DNA; note = Synthetic coding sequence
atgcaggagatcaaccagaacctggccgaggaggccggcctgaacatcacccacatctgcctgcccccagacagcagcgaggccgagatcattgatgagatcctgaagatcaatgaagacaccagggtgcacggcctggccctgcagatcagcgagaacctcttcagcaacaaggtgctgaatgccctgaagccagagaaggatgtggatggagtgacagacatcaacctgggcaagctggtgagaggagatgcccatgaatgttttgtgtcccctgtggccaaggccgtcatcgagctgctggagaagagcggcgtgaacctggatggcaagaagatcctgtag

SEQ ID NO: 21026 - DNA, 747 bp, synthetic construct; identical to SEQ ID NO: 20797
  source 1..747: mol_type = other DNA; note = Synthetic coding sequence

SEQ ID NO: 21027 - DNA, 1461 bp, synthetic construct; identical to SEQ ID NO: 18684
  source 1..1461: mol_type = other DNA; note = Synthetic coding sequence

SEQ ID NO: 21028 - DNA, 1710 bp, synthetic construct
  source 1..1710: mol_type = other DNA; note = Synthetic coding sequence
atggccctgctgtctgagggcctggatgaggtgcctgctgcctgcctgagcccctgtggcccccccaaccccacagagctgttcagcgagagccggcggctggccctggaggagctggtggccggcggccctgaggcctttgctgccttcctgcggcgggagcggctggcccgcttcctgaacccagatgaggtgcacgccatcctgcgggctgctgagaggcctggagaggagggcgctgctgctgctgctgctgctgaagattcttttggcagcagccatgactgcagcagcggcacctacttccctgagcagagcgacctggagccccccctgctggagctgggctggccagccttctaccagggcgctggggagggcggcccctacggctgcaaggatgccctgcggcagcagctgcggagcgcccgggaggtgattgctgtggtgatggatgtgttcacagacatcgacatcttccgggacctgcaggagatctgcaggaagcagggcgtggccgtgtacatcctgctggaccaggccctgctgagccagttcctggacatgtgcatggacctgaaggtgcaccctgagcaggagaagctgatgacagtgaggaccatcactggaaacatctactatgcccggagcggcaccaagatcatcggcaaggtgcatgagaagttcaccctgattgatggcatccgggtggccaccggcagctacagcttcacctggacagatggcaagctgaacagcagcaacctggtgatcctgagcggccaggtggtggagcactttgacctggagttccgcatcctgtatgcccagagcaagcccatcagccccaagctgctgagccacttccagagcagcaacaagtttgaccacctgaccaacaggaagccccagagcaaggagctgaccctgggcaacctgctgaggatgaggctggcccggctgagcagcacccccaggaaggctgacctggaccctgagatgcctgctgagggcaaggccgagaggaagccccatgactgtgagagcagcacagtgtctgaggaggactacttcagcagccacagagatgagctgcagagcaggaaggccattgatgctgccacccagacagagcctggagaggagatgcctggcctgtctgtgtctgaggtgggcacccagaccagcatcaccacagcctgtgccggcacccagacagctgtgatcacccgcatcgccagcagccagaccaccatctggagccgcagcaccaccacccagacagacatggatgagaacatcctcttcccccggggcacccagagcacagagggcagccctgtgtccaagatgtctgtgagccgcagcagcagcctgaagagcagcagctctgtgagcagccagggctctgtggccagcagcacaggcagccctgccagcatccgcaccacagacttccacaaccctggctaccccaagtacctgggcaccccccacctggagctgtacctgagtgacagcctgaggaacctgaacaaggagcggcagttccactttgctggcatccgcagccggctgaaccacatgctggccatgctgagcaggaggaccctcttcacagagaaccacctgggcctgcacagcggcaacttcagccgggtgaacctgctggccgtgagagatgtggccctgtaccccagctaccagtag

SEQ ID NO: 21029 - DNA, 1224 bp, synthetic construct
  source 1..1224: mol_type = other DNA; note = Synthetic coding sequence
atggtgctcttcagtgacagcagcctgccccactggcagcagcagcccccccagcctgcccctcctcctcctctcttcccccggcagcagcaggtgcaggtgaacaagggccgggtgaactgccacccccgctgccgctacatcaagaccaagccctgccaccagctgagccaccaggtgtgggtgcagcagaagcccagccaccggctgctgagcctgcagctgagccccagccccaagcccagccccagcccccagctgagcctgaagttccggctgagcctgaagttccggcccaagcagctgttccaccccatgagcctgctgaagcacaacccccccacccacagccaccccagccccaagctgcagcagagccagccccagagcaatgtgcagggccagagccctgtgcgggtgcagagccccagccagacccgcatccggcccagcacccccagccagctgagccctggccagcagagccaggtgcagaccaccaccagccagcccatccccatccagccccacaccagcctgcagatccccagccagggccagccccagagccagccccaggtggtgatgaagcacaatgctgtgattgagcacctgaagcagaagaagtccatgaccccagctgagcgggaggagaaccagaggatgattgtgtgcaaccaggtgatgaagtacatcctggacaagattgacaaggaggagaagcaggccgccaagaagaggaagcgggaggagagcgtggagcagaagaggagcaagcagaatgccaccaagctgagcgccctgctcttcaagcacaaggagcagctgcgggcagagatcctgaagaagagggccctgctggacaaggacctgcagatcgaggtgcaggaggagctgaagagggacctgaagatcaagaaggagaaggacctgatgcagctggcccaggccacagctgtggccgccccctgcccccctgtgaccccagcccccccagcccccccagcccccccacccagccccccacctcctcctgctgtgcagcacacaggcctgctgagcacccccaccctgcctgctgccagccagaagaggaagcgggaggaggagaaggacagcagcagcaagagcaagaagaagaagatgatcagcaccaccagcaaggagaccaagaaggacaccaagctgtactgcatctgcaagaccccctatgatgagagctag

SEQ ID NO: 21030 - DNA, 480 bp, synthetic construct; identical to SEQ ID NO: 20848
  source 1..480: mol_type = other DNA; note = Synthetic coding sequence

SEQ ID NO: 21031 - DNA, 309 bp, synthetic construct
  source 1..309: mol_type = other DNA; note = Synthetic coding sequence
atgaatgaggccgagatcgtggatgtggccctgggcatcctgattgagagcaggaagcaggagaaggcctgtgagcagcctgccctggccggggctgacaaccctgagcacagccccccctgcagcgtgagcccccacaccagcagcggcagcagcagcgaggaggaggacagcggcaagcaggccctggcccctggcctgagccccagccagaggcctgggggcagcagcagcgcctgcagccgcagccctgaggaggaggaggaggaggatgtgctgaagtatgtgcgggagatcttcttctcctag

SEQ ID NO: 21032 - DNA, 345 bp, synthetic construct
  source 1..345: mol_type = other DNA; note = Synthetic coding sequence
atgcagtttggagagctgctggccgctgtgaggaaggcccaggccaacgtgatgctgttcctggaggagaaggagcaggccgccctgagccaggccaacggcatcaaggcccacctggagtacagatctgctgagatggagaagagcaagcaggagctggagaccatggccgccatcagcaacacagtgcagttcctggagaggtccatgaccagcgagctgaagtgcctgcccctcttcagcgccaacatcggcctgcccaacctgagccctgcccctggcaacagcagcagcaacatgtgcatgaccagccgcagcaccaggacccagcacaccagcatctag

SEQ ID NO: 21033 - DNA, 579 bp, synthetic construct; identical to SEQ ID NO: 18812
  source 1..579: mol_type = other DNA; note = Synthetic coding sequence

SEQ ID NO: 21034 - DNA, 888 bp, synthetic construct
  source 1..888: mol_type = other DNA; note = Synthetic coding sequence
atgaagcagtatggcctgggccccaatggaggcatcgtgaccagcctgaacctgtttgccaccaggtttgaccaggtgatgaagttcatcgagaaggcccagaacatgagcaaatatgtgctgattgacaccccaggccagatcgaggtgttcacctggagcgccagcggcaccatcatcacagaggccctggccagcagcttccccaccgtggtgatctacgtgatggacaccagccgcagcaccaaccctgtgaccttcatgagcaacatgctgtatgcctgcagcatcctgtacaagaccaagctgcccttcatcgtggtgatgaacaagacagacatcatcgaccacagctttgctgtggagtggatgcaggactttgaggccttccaggatgccctgaaccaggagaccacctacgtgagcaacctgaccaggtccatgagcctggtgctggatgagttctacagcagcctgcgggtggtgggcgtgtctgctgtgctgggcaccggcctggatgagctgtttgtgcaggtgaccagcgctgctgaggagtatgaaagagagtacagaccagaatatgaaaggctgaagaagagcctggccaatgctgagagccagcagcagcgggagcagctggagcggctgaggaaggacatgggctctgtggccctggatgctggaacagccaaggacagcctgagccctgtgctgcaccccagcgacctgatcctgacccggggcaccctggatgaagaagatgaggaggccgacagcgacacagatgacatcgaccaccgggtgacagaggagagccatgaggagcccgccttccagaacttcatgcaggagagcatggcccagtactggaagaggaacaacaagtag

SEQ ID NO: 21035 - DNA, 1212 bp, synthetic construct
  source 1..1212: mol_type = other DNA; note = Synthetic coding sequence
atgcccagcgctgaggccaagctgaagaagaacagatgtgccaactgctttgactgccccggctgcatgcacaccctgagcacccgggccaccagcatcagcacccagctgcctgatgatcctgccaagaccaccatgaagaaggcctactacctggcctgtggcttctgccgctggaccagcagagatgtgggcatggctgacaagtctgtggccagcggcggctggcaggagcctgagaacccccacacccagaggatgaacaagctgattgagtactaccagcagctggcccagaaggagaaggtggagcgggacaggaagaagctggccaggagaagaaactacatgcccctggccttcagtgacaagtatggcctgggcacccggctgcagaggccccgggccggggccagcatcagcaccctggccggcctgagcctgaaggagggggaggaccagaaggagatcaagattgaaccagcccaggccgtggatgaggtggagcccctgcctgaggactactacaccaggcctgtgaacctgacagaggtgaccaccctgcagcagaggctgctgcagcctgacttccagcctgtgtgtgccagccagctgtaccccaggcacaagcacctgctgatcaagaggagcctgcgctgcaggaaatgtgagcacaacctgagcaagccagagttcaaccccaccagcatcaagttcaagatccagctggtggccgtgaactacatccctgaggtgcgcatcatgagcatccccaacctgcgctacatgaaggagagccaggtgctgctgaccctgaccaaccctgtggagaacctgacccacgtgaccctgtttgaatgtgaggagggggaccctgatgacatcaacagcacagccaaggtggtggtgccccccaaggagctggtgctggccggcaaggatgctgctgctgaatatgatgagctggccgagccccaggacttccaggatgatcctgacatcatcgccttcaggaaggccaacaaggtgggcatcttcatcaaggtgaccccccagcgggaggagggggaggtgacagtgtgcttcaagatgaagcatgacttcaagaacctggccgcccccatccggcccatcgaggagagtgaccagggcacagaggtgatctggctgacccagcacgtggagctgagcctgggccccctgctgccctag

SEQ ID NO: 21036 - DNA, 1674 bp, synthetic construct; identical to SEQ ID NO: 19224
  source 1..1674: mol_type = other DNA; note = Synthetic coding sequence

SEQ ID NO: 21037 - DNA, 462 bp, synthetic construct
  source 1..462: mol_type = other DNA; note = Synthetic coding sequence
atggccgagcaggagcagaggaagatccccctggtgcctgagaacctgctgaagaagaggaaggcctaccaggccctgaaggccacccaggccaagcaggccctgctggccaagaaggagcagaagaagggcaagggcctgcgcttcaagaggctggagagcttcctgcatgacagctggaggcagaagagggacaaggtgcggctgcggcggctggaggtgaagccccacgccctggagctgcctgacaagcacagcctggcctttgtggtgagaattgaaagaattgatggagtgtccctgctggtgcagaggaccatcgcccggctgcggctgaagaagatcttctctggagtgtttgtgaaggtgaccccccagaacctgaagatgctgagaattgtggagccctacgtgacctggggcgaggtgtggaggcacctgctgggccggccccacagctag

SEQ ID NO: 21038 - DNA, 2070 bp, synthetic construct
  source 1..2070: mol_type = other DNA; note = Synthetic coding sequence
atgattgacagcgtgaagctgcggcgggacagcgctgctgacttcttcagccactatgagtacctgtgtgccctgcagaacagcgtgcccctgcctgctgtgcgggcctgcctgcgggagggcgtgctggacttcaatgctgaccggctgcggggcgtggactgggcccccctgctgagcaccctgaagatcaacaaggacctgcccctggtgtccatcaagagcttcttccagccctggctgggggacaccggcagtgacatgaacaagttctgccgcagccgggtgcctgccatccgctacaaggatgtgaccttccagctgtgcaaggccctgaagggctgcctgagcatcagctctgtgctgaagaacctggagctgaatggcctcatcctgcgggagcgggacctgaccatcctggccaagggcctgaacaagagcgccagcctggtgcacctgagcctggccaactgccccatcggagatggcggcctggagatcatctgccagggcatcaagagcagcatcaccctgaagacagtgaacttcaccggctgcaacctgacctggcagggcgctgaccacatggccaagatcctgaagtaccagaccatgagaagacatgaggagacctgggccgagagcctgcgctacagaagaccagacctggactgcatggccggcctgcggcgcatcaccctgaactgcaacaccctcatcggggacctgggcgcctgtgcctttgctgacagcctgtctgaggacctgtggctgcgggccctggacctgcagcagtgtggcctgaccaatgaaggagccaaggccctgctggaggccctggagaccaacaccaccctggtggtgctggacatcaggaagaaccccctgattgaccacagcatgatgaaggccgtcatcaagaaggtgctgcagaatggccgcagcgccaagtctgagtaccagtggatcaccagccccagcgtgaaggagcccagcaagacagccaagcagaagaggaggaccatcatcctgggcagcggccacaagggcaaggccaccatccgcatcggcctggccaccaagaagcctgtgagcagcggcaggaagcacagcctgggcaaggagtactatgccccagcccccctgcccccaggagtgtctggcttcctgccctggaggacagctgagcgggccaagaggcaccggggcttccccctcatcaagacccgggacatctgcaaccagctgcagcagcccggcttccctgtgacagtgacagtggagagccccagcagcagcgaggtggaggaggtggatgacagcagcgagagcgtgcatgaggtgcctgagaagaccagcattgagcaggaggccctgcaggagaagctggaggagtgcctgaagcagctgaaggaggagagggtcatccggctgaaggtggacaagagggtgtctgagctggagcatgaaaatgcccagctgaggaacatcaacttcagcctgtctgaggccctgcacgcccagagcctgaccaacatgatcctggatgatgaaggagtgctgggcagcattgaaaattccttccagaagttccacgccttcctggacctgctgaaggatgctggcctgggccagctggccaccatggccggcatcgaccagagcgacttccagctgctgggccacccccagatgaccagcacagtgagcaacccccccaaggaggagaagaaggccctggaggatgagaagccagagcccaagcagaatgccctgggccagatgcagaacatccagttccagaagatcactggagatgcccgcatccccctgcccctggacagcttccctgtgcctgtgtccaccccagagggcctgggcaccagcagcaacaacctgggcgtgcctgccacagagcagaggcaggagagctttgagggcttcatcgccaggatgtgcagccccagcccagatgccaccagcggcaccggcagccagaggaaggaggaggagctgagcaggaacagccgcagcagcagcgagaagaagaccaagacagagagccactag

SEQ ID NO: 21039 - DNA, 915 bp, synthetic construct
  source 1..915: mol_type = other DNA; note = Synthetic coding sequence
atgaacttcagcgaggtgttcaagctgagcagcctgctgtgcaagttctccccagatggcaagtacctggccagctgtgtgcagtaccgcctggtggtgagagatgtgaacaccctgcagatcctgcagctgtacacctgcctggaccagatccagcacatcgagtggagcgctgacagcctcttcatcctgtgtgccatgtacaagaggggcctggtgcaggtgtggagcctggagcagcctgagtggcactgcaagattgatgagggcagcgctggcctggtggccagctgctggagcccagatggccgccacatcctgaacaccacagagttccacctgcgcatcaccgtgtggagcctgtgcaccaagtctgtgtcctacatcaagtaccccaaggcctgcctgcagggcatcaccttcaccagagatggccgctacatggccctggccgagcggcgggactgcaaggactatgtgtccatctttgtgtgcagcgactggcagctgctgcggcactttgacacagacacccaggacctgaccggcatcgagtgggccccaaatggctgtgtgctggccgtgtgggacacctgcctggaggtgcgcatcctgaaccacgtgacctggaagatgatcacagaatttggccaccctgctgccatcaatgaccccaagatcgtggtgtacaaggaggccgagaagagcccccagctgggcctgggctgcctgtccttccccccacccagggctggagctggccccctgcccagcagcgagagcaaatatgaaattgcctctgtgcctgtgtccctgcagaccctgaagcctgtgacagaccgggccaaccccaagattggcatcggcatgctggccttctccccagacagctacttcctggccaccagaaattag

SEQ ID NO: 21040 - DNA, 483 bp, synthetic construct
  source 1..483: mol_type = other DNA; note = Synthetic coding sequence
atgaaggaggtgggccggccccgggaggtgcggggccggcctgggaagagccgcatccagaaggagctggccgacatcaccctggaccccccacccaactgcagcgctggccccaagggggacaacatctatgagtggaggagcaccatcctgggccccccaggctctgtgtatgagggcggcgtcttcttcctggacatcaccttcaccccagagtaccccttcaagccacccaaggtgaccttccgcacccgcatctaccactgcaacatcaacagccagggcgtcatctgcctggacatcctgaaggacaactggagccctgccctgaccatcagcaaggtgctgctgagcatctgcagcctgctgacagactgcaacccagctgaccccctggtgggcagcatcgccacccagtacatgaccaacagagctgagcatgacaggatggcccggcagtggaccaagagatatgccacctag

SEQ ID NO: 21041 - DNA, 516 bp, synthetic construct
  source 1..516: mol_type = other DNA; note = Synthetic coding sequence
atgagcagtggaaatgccaagattggccacccagcccccaacttcaaggccacagctgtgatgccagatggccagttcaaggacatcagcctgagtgactacaagggcaagtatgtggtgttcttcttctaccccctggacttcacctttgtgtgccccacagagatcatcgccttcagtgacagagctgaggagttcaagaagctgaactgccaggtgattggagcctctgtggacagccacttctgccacctggcctgggtgaacacccccaagaagcagggcggcctgggccccatgaacatccccctggtgtctgaccccaagaggaccatcgcccaggactatggagtgctgaaggcagatgagggcatctccttccggggcctcttcatcattgatgacaagggcatcctgcggcagatcaccgtgaatgacctgcctgtgggccgctctgtggatgagaccctgcggctggtgcaggccttccagttcacagacaagcatggagagtag

SEQ ID NO: 21042 - DNA, 603 bp, synthetic construct
  source 1..603: mol_type = other DNA; note = Synthetic coding sequence
gtgctgatctttgcctgcctggtgcccggcttccctgctgtgatgagcagccggggcccctgcaccctggagaccctcatcaaccccagccccagcgtggctgatgtgaagatctacccagaggagatcacccccctgctgcctgccatctctggagagaagattgctgaggaccagacctgcttcttcctgcagatcctgctgaagtacatggtgatccaggccgccagcctggagtggaagaacaaggagaaccaggacaccggcttcaagttcctgttcaccctcttcaggaagtactacctgccccacctgttccccagcttcaccaagctgaccaacatctacaagcctgtgctggacatcccccacctgcggcccaagcctgtgtacatcaccaccacccgggacaatgaaaacatctacagcaccaagatcccctacatggccgcccgggtggtgttcatcaagtggatcgtgaccttcttcctggagaagaagtacctgacagccacccagaacaccaagaatggagtggatgtgctgcccaagatcatccaggtgtgccaccccagcagcttctacctgctgatgctggtgtag

SEQ ID NO: 21043 - DNA, 576 bp, synthetic construct
  source 1..576: mol_type = other DNA; note = Synthetic coding sequence
atgagcagcaccctgggcaagctgagcaaccaggtggaggagaccctgcccctgctgaagaagcccctgaagagggccatcaccaccctgatggccggcatcctgcggctggtggtgcagtggcccccaggccgcctgcagacagtgaccaagggcgtggagagcctcatctgcacagactggatccgccacaagttcaccaggagccgcatccctgagaaggtgttccaggccagcccagaagatcatgagaagtatggaggagacccccagaacccccacaagctgcacatcgtgacccgcatcaagagcaccaggagaagaccctactgggagaaggacatcatcaagatgctgggcctggagaaggcccacaccccccaggtgcacaagaacatccccagcgtgaatgccaagctgaaggtggtgaagcacctgatccgcatcaagcccctgaagctgccccagggcctgcctgctgaggagaacatgagcaacacctgcctgaagagcactggagagctggtggtgcagtggcacctgaagcctgtggagcagaaggcccacgagagctag

SEQ ID NO: 21044 - DNA, 483 bp, synthetic construct; identical to SEQ ID NO: 20009
  source 1..483: mol_type = other DNA; note = Synthetic coding sequence

SEQ ID NO: 21045 - DNA, 321 bp, synthetic construct
  source 1..321: mol_type = other DNA; note = Synthetic coding sequence
accttcctggagcagagcaagacccgcttcaacaagaactacaagggcatgagcctgagcaagatcaccaccaccgtgggcctgaacatcggcaccgtggatgtgggcaaggcccggctgatgttctgggacctgggcggccaggaggagctgcagagcctgtgggacaaggacaagaccaagtgtggggacctgggcaccctgcacagcagcaaggtgtctgccagcttccggctgcgggacctggccgctgaccaccacaggacccagaagtggcagaggccagatgtgggcacagctggctggctgcccctgccctag

SEQ ID NO: 21046 - DNA, 1524 bp, synthetic construct
  source 1..1524: mol_type = other DNA; note = Synthetic coding sequence
atggccgagctgcagatgctgctggaggaggagatccctgggggccggcgggccctgtttgacagctacaccaacctggagcgggtggccgactactgtgagaacaactacatccagagcgctgacaagcagagggccctggaggagaccaaggcctacaccacccagagcctggcctctgtggcctacctgatcaacaccctggccaacaacgtgctgcagatgctggacatccaggccagccagctgcggaggatggagagcagcatcaaccacatcagccagacagtggacatccacaaggagaaggtggcccggcgggagatcggcatcctgaccaccaacaagaacaccagcaggacccacaagatcatcgccccagccaacctggagaggcctgtgcgctacatcaggaagcccatcgactacaccatcctggatgacattggacatggagtgaaggtgtccacccagaacatgaagatgggcggcctgcccaggaccaccccacccacccagaagccacccagcccccccatgtctgggaagggcaccctgggccgccacagcccctaccgcaccctggagcctgtgcggccccctgtggtgcccaatgactatgtgcccagccccaccaggaacatggcccccagccagcagagccctgtgaggacagcctctgtgaaccagaggaacagaacctacagcagcagcggcagcagcggcggcagccaccccagcagccgcagcagcagccgggagaacagcggcagcggctctgtgggcgtgcccatcgctgtgcccacccccagcccccccagcgtcttccctgccccagctggcagcgctggcaccccacccctgcctgccaccagcgccagcgccccagcccccctggtgcctgccaccgtgcccagcagcacagccccagatgctgctgctgggggcgcccagaccctggctgatggcttcaccagccccaccccacctgtggtgagcagcaccccacccaccggccaccctgtgcagttctacagcatgaacagacctgccagccgccacaccccacccaccatcggcggcagcctgccctaccgccggccccccagcatcaccagccagaccagcctgcagaaccagatgaatggaggccccttctacagccagaaccctgtgtctgacaccccacctcctcctcctcctgtggaggagcctgtgtttgatgagagccccccacctcctcctcctcctgaggactatgaggaggaggaggccgctgtggtggagtacagcgacccctatgcagaagaagatcctccctgggcccccaggagctacctggagaaggtggtggccatctatgactacaccaaggacaaggaggatgagctgtccttccaggagggcgccatcatctacgtgatcaagaagaatgatgatggctggtatgaaggagtgatgaatggagtgacaggcctcttccctggcaactacgtggagagcatcatgcactacagcgagtag

SEQ ID NO: 21047 - DNA, 303 bp, synthetic construct
  source 1..303: mol_type = other DNA; note = Synthetic coding sequence
atggccagcgctggcacccagcactacagcatcggcctgcggcagaagaacagcttcaagcagagcggccccagcggcaccgtgcctgccaccccacctgagaagcccagcgagggccgggtgtggccccaggcccaccagcaggtgaagcccatctggaagctggagaagaagcaggtggagaccctgtctgctggcctgggccctggcctgctgggcgtgcccccccagcctgcctacttcttctgccccagcaccctgtgcagcagcggcaccacagctgtgattgctggccacagctag

SEQ ID NO: 21048 - DNA, 1212 bp, synthetic construct
  source 1..1212: mol_type = other DNA; note = Synthetic coding sequence
atggccagcgccctgcggcccccccgggtgcccaagcccaagggcgtgctgcccagccactactatgagagcttcctggagaagaagggcccctgtgaccgggactacaagaagttctgggccggcctgcagggcctgaccatctacttctacaacagcaacagagacttccagcacgtggagaagctgaacctgggcgcctttgagaagctgacagatgagatcccctggggcagcagccgggaccccggcacccacttcagcctcatcctgcgggaccaggagatcaagttcaaggtggagaccctggagtgccgggagatgtggaagggcttcatcctgactgtggtggagctgcgggtgcccacagacctgaccctgctgcccggccacctgtacatgatgtctgaggtgctggccaaggaggaggcccggcgggccctggagacccccagctgcttcctgaaggtgtcccggctggaggcccagctgctgctggagcgctacccagaatgtggcaacctgctgctgcggcccagcggagatggagcagatggagtgtctgtgaccacccggcagatgcacaacggcacccacgtggtgcgccactacaaggtgaagcgggagggccccaagtatgtgattgatgtggagcagcccttcagctgcaccagcctggatgctgtggtgaactactttgtgagccacaccaagaaggccctggtgcccttcctgctggatgaggactatgagaaggtgctgggctacgtggaggccgacaaggaaaatggagaaaatgtgtgggtggcccccagcgcccctggccctggccctgccccctgcaccggcggccccaagcccctgagccctgccagcagccaggacaagctgccccccctgccccccctgcccaaccaggaggagaactacgtgacccccatcggagatggccctgctgtggactatgagaaccaggatgtggccagcagctcctggcctgtgatcctgaagcccaagaagctgcccaagcccccagccaagctgcccaagccccctgtgggccccaagccagagcccaaggtgttcaatggaggcctgggcaggaagctgcctgtgagcagcgcccagcccctcttccccacagctggcctggccgacatgacagctgagctgcagaagaagctggagaagaggcgggccctggagcactag

SEQ ID NO: 21049 - DNA, 1551 bp, synthetic construct
  source 1..1551: mol_type = other DNA; note = Synthetic coding sequence
atgctgcggcggggcagccaggccctgcggcgcttcagcacaggccgggtgtacttcaagaacaagctgaagctggccctgattggccagagcctgtttggccaggaggtgtacagccacctgaggaaggagggccaccgggtggtgggcgtcttcaccgtgcctgacaaggatggcaaggctgaccccctggccctggccgctgagaaggatggcacccctgtgttcaagctgcccaagtggagggtgaagggcaagaccatcaaggaggtggccgaggcctacagatctgtgggcgctgagctgaatgtgctgcccttctgcacccagttcatccccatggacatcatcgacagccccaagcacggcagcatcatctaccaccccagcatcctgcccaggcacagaggagccagcgccatcaactggaccctcatcatgggagacaagaaggccggcttctctgtgttctgggcagatgatggcctggacaccggccccatcctgctgcagaggagctgtgatgtggagcccaatgacacagtggatgccctgtacaaccgcttcctgtttcctgagggcatcaaggccatggtggaggccgtgcagctgattgctgatggcaaggccccccgcatcccccagcctgaggagggcgccacctatgagggcatccagaagaaggaaaatgctgagatctcctgggaccagagcgctgaggtgctgcacaactggatccggggccatgacaaggtgcctggggcctggacagagatcaatggccagatggtgaccttctacggcagcaccctgctgaacagctctgtgcccccaggagagcccctggagatcaagggggccaagaagccaggcctggtgaccaagaatggcctggtgctgtttggaaatgatggcaaggccctgactgtgaggaacctgcagtttgaagatggcaagatgatcccagccagccagtacttcagcactggagagacctctgtggtggagctgacagctgaggaggtgaaggtggccgagaccatcaaggtgatctgggccggcatcctgagcaatgtgcccatcatcgaggacagcacagacttcttcaagagcggggccagctccatggatgtggcccggctggtggaggagatccggcagaagtgtggcggcctgcagctgcagaatgaagatgtgtacatggccaccaagtttgagggcttcatccagaaggtggtgaggaagctgcggggggaggaccaggaggtggagctggtggtggactacatcagcaaggaggtgaatgagatcatggtgaagatgccctaccagtgcttcatcaatggccagttcacagatgctgatgatggcaagacctatgacaccatcaaccccacagatggcagcaccatctgcaaggtgtcctatgccagcctggctgatgtggacaaggctgtggccgccgccaaggatgcctttgaaaatggagagtggggccgcatgaatgcccgggagcggggccgcctgatgtacagcatgaggatgaactag

SEQ ID NO: 21050 - DNA, 1581 bp, synthetic construct
  source 1..1581: mol_type = other DNA; note = Synthetic coding sequence
atggaggagatcccagcccaggaggccgccggcagcccccgggtgcagttccagagcctggagacccagagtgaatgtctgagccctgagccccagtttgtgcaggacacagacatggagcagggcctgaccggcggcttccccatcagcaagccagatggcatcagccagctggagcaggacctgcaggtgtttgacctggagaccaagacccgggaggtgctgagagatgactgcagtgatggagagacccgggaggagaacaagctgctgatccccaagcagaagatcagcgaggaggtgcacagctacaaggtgcgggtgggccgcctgaagcatgacatcacccaggtgcctgagacccgggaggtgtacaagtctgaggaccggctggagcggctgcaggagatcctgaggaagttcctgtacctggagcgggagttccggcagatcaccatcagcaaggagaccttcaccagcgagaagaacaatgaatgtcatgagcctgagaagagcttcagcctggacagcaccattgatgctgaccagagggtgctgcgcatccagaacacagatgacaatgacaagtatgacatgtccttcaaccagaacagcgccagcggcaagcatgagcacctgaacctgacagaggacttccagagcagcgagtgcaaggagagcctgatggacctgagccacctgaacaagtgggagagcatccccaacacagagaagagctacaagtgtgatgtgtgtgggaagatcttccaccagagcagcgccctgaccaggcaccagaggatccacacccgggagaagccctacaagtgcaaggaatgtgagaagagcttcagccagagcagcagcctgagccgccacaagaggatccacacccgggagaagccctacaagtgtgaggccagtgacaagagctgtgaggccagtgacaagagctgcagccccagcagcggcatcatccagcacaagaagatccacacccgggccaagagctacaagtgcagcagctgtgagagggtcttcagccgctctgtgcacctgacccagcaccagaagatccacaaggagatgccctgcaagtgcaccgtgtgtggcagtgacttctgccacaccagctacctgctggagcaccagagggtgcaccacgaggagaaggcctatgaatatgatgaatatggcctggcctacatcaagcagcagggcatccacttccgggagaagccctacacctgcagtgaatgtgggaaggacttccggctgaacagccacctgatccagcaccagaggatccacactggagagaaggcccacgagtgcaatgaatgtgggaaggccttcagccagaccagctgcctgatccagcaccacaagatgcacaggaaggagaagagctatgagtgcaatgaatatgagggcagcttcagccacagcagtgacctgatcctgcagcaggaggtgctgacccggcagaaggcctttgactgtgatgtgtgggagaagaacagcagccagagggcccacctggtgcagcaccagagcatccacaccaaggagaacagctag

SEQ ID NO: 21051 - DNA, 603 bp, synthetic construct; identical to SEQ ID NO: 21042
  source 1..603: mol_type = other DNA; note = Synthetic coding sequence

SEQ ID NO: 21052 - DNA, 540 bp, synthetic construct
  source 1..540: mol_type = other DNA; note = Synthetic coding sequence
aacatcaagccaggagagggcctgggcatgtacatcaagagcacctatgatggcctgcacgtgatcaccggcaccacagaaaatgtgggctggcagctgaagaacctggtgaagaagctgcgggagaaccccactggagtggtgctgctgctgaagaagaggcccaccggcagcttcaacttcaccccagcccccctgaagaacctgcgctggaagccacccctggtgcagaccagccccccaccagccaccacccagagccctgagagcaccatggacaccagcctgaagaaggagaagagcgccatcctggacctgtacatccccccacctcctgctgtgccctacagccccagagatgaaaatggcagctttgtgtatggaggcagcagcaagtgcaagcagcccctgcccggccccaagggcagcgagagccccaacagcttcctggaccaggagagcagaagaagacgcttcaccatcgctgacagcgaccagctgcccggctacagcgtggagaccaacatcctgcccacctag

SEQ ID NO: 21053 - DNA, 1368 bp, synthetic construct
  source 1..1368: mol_type = other DNA; note = Synthetic coding sequence
atgatgggcgcccccaacctgattgctgacagcatggagtatggcctgagctacagcgtcatctcctacctgaagaagctgagccagcaggccaagattgaaagtgacagagtgattggctctgtgggcaagaaggtggtgcaggagaccggcatcaaggtgcgcagccgcagccacggcctgtccatggcctacaggaaggacttccagcagctgctgcagggcatcagtgaagatgtgccccaccggctgctggacctgaacatgaaggagtacacaggcttccaggtggccctgctgaacaaggacctgaagccccagaccttcagaaatgcctatgacatccccaggaggaacctgctggaccacctgaccaggatgaggagcaacctgctgaagagcacccggcgcttcctgaagggccaggatgaggaccaggtgcacagcgtgcccatcgcccagatgggcaactaccaggagtacctgaagcaggtgcccagccccctgcgggagctggaccctgaccagccccggcggctgcacacctttggaaaccccttcaagctggacaagaagggcatgatgattgatgaagcagatgaatttgtggccggcccccagaacaagcacaagaggcctggagagcccaacatgcagggcatccccaagagaagacgctgcatgagccccctgctgcggggccggcagcagaaccctgtggtgaacaaccacatcggcggcaagggccccccagcccccaccacccaggcccagcctgacctgatcaagcccctgcccctgcacaagatcagcgagaccaccaatgacagcatcatccatgatgtggtggagaaccacgtggccgaccagctgagcagtgacatcaccccaaatgccatggacacagagttcagcgccagcagccctgccagcctgctggagcggcccaccaaccacatggaggccctgggccatgaccacctgggcaccaatgacctgactgtgggcggcttcctggagaaccacgaggagccccgggacaaggagcagtgtgccgaggagaacatcccagccagcagcctgaacaagggcaagaagctgatgcactgccgcagccatgaggaggtgaacacagagctgaaggcccagatcatgaaggagatcaggaagccaggcaggaaatatgagcgcatcttcaccctgctgaagcacgtgcagggcagcctgcagaccaggctcatcttcctgcagaatgtcatcaaggaggccagccgcttcaagaagaggatgctgattgagcagctggagaacttcctggatgagatccaccggcgggccaaccagatcaaccacatcaacagcaactag

SEQ ID NO: 21054 - DNA, 1467 bp, synthetic construct
  source 1..1467: mol_type = other DNA; note = Synthetic coding sequence
ctggactgtggcccccggctgcctgtggaggtgggccccagcctgagcagccccagcagcggctgtggggagggcagcatctctgtgggagaaaatgtgtctgatgtggcccccacccagccctggtggcccaacacccctggggacagcgtgtctgaggagctgggccctggccgcagcggggacacagaggacctgagccccaactggcccctgaacagccaggaggacacagctgcccagagcagccctggccgcggggaggaggccgaggccagcgctgctgaggcccagggcggggagcaggcctacctggccggcctggccggccagtaccacctggagcgctacccagacagctatgaatccatgtctgagccccccatcgcccacctgctgcggcctgtgctgccccgggcctttgccttccctgtggacccccaggtgcagagcgctgctgatgaaacagctgtgcagctgtctgagctgctgaccctgcctgtgctgatgaagaggagcatcacagcccccctggccgcccacatcagcctggtgaacaaggctgctgtggactacttctttgtggagctgcacctggaggcccactatgaggccctgcggcacttcctgctgatggaggatggagaatttgcccagagcctgagtgacctgctgtttgagaagctgggcgccggccagaccccaggagagctgctgaaccccctggtgctgaacagcgtgctgagcaaggccctgcagtgcagcctgcatggagacaccccccacgccagcaacctgagcctggccctgaagtacctgcctgaggtgtttgccccaaatgccccagatgtgctgagctgcctggagctgcgctacaaggtggactggcccctgaacatcgtcatcacagagggctgtgtgtccaagtacagcggggtcttctccttcctgctgcagctgaagctgatgatgtgggccctgaaggatgtgtgcttccacctgaagaggacagtgcccagcgctgctgctgtgcaggccagagatgctgccttccgggagggccaccctggcctgcaccggcagcctgaccctgcccggcacctggtgcgggtgcagggccaggtgggccaccggggccggcctggaggagaccctgcctgtgccaggagagtgcctgcccagggccgcctgcaggccgcccctgtgatgaatgtcatccacagcatcttcagcctggtgctgaagttccgcagccagctgatcagccaggcctggggccccccaggcggccccagaggagctgagcaccccaactttgccctgatgcagcagagctacaacaccttcaagtactacagccacttcctgttcaaggtggtgaccaagctggtgaacagaggctaccagccccacctggaggacttcctgctgcgcatcaacttcaacaactactaccaggatgcctag

SEQ ID NO: 21055 - DNA, 3819 bp, synthetic construct
  source 1..3819: mol_type = other DNA; note = Synthetic coding sequence
atggccaatgacagccctgccaagagcctggtggacatcgacctgagcagcctgcgggaccctgctggcatctttgagctggtggaggtggtgggcaatggcacctacggccaggtgtacaagggccgccacgtgaagacaggccagctggccgccatcaaggtgatggatgtgacagaagatgaggaggaggagatcaagctggagatcaacatgctgaagaagtacagccaccacaggaacatcgccacctactacggggccttcatcaagaagagccccccaggccatgatgaccagctgtggctggtgatggagttctgtggggccggcagcatcacagacctggtgaagaacaccaagggcaacaccctgaaggaggactggatcgcctacatcagccgggagatcctgcggggcctggcccacctgcacatccaccacgtgatccaccgggacatcaagggccagaatgtgctgctgacagaaaatgctgaggtgaagctggtggactttggagtgtctgcccagctggacagaacagtgggcagaagaaacaccttcatcggcaccccctactggatggcccctgaggtgattgcctgtgatgagaacccagatgccacctatgactacagaagtgacctgtggagctgtggcatcacagccatcgagatggccgagggcgccccacccctgtgtgacatgcaccccatgagggccctcttcctgatccccagaaatcctccaccccggctgaagagcaagaagtggagcaagaagttcttctccttcatcgagggctgcctggtgaagaactacatgcagaggcccagcacagagcagctgctgaagcaccccttcatccgggaccagcccaatgaaaggcaggtgcgcatccagctgaaggaccacatcgacaggaccaggaagaagagaggagagaaggatgaaacagaatatgagtacagcggcagcgaggaggaggaggaggaggtgcctgagcaggagggggagcccagcagcatcgtgaatgtgcctggagagagcaccctgcggcgggacttcctgcggctgcagcaggagaacaaggagaggtctgaggccctgcggcggcagcagctgctgcaggagcagcagctgcgggagcaggaggagtacaagaggcagctgctggccgagcggcagaagagaattgagcagcagaaggagcagaggcggcggctggaggagcagcagaggcgggagcgggaggcccggcggcagcaggagcgggagcagaggagaagagagcaggaggagaagaggcggctggaggagctggagaggaggaggaaggaggaggaggagcggcggcgggcagaggaggagaagagaagagtggagcgggagcaggagtacatccggcggcagctggaggaggagcagaggcacctggaggtgctgcagcagcagctgctgcaggagcaggccatgctgctgcatgaccaccggcggccccacccccagcacagccagcagcccccaccaccccagcaggagaggagcaagcccagcttccacgcccctgagcccaaggcccactatgagcctgctgaccgggcccgggaggtggaggaccgcttcaggaagaccaaccacagcagccctgaggcccagagcaagcagacaggccgggtgctggagccccctgtgcccagccgctctgagagcttcagcaatggaaattctgagagcgtgcacccagccctgcagaggcctgctgagccccaggtgcctgtgaggaccaccagccgcagccctgtgctgagcagaagagacagccccctgcagggcagcggccagcagaacagccaggccggccagaggaacagcaccagcattgagccccggctgctgtgggagcgggtggagaagctggtgccccggcccggcagcggcagcagcagcggcagcagcaacagcggcagccagcccggcagccaccctggcagccagagcggcagcggggagcgcttccgggtgcgcagcagcagcaagtctgagggcagccccagccagaggctggagaatgctgtgaagaagccagaggacaagaaggaggtgttccggcccctgaagccagctgacctgacagccctggccaaggagctgcgggctgtggaggatgtgcggcccccccacaaggtgacagactacagcagcagcagcgaggagagcggcaccacagatgaggaggatgatgatgtggagcaggagggcgcagatgagagcaccagcggccctgaggacaccagggctgccagcagcctgaacctgagcaatggagaaacagagagcgtgaagaccatgattgtgcatgatgatgtggagagcgagcccgccatgacccccagcaaggagggcaccctgattgtgcggcagagcacagtggaccagaagagggccagccaccacgagagcaatggatttgctggccgcatccacctgctgcctgacctgctgcagcagagccacagcagcagcaccagcagcaccagcagcagccccagcagcagccagcccacccccaccatgagcccccagaccccccaggacaagctgacagccaatgagacccagagcgccagcagcaccctgcagaagcacaagagcagcagcagcttcacccccttcatcgacccccggctgctgcagatcagccccagcagcggcaccaccgtgacctctgtggtgggcttcagctgtgatggcatgaggcctgaggccatccggcaggaccccaccaggaaaggatctgtggtgaatgtgaaccccaccaacacccggccccagagcgacaccccagagatcaggaagtacaagaagcgcttcaacagcgagatcctgtgtgccgccctgtggggcgtgaacctgctggtgggcacagagagcggcctgatgctgctggacaggagcggccagggcaaggtgtaccccctcatcaacagaagacgcttccagcagatggatgtgctggagggcctgaatgtgctggtgaccatcagcggcaagaaggacaagctgcgggtgtactacctgtcctggctgaggaacaagatcctgcacaatgaccctgaggtggagaagaagcagggctggaccaccgtgggggacctggagggctgtgtgcactacaaggtggtgaagtatgaaagaatcaagttcctggtgattgccctgaagagctctgtggaggtgtatgcctgggcccccaagccctaccacaagttcatggccttcaagagctttggagagctggtgcacaagcccctgctggtggacctgactgtggaggagggccagaggctgaaggtgatctacggcagctgtgccggcttccacgctgtggatgtggacagcggctctgtgtatgacatctacctgcccacccacatccagtgcagcatcaagccccacgccatcatcatcctgcccaacacagatggcatggagctgctggtgtgctatgaagatgagggcgtgtatgtgaacacctacggccgcatcaccaaggatgtggtgctgcagtggggcgagatgcccacctctgtggcctacatccgcagcaaccagaccatgggctggggcgagaaggccatcgagatccgctctgtggagaccggccacctggatggagtcttcatgcacaagagggcccagaggctgaagttcctgtgtgaaagaaatgacaaggtgttctttgcctctgtgcgcagcggcggcagcagccaggtgtacttcatgaccctgggccgcaccagcctgctgtcctggtag

SEQ ID NO: 21056 - DNA, 363 bp, synthetic construct
  source 1..363: mol_type = other DNA; note = Synthetic coding sequence
gccctgcagatcagcgagaacctcttcagcaacaaggtgctgaatgccctgaagccagagaaggatgtggatggagtgacagacatcaacctgggcaagctggtgagaggagatgcccatgaatgttttgtgtcccctgtggccaaggccgtcatcgagctgctggagaagtctgtgggcgtgaacctggatggcaagaagatcctggtggtgggcgcccacggcagcctggaggccgccctgcagtgcctcttccagaggaagggctccatgaccatgagcatccagtggaagacccggcagctgcagagcaagacagagagccgctctgtgacccggctggagtgcagaagagtcatctag

SEQ ID NO: 21057 - DNA, 1866 bp, synthetic construct
  source 1..1866: mol_type = other DNA; note = Synthetic coding sequence
atggtgtccatcctgagcagctttgagagccggctgatgaagctggagaacagcatcatccctgtgcacaagcagacagagaacctgcagaggctgcaggagaatgtggagaagaccctgagctgcctggaccacgtgatctcctactaccacgtggccagtgacacagagaagatcatccgggagggccccaccggccgcctggaggagtacctgggctccatggccaagatccagaaggctgtggagtacttccaggacaacagcccagacagccctgagctgaacaaggtgaagctgctgtttgagcggggcaaggaggccctggagagcgagttccgcagcctgatgaccaggcacagcaaggtggtgtcccctgtgctgatcctggacctgatctctggagatgatgacctggaggcccaggaggatgtgaccctggagcacctgcctgagagcgtgctgcaggatgtgatccgcatcagccgctggctggtggagtatggcaggaaccaggacttcatgaatgtgtactaccagatccgcagcagccagctggacaggagcatcaagggcctgaaggagcacttccacaagagcagcagcagcagcggcgtgccctacagccctgccatccccaacaagaggaaggacacccccaccaagaagcctgtgaagaggcctggcaccatcaggaaggcccagaacctgctgaagcagtacagccagcacggcctggatggcaagaagggcggcagcaacctgatccccctggagggcagagatgacatgctggatgtggagacagatgcctacatccactgtgtgtctgcctttgtgaagctggcccagagcgagtaccagctgctggccgacatcatccctgagcaccaccagaagaagacctttgacagcctcatccaggatgccctggatggcctgatgctggagggagaaaatattgtgtctgctgccaggaaggccatcgtgagacatgacttcagcacagtgctgactgtgttccccatcctgcggcacctgaagcagaccaagccagagtttgaccaggtgctgcagggcacagctgccagcaccaagaacaagctgcccggcctcatcacctccatggagaccatcggggccaaggccctggaggactttgctgacaacatcaagaatgaccctgacaaggagtacaacatgcccaaggatggcaccgtgcatgagctgaccagcaatgccatcctcttcctgcagcagctgctggacttccaggagacagctggggccatgctggccagccagggcaaggtgctgggcaacctgcagctgaacctgctgagcaagagcaaggtgtatgaggaccctgccctgagcgccatcttcctgcacaacaactacaactacatcctgaagagcctggagaagtctgagctgatccagctggtggccgtgacccagaagacagctgagaggagctaccgggagcacatcgagcagcagatccagacctaccagaggtcctggctgaaggtgacagactacatcgccgagaagaacctgcccgtcttccagcccggggtgaagctgcgggacaaggagcggcagatcatcaaggagcgcttcaagggcttcaatgatggcctggaggagctgtgcaagatccagaaggcctgggccatcccagacacagagcagagggaccgcatccggcaggcccagaagaccatcgtgaaggagacctacggggccttcctgcagaagtttggatctgtgcccttcaccaagaaccctgagaagtacatcaagtatggagtggagcaggtgggggacatgattgaccggctgtttgacaccagcgcctag

SEQ ID NO: 21058 - DNA, 1344 bp, synthetic construct
  source 1..1344: mol_type = other DNA; note = Synthetic coding sequence
atggacttcctgctgggcaaccccttcagcagccctgtgggccagagaattgagaaggccacagatggcagcctgcagagcgaggactgggccctgaacatggagatctgtgacatcatcaatgaaacagaggagggccccaaggatgccctgcgggctgtgaagaagagaattgtgggcaacaagaacttccacgaggtgatgctggccctgactgtgctggagacctgtgtgaagaactgtggccaccgcttccacgtgctggtggccagccaggactttgtggagagcgtgctggtgaggaccatcctgcccaagaacaacccccccaccatcgtgcatgacaaggtgctgaacctgatccagacagtgttcaacagcgagacccagagcggccaggacagcgtgggcacagacagcagccagcaggaggacagcggccagcacgccgcccccctgcctgccccacccatcctgagcggggacacccccatcgcccccaccccagagcagatcggcaagctgcggtctgagctggagatggtgtctggaaatgtgcgggtgatgtctgagatgctgacagagctggtgcccacccaggccgagcctgctgacctggagctgctgcaggagctgaacagaacctgccgggccatgcagcagagggtgctggagctgatcccccagatcgccaatgagcagctgacagaggagctgctgattgtgaatgacaacctgaacaacgtgttcctgcggcatgaaagatttgagcgcttcagaacaggccagaccaccaaggcccccagcgaggccgagcctgctgctgacctgattgacatgggccctgaccctgctgccactggaaacctgagcagccagctggccggcatgaacctgggcagcagctctgtgcgggccggcctgcagagcctggaggccagcggccgcctggaggatgaatttgacatgtttgccctgacccggggcagcagcctggccgaccagaggaaggaggtgaagtatgaggccccccaggccacagatggcctggccggggccctggatgcccggcagcagagcactggagccatccctgtgacccaggcctgcctgatggaggacatcgagcagtggctgagcacagatgtgggcaatgatgctgaggagcccaagggcgtgaccagcgaggagtttgacaagttcctggaggagcgggccaaggctgctgaccggctgcccaacctgagcagccccagcgctgagggccccccaggcccccccagcggccctgcccccaggaagaagacccaggagaaggatgatgacatgctgtttgccctgtag

SEQ ID NO: 21059 - DNA, 2103 bp, synthetic construct
  source 1..2103: mol_type = other DNA; note = Synthetic coding sequence
atggccaccatgatcccccctgtgaagctgaagtggctggagcacctgaacagctcctggatcacagaagattctgagagcatcgccacccgggagggcgtggccgtgctgtacagcaagctggtgagcaacaaggaggtggtgcccctgccccagcaggtgctgtgcctgaagggcccccagctgcctgactttgagcgggagagcctgagcagtgatgagcaggaccactacctggatgccctgctgagcagccagctggccctggccaagatggtgtgcagcgacagcccctttgctggggccctgaggaagaggctgctggtgctgcagagggtcttctacgccctgagcaacaagtaccatgacaagggcaaggtgaagcagcagcagcacagccctgagagcagcagcggcagcgcagatgtgcacagcgtgtctgagcggcccaggagcagcacagatgccctgattgagatgggcgtgaggacaggcctgagcctgctgtttgccctgctgcggcagagctggatgatgcctgtgtctggccctggcctgagcctgtgcaatgatgtgatccacacagccatcgaggtggtgagcagcctgccccccctgagcctggccaatgaaagcaagatcccccccatgggcctggactgcctgagccaggtgaccaccttcctgaagggcgtgaccatccccaacagcggggctgacaccctgggccggcggctggccagcgagctgctgctgggcctggccgcccagaggggcagcctgcgctacctgctggagtggattgagatggccctgggcgccagcgctgtggtgcacaccatggagaagggcaagctgctgagcagccaggagggcatgatcagctttgactgcttcatgaccatcctgatgcagatgagaagaagcctcatcagcgagaaccaggacagcgcagatgtggacccccaggagcacagcttcaccaggaccattgatgaggaggccgagatggaggagcaggccgagcgggaccgggaggagggccaccctgagccagaagatgaggaggaggagcgggagcacgaggtgatgacagctgggaagatcttccagtgcttcctgagcgcccgggaggtggcccggagccgggaccgggacaggatgaacagcggggccggcagcggggcccgggcagatgatcctccaccccagagccagcaggagaggagagtgtccacagacctgcctgagggccaggatgtgtacacagctgcctgcaacagcgtcatccaccgctgtgccctgctgatcctgggcgtgtcccctgtgattgatgagctgcagaagaggcgggaggagggccagctgcagcagcccagcaccagcgccagcgagggcggcggcctgatgaccaggtctgagagcctgacagctgagagccggctggtgcacaccagccccaactaccgcctcatcaagagccgctctgagagtgacctgagccagcctgagagtgatgaggagggctacgccctgtctggaagaagaaatgtggacctggacctggccgccagccacaggaagaggggccccatgcacagccagctggagagcctgagtgacagctgggcccggctgaagcacagccgggactggctgtgcaacagcagctacagctttgaaagtgactttgacctgaccaagagcctgggcgtgcacaccctgattgaaaatgtggtgtcctttgtgtctggagatgtgggcaatgcccctggcttcaaggagcctgaggagagcatgagcaccagcccccaggccagcatcatcgccatggagcagcagcagctgcgggcagagctgcggctggaggccctgcaccagatcctggtgctgctgagcggcatggaggagaagggcagcatcagcctggccggcagccggctgagcagcggcttccagagcagcaccctgctgacctctgtgcggctgcagttcctggccggctgcttcggcctgggcaccgtgggccacactggaggaaaaggagagagcggccgcctgcaccactaccaggacggcatccgggccgcccggggctactag

SEQ ID NO: 21060 - DNA, 537 bp, synthetic construct
  source 1..537: mol_type = other DNA; note = Synthetic coding sequence
atggctgacagagctgctgctgagcgggcctgcaaggaccccaaccccatcattgatggcaggaaggccaacgtgaacctggcctacctgggcgccaagccccgcatcatgcagcccggctttgcctttggagtgcagcagctgcacccagccctgatccagaggcccttcggcatcccagcccactacgtgtacccccaggcctttgtgcagcccggggtggtgatcccccacgtgcagcccacagctgctgctgccagcaccaccccctacatcgactacacaggagctgcctatgcccagtacagcgctgctgctgctgctgctgctgctgctgctgcctatgaccagtacccctatgctgccagccctgctgctgctggctacgtgacagctgggggctacggctatgctgtgcagcagcccatcacagctgctgcccctggaacagctgctgctgctgctgctgctgctgctgctgctgctgccttcggccagtaccagccccagcagctgcagacagacaggatgcagtag

SEQ ID NO: 21061 - DNA, 579 bp, synthetic construct; identical to SEQ ID NO: 20257
  source 1..579: mol_type = other DNA; note = Synthetic coding sequence

SEQ ID NO: 21062 - DNA, 555 bp, synthetic construct
  source 1..555: mol_type = other DNA; note = Synthetic coding sequence
atgaacagaagccagcccggcctgctgaggacagatcctgtgcctgaggagggagaagatgtggccgccaccatcagcgccacagagaccctgtctgaggaggagcaggaggagctgcggcgggagctggccaaggtggaggaggagatccagaccctgagccaggtgctggccgccaaggagaagcacctggccgagatcaagaggaagctgggcatcaacagcctgcaggagctgaagcagaacatcgccaagggctggcaggatgtgacagccaccagcgcctacaagaagaccagcgagaccctgagccaggccggccagaaggccagcgctgccttcagctctgtgggcagcgtcatcaccaagaagctggaggatgtgaagaacagccccaccttcaagagctttgaggagaaggtggagaacctgaagagcaaggtgggcggcaccaagccagctggaggagactttggagaggtgctgaacagcgctgccaatgccagcgccaccaccacagagcccctgcctgagaagacccaggagagcctgtag

SEQ ID NO: 21063 - DNA, 1620 bp, synthetic construct; identical to SEQ ID NO: 19050
  source 1..1620: mol_type = other DNA; note = Synthetic coding sequence

SEQ ID NO: 21064 - DNA, 612 bp, synthetic construct
  source 1..612: mol_type = other DNA; note = Synthetic coding sequence
atggagccccccatggagcccagcggcggggagcaggagcccggggctgtgcgcttcctggacctgccctgggaggatgtgctgctgccccacgtgctgaacagagtgcccctgcggcagctgctgcggctgcagagggtgtcccgggccttccgcagcctggtgcagctgcacctggccggcctgcggagatttgatgctgcccaggtgggcccccagatccccagggctgccctggcccggctgctgagagatgctgagggcctgcaggagctggccctggccccctgccacgagtggctgagtgatgaggacctggtgcctgtgctggccaggaacccccagctgcggtctgtggccctgggcggctgcggccagctgagcagaagagccctgggcgccctggccgagggctgcccccggctgcagaggctgagcctggcccactgtgactgggtggatggcctggccctgcggggcctggccgaccgctgcccagccctggaggagctggacctgacagcctgccggcagctgaaggatgaggccatcgtgtacctggcccagaggagaggagctggcctgcggagcctgagcctggccgtgaactag

SEQ ID NO: 21065 - DNA, 1824 bp, synthetic construct
  source 1..1824: mol_type = other DNA; note = Synthetic coding sequence
atggcccggggcctgggcaaggccagcggcttccctgctggccccagcggggctgagctgcctgccagcggcagaagaagaggccccctcatcagcctcttccctgctgtgctggccagcgaggccgccatgagctacccagcagatgattatgaaagtgaagctgcctatgacccctatgcctaccccagcgactatgacatgcacactggagaccccaagcaggacctggcctatgagcggcagtatgagcagcagacctaccaggtgattcctgaggtgatcaagaacttcatccagtacttccacaagacagtgtctgacctgattgaccagaaggtgtatgagctgcaggccagccgggtgtccagtgatgtgattgaccagaaggtgtatgagatccaggacatctatgaaaattcctggaccaagctgacagagcgcttcttcaagaacaccccctggccagaggccgaggccatcgccccccaggtgggcaatgatgctgtgttcctgatcctgtacaaggagctgtactaccgccacatctatgccaaggtgtctgggggccccagcctggagcagagatttgagagctactacaactactgcaacctcttcaactacatcctgaatgctgatggccctgcccccctggagctgcccaaccagtggctgtgggacatcattgatgagttcatctaccagttccagagcttcagccagtaccgctgcaagacagccaagaagtctgaggaggagattgacttcctgcggagcaaccccaagatctggaatgtgcacagcgtgctgaatgtgctgcacagcctggtggacaagagcaacatcaaccggcagctggaggtgtacaccagcggcggggaccctgagagcgtggccggggagtatggccgccacagcctgtacaagatgctgggctacttcagcctggtgggcctgctgcggctgcacagcctgctgggggactactaccaggccatcaaggtgctggagaacatcgagctgaacaagaagtccatgtacagccgggtgcctgagtgccaggtgaccacctactactacgtgggctttgcctacctgatgatgaggcgctaccaggatgccatccgggtgtttgccaacatcctgctgtacatccagaggaccaagtccatgttccagaggaccacctacaagtatgagatgatcaacaagcagaatgagcagatgcacgccctgctggccatcgccctgaccatgtaccccatgagaattgatgagagcatccacctgcagctgcgggagaagtatggagacaagatgctgaggatgcagaagggggacccccaggtgtatgaggagctgttctcctacagctgccccaagttcctgagccctgtggtgcccaactatgacaacgtgcaccccaactaccacaaggagcccttcctgcagcagctgaaggtgttcagtgatgaggtgcagcagcaggcccagctgagcaccatccgctccttcctgaagctgtacaccaccatgcctgtggccaagctggccggcttcctggacctgacagagcaggagttccgcatccagctgctggtgttcaagcacaagatgaagaacctggtgtggaccagcggcatcagcgccctggatggagagttccagagcgccagcgaggtggacttctacatcgacaaggacatgatccacatcgctgacaccaaggtggcccggcgctacggggacttcttcatccggcagatccacaagtttgaggagctgaacagaaccctgaagaagatgggccagaggccctag

SEQ ID NO: 21066 - DNA, 1308 bp, synthetic construct
  source 1..1308: mol_type = other DNA; note = Synthetic coding sequence
atggccgccagcagcctggagcagaagctgagccggctggaggccaagctgaagcaggagaaccgggaggcccggaggagaattgacctgaacctggacatcagcccccagaggccccggcccatcatcgtcatcaccctgagccctgccccagcccccagccagagagctgccctgcagctgcccctggccaatgatggcggcagccgcagccccagcagcgagagcagcccccagcaccccaccccaccagcccggcccaggcacatgctgggcctgcccagcaccctcttcacccccaggtccatggagagcattgaaattgaccagaagctgcaggagatcatgaagcagacaggctacctgaccatcggcggccagcgctaccaggccgagatcaatgacctggagaacctgggggagatgggcagcggcacctgtggccaggtgtggaagatgaggttcaggaagacaggccacgtgattgctgtgaagcagatgaggaggagcggcaacaaggaggagaacaagaggatcctgatggacctggatgtggtgctgaagagccatgactgcccctacatcgtgcagtgcttcggcaccttcatcaccaacacagatgtgttcatcgccatggagctgatgggcacctgtgccgagaagctgaagaagaggatgcagggccccatccctgagcgcatcctgggcaagatgacagtggccatcgtgaaggccctgtactacctgaaggagaagcatggagtcatccacagagatgtgaagcccagcaacatcctgctggatgagcggggccagatcaagctgtgtgactttggcatcagcggccgcctggtggacagcaaggccaagaccaggtctgctggctgtgccgcctacatggcccctgagagaattgatcctccagaccccaccaagccagactatgacatccgggcagatgtgtggagcctgggcatcagcctggtggagctggccaccggccagttcccctacaagaactgcaagacagactttgaggtgctgaccaaggtgctgcaggaggagccccccctgctgcccggccacatgggcttcagcggggacttccagagctttgtgaaggactgcctgaccaaggaccacaggaagaggcccaagtacaacaagctgctggagcacagcttcatcaagagatatgagaccctggaggtggatgtggcctcctggttcaaggatgtgatggccaagacagagagccccaggaccagcggcgtgctgagccagccccacctgcccttcttcagatag

SEQ ID NO: 21067 - DNA, 3006 bp, synthetic construct
  source 1..3006: mol_type = other DNA; note = Synthetic coding sequence
atggccagcagccccctgcccggccccaatgacatcctgctggccagccccagcagcgccttccagcctgacaccctgagccagcccaggcctggccacgccaacctgaagcccaaccaggtgggccaggtgatcctgtatggcatccccatcgtgtccctggtgattgatggccaggagcggctgtgcctggcccagatcagcaacaccctgctgaagaacttctcctacaatgagatccacaacagaagagtggccctgggcatcacctgtgtgcagtgcacccctgtgcagctggagatcctgcggcgggccggggccatgcccatcagcagcagaagatgtggcatgatcaccaagcgggaggccgagcggctgtgcaagagcttcctgggagaaaatcggccccccaagctgcctgacaactttgcctttgatgtgtcccatgaatgtgcctggggctgccggggcagcttcatcccagcccgctacaacagcagccgggccaagtgcatcaagtgcagctactgcaacatgtacttcagccccaacaagttcatcttccacagccacaggaccccagatgccaagtacacccagccagatgctgccaacttcaacagctggaggaggcacctgaagctgacagacaagagcccccaggatgagctggtgtttgcctgggaggatgtgaaggccatgttcaacggcggcagcaggaagagggccctgccccagcccggggcccacccagcctgccaccccctgagctctgtgaaggctgctgctgtggccgctgctgctgctgtggccggcggcggcggcctgctgggcccccacctgctgggcgcccctcctcctcctcctcctcctcctccacccctggccgagctggccggggcccctcatgcccaccacaagaggcccaggtttgatgatgatgatgacagcctgcaggaggccgctgtggtggccgccgccagcctgtctgctgctgctgccagcctgtctgtggccgccgccagcggcggggccggcactggaggcggcggggccggcggcggctgtgtggccggcgtgggcgtgggcgctggggccggggccggggccggggccggggccaagggccccaggagctaccctgtgattcctgtgcccagcaagggcagctttggaggagtgctgcagaagtttcctggctgcggcggcctcttcccccacccctacaccttccctgctgctgctgctgccttcagcctgtgccacaagaaggaggatgctggagctgctgctgaggccctgggcggggccggggccggcggggccggggccgcccccaaggccggcctgagcggcctcttctggccagctggcaggaaggatgccttctacccacccttctgcatgttctggccacccaggacccctgggggcctgcctgtgcccacctacctgcagcccccaccccagcccccatctgccctgggctgtgccctgggggagagccctgccctgctgcggcaggccttcctggacctggccgagcccggcggggccgccggcagcgctgaggccgcccctcctcctggccagcccccccaggtggtggccaacggccctggcagcggccccccacctcctgctgggggcgccggcagcagagatgccctgtttgagagccccccaggcggcagcggcggggactgcagcgctggcagcaccccacctgctgacagcgtggccgctgctggagctggagctgctgctgctggcagcggccctgctggcagccgggtgcctgccccccaccacccccacctgctggagggcaggaaggccggcggcggcagctaccaccacagcagcgccttccggcctgtgggcggcaaggatgatgctgagagcctggccaagctgcacggggccagcgctggggccccccacagcgcccagacccacccccaccaccaccaccacccccaccaccaccaccaccaccaccaccccccccagccccccagccccctgctgctgctgcccccccagccagatgagcccggcagcgagcggcaccacccagcccctcctcctcctcctcctcctcctcctcctccacccctggcccagcacccccaccaccggggcctgctgagccctgggggcaccagctgctgctaccccagcgaggacagcagtgaagatgaagatgatgaggaggaggagcaggaggtggatgtggagggccacaagcccccagagggggaggaggaggaggagggccgggaccctgatgatgatgaggaggaggatgaggagacagaggtgctgctgggggaccccctggtgggcggcggccgcttcctgcagggccggggccccagcgagaagggcagcagccgggaccgggccccagctgtggccggggccttccccctgggcctgaacagcagccggctgctgcaggaggatggcaagctgggggaccccggcagtgacctgcccccacctcctcctccacccctggccccccagaaggccagcggcggcggcagcagcagccctggcagccctgtgcaccaccccagcctggaggagcagcccagctacaaggacagccagaagaccaaggagaacaaccaggtgattgtgtccaccaaggatgacaacagcttcagtgacaagaacaaggagcacagcttcttcatcacagacagtgatgccagcggcggggacttctggagggagaggtctggagagcacacccaggagaccaacagcccccacagcctgaagaaggatgtggagaacatgggcaaggaggagctgcagaaggtgctgtttgagcagattgacctgcggcggcggctggagcaggagttccaggtgctgaagggcaacaccagcttccctgtgttcaacaacttccaggaccagatgaagcgggagctggcctaccgggaggagatggtgcagcagctgcagatcgtgtcctgcatcagcacctag

SEQ ID NO: 21068 - DNA, 198 bp, synthetic construct
  source 1..198: mol_type = other DNA; note = Synthetic coding sequence
atggccatggcccccagccccagcctggtgcaggtgtacaccagccctgctgctgtggccgtgtgggagtggcaggacggcctgggcacctggcacccctacagcgccaccgtgtgcagcttcatcgagcagcagtttgtgcagcagaagggccagcgcttcggcctgggcagcctggcccacagcatccccctgtag

SEQ ID NO: 21069 - DNA, 1041 bp, synthetic construct
  source 1..1041: mol_type = other DNA; note = Synthetic coding sequence
atgatcagcaggcctgcctggctgtggggcgctgagatgggcgccaatgagcacggcgtgtgcatcgccaatgaggccatcaacacccgggagcctgctgctgagattgaggccctgctgggcatggacctggtgcggctgggcctggagcggggggagacagccaaggaggccctggatgtgattgtgtccctgctggaggagcacggccagggcggcaactactttgaagatgccaacagctgccacagcttccagagcgcctacctgattgtggacagagatgaggcctgggtgctggagaccatcggcaagtactgggccgctgagaaggtgacagaaggagtgcgctgcatctgcagccagctgagcctgaccaccaagatggatgctgagcaccctgagctgcggagctatgcccagagccagggctggtggacaggagagggggagttcaacttcagcgaggtgttcagccctgtggaggaccacctggactgtggggccggcaaggacagcctggagaagcaggaggagagcatcaccgtgcagaccatgatgaacaccctgcgggacaaggccagcggcgtgtgcattgattctgagttcttcctgaccacagccagcggcgtgtctgtgctgccccagaacagaagcagcccctgcatccactacttcaccggcaccccagaccccagccgcagcatcttcaagcccttcatctttgtggatgatgtgaagctggtgcccaagacccagagcccctgctttggagatgatgatcctgccaagaaggagccccgcttccaggagaagccagacagaagacatgagctgtacaaggcccacgagtgggcccgggccatcatcgagagtgaccaggagcagggcaggaagctgcggagcaccatgctggagctggagaagcagggcctggaggccatggaggagatcctgaccagcagcgagcccctggaccctgctgaggtgggggacctcttctatgactgtgtggacacagagatcaagttcttcaagtag

SEQ ID NO: 21070 - DNA, 1620 bp, synthetic construct; identical to SEQ ID NO: 19050
  source 1..1620: mol_type = other DNA; note = Synthetic coding sequence

SEQ ID NO: 21071 - DNA, 390 bp, synthetic construct; identical to SEQ ID NO: 19988
  source 1..390: mol_type = other DNA; note = Synthetic coding sequence

SEQ ID NO: 21072 - DNA, 1740 bp, synthetic construct
  source 1..1740: mol_type = other DNA; note = Synthetic coding sequence
atgtctgctgccaaccctgagacccccaacagcaccatcagccgggaggccagcacccagagcagcagcgctgctgccagccagggctgggtgctgcctgagggcaagatcgtgcccaacacagtgtttgtgggcggcattgatgccaggatggatgaaacagagatcggcagctgcttcggccgctatggctctgtgaaggaggtgaagatcatcaccaacagaactggagtgtccaagggctacggctttgtgtcctttgtgaatgatgtggatgtgcagaagatcgtgggcagccagatccacttccacggcaagaagctgaagctgggccctgccatcaggaagcagaagctgtgtgcccggcacgtgcagccccggcccctggtggtgaaccccccacctccaccccagttccagaatgtgtggaggaaccccaacacagagacctacctgcagccccagatcacccccaaccctgtgacccagcacgtgcagagcgctgccaaccctgagacccccaacagcaccatcagccgggaggccagcacccagagcagcagcgctgctgccagccagggctgggtgctgcctgagggcaagatcgtgcccaacacagtgtttgtgggcggcattgatgccaggatggatgaaacagaaattggcagctgcttcggccgctatggctctgtgaaggaggtgaagatcatcaccaacagaactggagtgtccaagggctacggctttgtgtcctttgtgaatgatgtggatgtgcagaagatcgtgggcagccagatccacttccacggcaagaagctgaagctgggccctgccatcaggaagcagaagctgtgtgcccggcacgtgcagccccggcccctggtggtgaaccccccacctccaccccagttccagaatgtgtggaggaaccccaacacagagacctacctgcagccccagatcacccccaaccctgtgacccagcacgtgcaggcctacagcgcctacccccacagccctggccaggtgatcaccggctgccagctgctggtgtacaactaccaggagtaccccacctacccagattctgccttccaggtgaccaccggctaccagctgcctgtgtacaactaccagcccttccctgcctaccccaggagccccttccaggtgacagctggctaccagctgcctgtgtacaactaccaggccttccctgcctaccccaacagccccttccaggtggccaccggctaccagtttcctgtgtacaactaccagcccttccctgcctaccccagcagccccttccaggtgacagctggctaccagctgcctgtgtacaactaccaggccttccctgcctaccccaacagccccttccaggtggccaccggctaccagtttcctgtgtacaactaccaggccttccctgcctaccccaacagccctgtgcaggtgaccaccggctaccagctgcctgtgtacaactaccaggccttccctgcctaccccagcagccccttccaggtgaccaccggctaccagctgcctgtgtacaactaccaggccttccctgcctaccccaacagcgctgtgcaggtgaccaccggctaccagttccacgtgtacaactaccagatgccaccccagtgccctgtgggggagcagaggaggaacctgtggacagaggcctacaagtggtggtacctggtgtgcctgatccagaggcgggactag

SEQ ID NO: 21073 - DNA, 831 bp, synthetic construct
  source 1..831: mol_type = other DNA; note = Synthetic coding sequence
atgtatgcctcctggaccaaggcctgccggggcctggaggagctgatcaacctgacccggctgaatgtgtcctacaaccacattgatgacctgagcggcctcatccccctgcacggcatcaagcacaagctgcgctacatcgacctgcacagcaacagaattgacagcatccaccacctgctgcagtgcatggtgggcctgcacttcctgaccaacctgatcctggagaaggatggagatgacaaccctgtgtgccgcctgcccggctaccgggccgtcatcctgcagaccctgccccagctgcgcatcctggactgcaagaacatctttggagagcctgtgaacctgacagagatcaacagcagccagctgcagtgcctggagggcctgctggacaacctggtgtccagtgacagccccctgaacatcagtgaagatgagatcatcgacaggatgcctgtgatcacagcccccattgatgagctggtgcccctggagcagtttgccagcacccccagtgatgctgtgctgaccagcttcatgtctgtgtgccagagcagcgagcctgagaagaacaaccatgaaaatgacctgcagaatgagatcaagctgcagaagctggatgaccagatcctgcagctgctgaatgagaccagcaacagcattgacaacgtgctggagaaggacccccggcccaagagggacacagacatcaccagcgagagtgactatggcaacagcaggaagaatggagagaccaagaaggctgctgctggcagcacagacaagacagacccccggggcggcacccagagcttcagctgcaggtag

SEQ ID NO: 21074 - DNA, 1995 bp, synthetic construct
  source 1..1995: mol_type = other DNA; note = Synthetic coding sequence
atgggagatgatggcagccccccagccaagaagatgatcacagacatccacgccaacgggaagaccatcaacaaggtgcccaccgtgaagaaggagcacctggatgattatggagaggcccctgtggagacagatggagagcacgtgaagaggacctgcacctctgtgcctgagaccctgcacctgaaccccagcctgaagcacaccctggcccagttccacctgagcagccagagcagcctgggcggccctgctgccttcagcgcccggcacagccaggagagcatgagccccaccgtcttcctgcccctgcccagcccccaggtgctgcccggccccctgctgatccccagcgacagcagcacagagctgacccagacagtgctggagggggagagcatcagctgcttccaggtgggcggggagaagaggctgtgcctgccccaggtgctgaacagcgtgctgcgggagttcaccctgcagcagatcaacacagtgtgtgatgagctgtacatctactgcagccgctgcaccagtgaccagctgcacatcctgaaggtgctgggcatcctgcccttcaatgcccccagctgtggcctcatcaccctgacagatgcccagaggctgtgcaatgccctgctgcggcccaggaccttcccccagaatggatctgtgctgcctgccaagagcagcctggcccagctgaaggagaccggcagcgcctttgaggtggagcatgaatgtctgggcaagtgccagggcctgtttgccccccagttctacgtgcagccagatgccccctgcatccagtgcctggagtgctgcggcatgtttgccccccagacctttgtgatgcacagccacaggagcccagacaagaggacctgccactggggctttgagagcgccaagtggcactgctacctgcacgtgaaccagaagtacctgggcaccccagaggagaagaagctgaagatcatcctggaggagatgaaggagaagttctccatgaggtctgggaagaggaaccagagcaagacagatgcccccagcggcatggagctgcagagctggtaccctgtgatcaagcaggagggggaccacgtgtcccagacccacagcttcctgcaccccagctactacctgtacatgtgtgacaaggtggtggcccccaacgtgtccctgaccagcgctgtgtcccagagcaaggagctgaccaagacagaggccagcaagagcatcagccggcagagcgagaaggcccacagcagcggcaagctgcagaagacagtgtcctacccagatgtgtccctggaggagcaggagaagatggacctgaagaccagccgggagctgtgcagccggctggatgccagcatcagcaacaacagcaccagcaagaggaagtctgagagcgccacctgcaacctggtgcgggacatcaacaaggtgggcatcggcctggtggccgccgccagcagccccctgctggtgaaggatgtgatctgtgaagatgacaagggcaagatcatggaggaggtgatgaggacctacctgaagcagcaggagaagctgaacctgatcctgcagaagaagcagcagctgcagatggaggtgaagatgctgagcagcagcaagtccatgaaggagctgacagaggagcagcagaacctgcagaaggagctggagagcctgcagaatgaacatgcccagaggatggaggagttctacgtggagcagaaggacctggagaagaagctggagcagatcatgaagcagaagtgcacctgtgacagcaacctggagaaggacaaggaggccgagtatgccggccagctggccgagctgcggcagaggctggaccatgctgaggccgaccggcaggagctgcaggatgagctgcggcaggagcgggaggcccggcagaagctggagatgatgatcaaggagctgaagctgcagatcctgaagagcagcaagacagccaaggagtag

SEQ ID NO: 21075 - DNA, 1068 bp, synthetic construct
  source 1..1068: mol_type = other DNA; note = Synthetic coding sequence
atgggcagaagagacctggtgtctgggggcagcaatgaaggaaatggcaaggaggactgggccatgaagacagtgtccctgcgctggaccaagctgccccctgtgaagagcgccatccggggccaggcccctgtggtgccctacatgagatatggccacagcacagtgctgattgatgacacagtgctgctgtggggcggcagaaatgacacagaaggagcctgcaatgtgctgtatgcctttgatgtgaacacccacaagtggttcaccccccgggtgtctggcaccgtgcctggggccagagatggccacagcgcctgtgtgctgggcaagatcatgtacatctttggaggctatgagcagcaggccgactgcttcagcaatgacatccacaagctggacaccagcaccatgacctggaccctcatctgcaccaagggcagccctgcccgctggagggacttccacagcgccaccatgctgggcagccacatgtatgtgtttggaggccgggctgacagatttggccccttccacagcaacaatgagatctactgcaaccgcatccgggtgtttgacaccaggacagaggcctggctggactgcccccccacccctgtgctgcctgagggccgccgcagccacagcgccttcggctacaatggagagctgtacatctttggaggctacaatgcccggctgaacagacacttccatgacctgtggaagttcaaccctgtgtccttcacctggaagaagattgagcccaagggcaagggcccctgcccccggcggcggcagtgctgctgcatcgtgggggacaagatcgtgctgtttggaggcaccagccccagccctgaggagggcctgggagatgaatttgacctgattgaccacagcgacctgcacatcctggacttcagccccagcctgaagaccctgtgcaagctggccgtcatccagtacaacctggaccagagctgcctgccccatgacatccgctgggagctgaatgccatgaccaccaacagcaacatcagccggcccatcgtgagcagccacggctag

SEQ ID NO: 21076 - DNA, 1245 bp, synthetic construct; identical to SEQ ID NO: 18327
  source 1..1245: mol_type = other DNA; note = Synthetic coding sequence

SEQ ID NO: 21077 - DNA, 1200 bp, synthetic construct
  source 1..1200: mol_type = other DNA; note = Synthetic coding sequence
atggccactggagacctgaagaggagcctgaggaacctggagcaggtgctgcggctgctgaactacccagaggaggtggactgtgtgggcctcatcaagggggaccctgctgccagcctgcccatcatctcctacagcttcaccagctacagcccctacgtgacagagctgatcatggagagcaatgtggagctgattgccaagaatgacctgcgcttcattgatgctgtgtacaagctgctgcgggaccagttcaactacaagcccatcctgaccaagaagcagttcatccagtgtggctttgctgagtggaagatccagatcgtgtgtgacatcctgaactgtgtgatgaagaagcacaaggagctgagcagcctgcagaagatccccagccagcagaggaagaagatcagcagcggcaagtctgagccccccctgggcaatgagaagatctctgctgaggccgtgggcgtggacatcagcggccgcttcatgaccagcggcaagaagaaggctgtggtgatccgccacctgtacaatgaagataatgtggacatcagcgaggacaccctgagccccatcacagatgtgaatgaggccgtggatgtgtctgacctgaatgccacagagatcaagatgcctgaggtgaaggtgcctgagatcaaggccgagcagcaggatgtgaatgtgaaccctgagatcacagccctgcagaccatgctggccgagtgccaggagaacctgaagaagctgaccagcattgagaagaggctggactgcctggagcagaagatgaagggcaaggtgatggtggatgagaacacctggaccaacctgctgagccgggtgaccctgctggagacagagatgctgctgagcaagaagaatgatgagttcatcgagttcaatgaggtgtctgaagattatgccagctgcagcgacatggacctgctgaacccccacaggaagtctgaggtggagaggcctgccagcatccccctgagcagcggctacagcacagccagcagtgacagcaccccccgggccagcacagtgaactactgcggcctgaatgagatcagcgagaacttccctgcctggagcgccaccagcagctgcagcagcctgtcctggctgctgcggggccacaccagctacctgagcagccagagctttgcctggcccctgagctgtgtgtag

SEQ ID NO: 21078 - DNA, 1317 bp, synthetic construct
  source 1..1317: mol_type = other DNA; note = Synthetic coding sequence
tgatgtgccggggctgagcggccccggcggcggggccgcctgtgggacagcagcggcgtgccccagaggcagaagaggcctggcccctggaggacccagacccaggagcagatgagcagagatgtgtgcatccacacctggccctgcacctactacctggagcccaagaggcgctgggtgacaggccagctgagcctgaccagcctgagcctgcgcttcatgacagacagcactggagagatcctggtgtccttccccctgagcagcatcgtggagatcaagaaggaggccagccacttcatcttcagcagcatcaccatcctggagaagggccacgccaagcactggttcagcagcctgcggcccagcagaaatgtggtgttcagcatcatcgagcacttctggagggagctgctgctgagccagcctggagctgtggctgatgcctctgtgcccaggaccagaggagaggagctgaccggcctgatggccggcagccagaagaggctggaggacacagcccgggtgctgcaccaccagggccagcagctggacagcgtgatgaggggcctggacaagatggagagtgacctggaggtggccgaccggctgctgacagagctggagagccctgcctggtggcccttcagcagcaagctgtggaagaccccacctgagaccaagcccagagaagatgtgtccatgaccagctgtgagccctttgggaaggagggcatcctgatcaagatcccagctgtgatcagccacaggacagagagccacgtgaagccaggccgcctgactgtgctggtgtctggcctggagatccatgacagcagcagcctgctgatgcacagatttgagcgggaggatgtggatgacatcaaggtgcacagcccctatgagatcagcatccggcagcgcttcatcggcaagccagacatggcctaccgcctcatcagcgccaagatgcctgaggtgatccccatcctggaggtgcagttcagcaagaagatggagctgctggaggatgccctggtgctgcggagcgcccggaccagcagccctgctgagaagagctgcagcgtgtggcacgccgccagcggcctgatgggccgcaccctgcaccgggagcccccagctggggaccaggagggcacagccctgcacctgcagaccagcctgcctgccctgtctgaggccgacacccaggagctgacccagggcttccggcccatgagcctgagcacccagacagtgctggtgatgctgtgcagcgagagcgctggggccctgtggaggcagaggctgtcctag

SEQ ID NO: 21079 - DNA, 711 bp, synthetic construct
  source 1..711: mol_type = other DNA; note = Synthetic coding sequence
atgacaggctatgaggcccggctcatcaccttcggcacctggatgtacagcgtgaacaaggagcagctggcccgggccggcttctacgccatcggccaggaggacaaggtgcagtgcttccactgcggcggcggcctggccaactggaagcccaaggaggacccctgggagcagcacgccaagtggtacccaggctgcaagtacctgctggaggagaagggccacgagtacatcaacaacatccacctgaccaggagcctggagggcgccctggtgcagaccaccaagaagacccccagcctgaccaagaggatcagtgacaccatcttccccaaccccatgctgcaggaggccatccgcatgggctttgacttcaaggatgtgaagaagatcatggaggagcgcatccagaccagcggcagcaactacaagaccctggaggtgctggtggccgacctggtgtctgcccagaaggacaccacagaaaatgagctgaaccagaccagcctgcagcgggagatcagccctgaggagcccctgcggcggctgcaggaggagaagctgtgcaagatctgcatggacagacacatcgctgtggtgttcatcccctgtggccacctggtgacctgcaagcagtgtgccgaggccgtggaccgctgccccatgtgcagcgctgtgattgacttcaagcagagggtcttcatgtcctag

SEQ ID NO: 21080 - DNA, 285 bp, synthetic construct
  source 1..285: mol_type = other DNA; note = Synthetic coding sequence
atgaaccccaccaaccccttcagcggccagcagcccagcgccttcagcgccagcagcagcaatgtgggcaccctgcccagcaagccacccttccgcttcggccagcccagcctgtttggccagaacagcaccctgagcggcaagagcagcggcttcagccaggtgtcctccttccctgccagcagcggcgtgagccacagcagctctgtgcagaccctgggcttcacccagaccagctctgtgggccccttcagcggcctggagcacaccagcacctttgtgtag

SEQ ID NO: 21081 - DNA, 723 bp, synthetic construct
  source 1..723: mol_type = other DNA; note = Synthetic coding sequence
atggccatcgtgcagaccctgcctgtgcccctggagcccgcccctgaggccgccacagccccccaggcccctgtgatgggctctgtgagcagcctcatcagcggccggccctgccctgggggccctgccccacccaggcaccacggccccccaggccccaccttcttccggcagcaggacggcctgctgcggggcggctatgaggcccaggagcccctgtgcccagctgtgccccccaggaaggctgtgcctgtgaccagcttcacctacatcaatgaagacttcagaacagagagcccccccagccccagcagtgatgtggaggatgcccgggagcagagggcccacaatgcccacctgcggggccccccacccaagctgatccctgtgtctgggaagctggagaagaacatggagaagatcctgatccggcccacagccttcaagcctgtgctgcccaagcccaggggggcccccagcctgcccagcttcatgggcccccgggccaccggcctgagcggcagccagggcagcctgacccagctgtttggaggccctgccagcagcagcagcagcagcagcagcagcagcgctgctgacaagcccctggccttcagcggctgggccagcggctgccccagcggcaccctgagtgacagcggcaggaacagcctgagcagcctgcccacctacagcactggaggagctgagcccaccacctag

SEQ ID NO: 21082 - DNA, 1317 bp, synthetic construct; identical to SEQ ID NO: 18931
  source 1..1317: mol_type = other DNA; note = Synthetic coding sequence

SEQ ID NO: 21083 - DNA, 678 bp, synthetic construct
  source 1..678: mol_type = other DNA; note = Synthetic coding sequence
atggaggaggaggagatgaatgatggcagccagatggtgcgcagccaggagagcctgaccttccaggatgtggccgtggacttcacccgggaggagtgggaccagctgtacccagcccagaagaacctgtacagagatgtgatgctggagaactacagaaacctggtggccctgggctaccagctgtgcaagccagaggtgattgcccagctggagctggaggaggagtgggtgattgagcgggacagcctgctggacacccaccctggggaccagagccacgtgatgtctgtggtgcgcagctctgtgcacgcccgctggatcgtgggcaaggtgattggcaccaagatgcagaagacagccaaggtgcgggtgacccggctggtgctggacccctacctgctgaagtacttcaacaagaggaagacctactttgcccatgatgccctgcagcagtgcaccgtgggggacatcgtgctgctgcgggccctgcctgtgccccgggccaagcacgtgaagcatgagctggccgagatcgtgttcaaggtgggcaaggtgattgatcctgtgacaggcaagccctgtgccggcaccacctacctggagagccccctgagcagcgagaccacccagctgagcaagaacctggaggagctgaacatcagcagcgcccagtag

SEQ ID NO: 21084 - DNA, 753 bp, synthetic construct
  source 1..753: mol_type = other DNA; note = Synthetic coding sequence
atgaccaccaagaacctggagaccaaggtgacagtgaccagcagccccatcagaggagctggagatggcatggagacagaggagccccccaagtctgtggaggtgaccagcggcgtgcagagcaggaagcaccacagcctgcagagcccctggaagaaggctgtgcccagcgagagccctggggtgctgcagctgggcaagatgctgacagagaaggccatggaggtgaaggctgtgcgcatcctggtgcccaaggccgccatcacccatgacatccccaacaagaacaccaaggtgaagagcctgggccaccacaagggggagttcctgggccagagcgagggcgtgattgagcccaacaaggagctgtctgaggtgaagaatgtgctggagaagctgaagaacagcgagcggcggctgctgcaggacaaggagggcctgagcaaccagctgcgggtgcagacagaggtgaaccgggagctgaagaagctgctggtggcctctgtgggagatgacctgcagtaccactttgagcggctggcccgggagaagaaccagctgatcctggagaatgaggccctgggcaggaacacagcccagctgtctgagcagctggagaggatgagcatccagtgtgatgtgtggaggagcaagttcctggccagccgggtgatggctgatgagctgaccaacagccgggccgccctgcagaggcagaacagagatgcccacggggccatccaggacctgtag

SEQ ID NO: 21085 - DNA, 387 bp, synthetic construct
  source 1..387: mol_type = other DNA; note = Synthetic coding sequence
atgctgtgctggggctactggagcctgggccagcccggcatcagcaccaacctgcagggcatcgtggccgagccccaggtgtgtggcttcatcagtgacagatctgtgaaggaggtggcctgtggcggcaaccacagcgtcttcctgctggaggatggagaggtgtacacctgtggcctgaacaccaagggccagctgggccacgagcgggagggcaacaagccagagcagatcggggccctggccgaccagcacatcatccacgtggcctgtggggagagccacagcctggccctgagtgaccggggccagctgttctcctggggcgccggcagtgatggccagctgggcctgatgaccacagaggacagcgtggccgtgccctag

SEQ ID NO: 21086 - DNA, 1617 bp, synthetic construct
  source 1..1617: mol_type = other DNA; note = Synthetic coding sequence
atggatgtggacaaggagctgggcatggagagcgtgaaggccggggccagcggcaagccagagatgaggctgggcacccaggaggagaccagtgaaggagatgccaatgaaagcagcctgctggtgctgagcagcaatgtgcccctgctggccctggagttcctggagatcgcccaggccaaggagaaggccttcctgcccatggtgagccacaccttccacatgaggacagaggagagtgatgccagccaggagggagatgacctgcccaagagcagcgccaacaccagccaccccaagcaggatgacagccccaagagcagcgaggagaccatccagcccaaggagggggacatccccaaggcccctgaggagaccatccagagcaagaaggaggacctgcccaagagcagcgagaaggccatccagcccaaggagagcaacatccccaagagcagcgccaagcccatccagcccaagctgggcaacatccccaaggcctctgtgaagcccagccagcccaaggagggggacatccccaaggcccctgaggagaccatccagagcaagaaggaggacctgcccaagagcagcgaggaggccatccagcccaaggagggggacatccccaagagcagcgccaagcccatccagcccaagctgggcaacatcgccaagacctctgtgaagcccagccagcccaaggagagtgacatccccaagagccctgaggagaccatccagcccaaggagggggacatccccaagagcagcgccaagcccatccagcccaagctgggcaacatccccaaggcctctgtgaagcccagccagcccaaggagggggacatcagcaagagccctgaggaggccatccagcccaaggagggggacctgcccaagagcctggaggaggccatccagcccaaggagggggacatccccaagagcctggaggaggccatccagcccaaggagggggacatccccaagagccctgaggagaccatccagcccaagaagggggacatccccaagagccctgaggaggccatccagcccaaggagggggacatccccaagagccccaagcaggccatccagcccaaggagggggacatccccaagagcctggaggaggccatcccccccaaggagattgacatccccaagagccctgaggagaccatccagcccaaggaggatgacagccccaagagcctggaggaggccacccccagcaaggagggggacatcctgaagccagaggaggagaccatggagttccctgagggggacaaggtgaaggtgatcctgagcaaggaggactttgaggccagcctgaaggaggccggggagcggctggtggccgtggacttcagcgccacctggtgtggcccctgcaggaccatccggcccttcttccacgccctgtctgtgaagcatgaagatgtggtgttcctggaggtggatgctgacaactgtgaggaggtggtgagagaatgtgccatcatgtgtgtgcccaccttccagttctacaagaaggaggagaaggtggatgagctgtgtggggccctgaaggagaagctggaggccgtgattgctgagctgaagtag

SEQ ID NO: 21087 - DNA, 153 bp, synthetic construct
  source 1..153: mol_type = other DNA; note = Synthetic coding sequence
atggccagcgaggagctgcagaaggacctggaggaggtgaaggtgctgctggagaaggccaccaggaagagggtgagagatgccctgacagctgagaagagcaagattgaaacagagatcaagaacaagatgcagcagaagagccagaagtag

SEQ ID NO: 21088 - DNA, 1527 bp, synthetic construct; identical to SEQ ID NO: 18911
  source 1..1527: mol_type = other DNA; note = Synthetic coding sequence

SEQ ID NO: 21089 - DNA, 3846 bp, synthetic construct
  source 1..3846: mol_type = other DNA; note = Synthetic coding sequence
atgaccttctacagctggatcccctaccaccggcaggcccccctgaaccaccggcgggtgtgcagcgctgagggcgccggcagccctggccctgccctggacccccgctggctgcccacagaggcccacctgctggaggcccaccggctgctgctgcagagcgtgctgtgtgaccggccccgggagagcatccagctgcacttccggctgtccatggccagccagctgcaggtgttcagccccccatctgtgagcagcagcgccttctgcagcgccaagaagctgaagattgagcccagcggctgggatgtgtctggccagagcagcaatgacaagtactacacccacagcaagaccctgcctgccacccagggccaggccaacagcagccaccaggtggccaacttcaacatcccagcctatgaccagggcctgctgctgcctgccccagctgtggagcacatcgtggtgacagctgctgacagcagcggcagcgctgccaccagcaccttccagagcagccagaccctgacccacaggagcaatgtgtccctgctggagccctaccagaagtgtggcctgaagaggaagtctgaggaggtggacagcaatggatctgtgcagatcatcgaggagcacccccccctgatgctgcagaacagaacagtggtgggcgctgctgccaccaccaccaccgtgaccaccaagagcagcagcagcagtggagagggggactaccagctggtgcagcacgagatcctgtgcagcatgaccaacagctatgaggtgctggagttcctgggccggggcaccttcggccaggtggccaagtgctggaagaggagcaccaaggagatcgtggccatcaagatcctgaagaaccaccccagctatgcccggcagggccagatcgaggtgtccatcctgagccggctgagcagtgaaaatgctgatgagtacaactttgtgcgctcctatgagtgcttccagcacaagaaccacacctgcctggtgtttgagatgctggagcagaacctgtatgacttcctgaagcagaacaagttcagccccctgcccctgaagtacatccggcccatcctgcagcaggtggccacagccctgatgaagctgaagagcctgggcctcatccatgctgacctgaagccagagaacatcatgctggtggaccctgtgcggcagccctacagagtgaaggtgattgactttggaagtgccagccacgtgtccaaggctgtgtgcagcacctacctgcagagccgctactaccgggcccctgagatcatcctgggcctgcccttctgtgaggccatcgacatgtggagcctgggctgtgtgattgctgagctgttcctgggctggcccctgtacccaggggcctctgaatatgaccagatccgctacatcagccagacccagggcctgcctgctgagtacctgctgtctgctggcaccaagaccacccgcttcttcaacagagaccccaacctgggctaccccctgtggaggctgaagaccccagaggagcacgagctggagaccggcatcaagagcaaggaggccaggaagtacatcttcaactgcctggatgacatggcccaggtgaacatgagcacagacctggagggcacagacatgctggccgagaaggctgacagaagagagtacatcgacctgctgaagaagatgctgaccattgatgctgacaagaggatcacccccctgaagaccctgaaccaccagtttgtgaccatgacccacctgctggacttcccccacagcaaccacgtgaagagctgcttccagaacatggagatctgcaagagaagagtgcacatgtatgacacagtgtcccagatcaagagccccttcaccacccacgtggcccccaacaccagcaccaacctgaccatgtccttcagcaaccagctgaacacagtgcacaaccaggcctctgtgctggccagcagcagcacagctgctgctgccaccctgagcctggccaacagtgatgtgtccctgctgaactaccagagcgccctgtaccccagcagcgctgcccctgtgcctggggtggcccagcagggcgtgtccctgcagcccggcaccacccagatctgcacccagacagaccccttccagcagaccttcatcgtgtgccccccagccttccagacaggcctgcaggccaccaccaagcacagcggcttccctgtgaggatggacaatgctgtgcccatcgtgccccaggccccagctgcccagcccctgcagatccagagcggcgtgctgacccagggcagctgcacccccctgatggtggccaccctgcacccccaggtggccaccatcaccccccagtatgctgtgcccttcaccctgagctgtgccgccggccgcccagccctggtggagcagacagctgctgtgctgcaggcctggccaggcggcacccagcagatcctgctgcccagcacctggcagcagctgcccggggtggccctgcacaacagcgtgcagcccacagccatgatccctgaggccatgggcagcggccagcagctggccgactggagaaatgcccacagccacggcaaccagtacagcaccatcatgcagcagcccagcctgctgaccaaccacgtgaccctggccacagcccagcccctgaatgtgggcgtggcccacgtggtgcggcagcagcagagcagcagcctgcccagcaagaagaacaagcagagcgcccctgtgagcagcaagagcagcctggatgtgctgcccagccaggtgtacagcctggtgggcagcagccccctgcggaccaccagcagctacaacagcctggtgcctgtgcaggaccagcaccagcccatcatcatcccagacacccccagcccccctgtgtctgtcatcaccatccgcagtgacacagatgaggaggaggacaacaagtacaagcccagcagcagcggcctgaagcccaggagcaatgtcatctcctatgtgacagtgaatgacagcccagacagcgacagcagcctgagcagcccctacagcacagacaccctgagcgccctgcggggcaacagcggctctgtgctggagggccctggccgggtggtggctgatggcaccggcaccaggaccatcatcgtgccccccctgaagacccagctgggggactgcaccgtggccacccaggccagcggcctgctgagcaacaagaccaagcctgtggcctctgtgtctggccagagcagcggctgctgcatcacccccaccggctaccgggcccagagaggaggcaccagcgctgcccagcccctgaacctgagccagaaccagcagagcagcgctgcccccaccagccaggagaggagcagcaacccagccccccggcggcagcaggcctttgtggcccccctgagccaggccccctacaccttccagcacggcagccccctgcacagcacaggccacccccacctggccccagccccagcccacctgcccagccaggcccacctgtacacctacgccgcccccaccagcgctgctgccctgggcagcaccagcagcatcgcccacctgttcagcccccagggcagcagcagacatgctgctgcctacaccacccaccccagcaccctggtgcaccaggtgcctgtgtctgtgggccccagcctgctgaccagcgcctctgtggccccagcccagtaccagcaccagtttgccacccagagctacatcggcagcagccggggcagcaccatctacacaggctaccccctgagccccaccaagatcagccagtacagctacctgtag

SEQ ID NO: 21090 - DNA, 1071 bp, synthetic construct; identical to SEQ ID NO: 19927
  source 1..1071: mol_type = other DNA; note = Synthetic coding sequence

SEQ ID NO: 21091 - DNA, 2748 bp, synthetic construct
  source 1..2748: mol_type = other DNA; note = Synthetic coding sequence
atgcagggcccagatgcccccctgctgctgagcgcccgggagctgggccctggaagaagaggcagcgcctcctggtaccggcaggagggcggcgctgtgtgcaactggctgaggaagccccagcccctggagcccaggaccagcttccccagcgccaggagaagtgagttccggcccccccggcggctgccctgggccggccctgccagcgcccagagcgaggagggccacgccggcggccgctgccaggccggcagccctgccccagcccggcggctgagcggggccttcaagaccctggtgcccggcacccacgcccagggcgccagtgacacccaccccctgggccccccccacacccctgtgctggaccccagcccccaggacggcttccctgtgctgtggaggggcagcagcaaggccagccacatgaaccggctgagaaatgccaagatctacgtggagagagctgtgaagcagaagaagatcttcaccatccagggctgctaccctgtgatccgctgcctgctgcggcggcggggctgggtggagaagaagatggtgcacaggagcggccccaccctgctgcccccccagaaggacctggacagcagcgccatgggagacagcgacaccacagaagatgaagatgaagatgaagatgaggagttccagcccagccagctgtttgattttgatgacctgctgaagtttgatgacctggatggcacccacgccctgatggtgggcctgtgcctgaacctgaggaacctgccctggtttgatgaggtggatgccaacagcttcttcccccgctgctactgcctgggcgcagaagatgacaagaaggccttcatcgaggacttctggctgacagctgccagaaatgtgctgaagctggtggtgaagtctgagtggaagagctaccccatccaggccgtggaggaggaggccagcggggacaagcagcccaagaagcaggagaagaaccctgtgctggtgtccccagagtttgtggatgaggccctgtgtgcctgtgaggagtacctgagcaacctggcccacatggacatcgacaaggacctggaggcccccctgtacctgaccccagagggctggagcctcttcctgcagcgctactaccaggtggtgcatgaaggagctgagctgcggcacctggacacccaggtgcagagatgtgaggacatcctgcagcagctgcaggccgtggtgccccagattgacatggagggggacaggaacatctggatcgtgaagccaggggccaagagccggggccggggcatcatgtgcatggaccacctggaggagatgctgaagctggtgaatggaaatcctgtggtgatgaaggatggcaagtgggtggtgcagaagtacatcgagcggcccctgctgatcttcggcaccaagtttgacctgcggcagtggttcctggtgacagactggaaccccctgactgtgtggttctacagagacagctacatccgcttcagcacccagcccttcagcctgaagaacctggacaacagcgtgcacctgtgcaacaacagcatccagaagcacctggagaacagctgccaccgccaccccctgctgcccccagacaacatgtggagcagccagcgcttccaggcccacctgcaggagatgggcgccccaaatgcctggagcaccatcatcgtgcccggcatgaaggatgctgtgattcatgccctgcagaccagccaggacacagtgcagtgcaggaaggccagctttgagctgtatggagctgactttgtgtttggagaggacttccagccctggctgattgagatcaatgccagccccaccatggcccccagcacagctgtgacagcccggctgtgtgccggcgtgcaggccgacaccctgcgggtggtgattgacaggatgctggacaggaactgtgacaccggggcctttgagctgatctacaagcagcctgctgtggaggtgccccagtatgtgggcatccggctgctggtggagggcttcaccatcaagaagcccatggccatgtgccacaggaggatgggcgtgcggcctgctgtgcccctgctgacccagaggggcagcggggaggcccggcaccacttccccagcctgcacaccaaggcccagctgcccagcccccacgtgctgcggcaccagggccaggtgctgcggcggcagcacagcaagctggtgggcaccaaggccctgagcaccaccgggaaggccctgcggaccctgcccacagccaaggtgttcatcagcctgccccccaacctggacttcaaggtggcccccagcatcctgaagcccaggaaggccccagccctgctgtgcctgcggggcccccagctggaggtgccctgctgcctgtgccccctgaagtctgagcagttcctggcccctgtgggccgcagccggcccaaggccaacagcaggccagactgtgacaagcccagggctgaggcctgccccatgaagaggctgagccccctgaagcccctgcccctggtgggcaccttccagaggagaagaggcctgggggacatgaagctgggcaagcccctgctgcgcttccccacagccctggtgctggaccccacccccaacaagaagaagcaggtgaagtacctgggcctggacagcattgctgtgggcggcagccgggtggatggagcccggccctgcaccccaggcagcacagcccgggcctag

SEQ ID NO: 21092 - DNA, 2463 bp, synthetic construct
  source 1..2463: mol_type = other DNA; note = Synthetic coding sequence
atgaggatcagcagctgcagtgatgagagcagcaacagcaacagcagcaggaagagtgacaaccacagccctgctgtggtgaccaccaccgtgagcagcaagaagcagcccagcgtgctggtgaccttccccaaggaggagaggaagtctgtgtctgggaaggccagcatcaagctgtctgagaccatcagcgagggcaccagcaacagcctgagcacctgcaccaagagcggccccagccccctgagcagccccaacgggaagctgactgtggccagccccaagaggggccagaagcgggaggagggctggaaggaggtggtgagaagaagcaagaaggtgtctgtgcccagcaccgtcatcagccgggtgattggccggggcggctgcaacatcaatgccatccgggagttcaccggggcccacattgatattgacaagcagaaggacaagacaggagaccgcatcatcaccatccggggcggcacagagagcacccggcaggccacccagctgatcaatgccctgatcaaggaccctgacaaggagattgatgagctgatccccaagaaccggctgaagagcagcagcgccaacagcaagattggcagcagcgcccccaccaccacagctgccaacaccagcctgatgggcatcaagatgaccaccgtggccctgagcagcaccagccagacagccacagccctgactgtgcctgccatcagcagcgccagcacccacaagaccatcaagaaccctgtgaacaacgtgcggcccggcttccctgtgtccctgcccctggcctaccccccaccccagtttgcccacgccctgctggccgcccagaccttccagcagatccggcccccccggctgcccatgacccactttggaggcaccttccccccagcccagagcacctggggccccttccctgtgcggcccctgagccctgcccgggccaccaacagccccaagccccacatggtgcccaggcacagcaaccagaacagcagcggcagccaggtgaacagcgctggcagcctgaccagcagccccaccaccaccaccagcagcagcgccagcacagtgcccggcaccagcaccaacggcagccccagcagccccagcgtgcggcggcagctgtttgtgacagtggtgaagaccagcaatgccaccaccaccaccgtgaccaccacagccagcaacaacaacacagcccccaccaatgccacctaccccatgcccacagccaaggagcactaccctgtgagcagccccagcagccccagccccccagcccagcccggcggcgtgtccaggaacagccccctggactgtggcagcgccagccccaacaaggtggccagcagcagcgagcaggaggccggcagcccccctgtggtggagaccaccaacacccggccccccaacagcagcagcagcagcggcagcagcagcgcccacagcaaccagcagcagcccccaggctctgtgtcccaggagcccaggcctcccctgcagcagagccaggtgcccccacctgaggtgaggatgacagtgccccccctggccaccagcagcgcccctgtggccgtgcccagcacagcccctgtgacctaccccatgccccagacccccatgggctgcccccagcccacccccaagatggagaccccagccatccggcccccacctcatggcaccacagccccccacaagaacagcgcctctgtgcagaacagctctgtggccgtgctgtctgtgaaccacatcaagaggccccacagcgtgcccagctctgtgcagctgcccagcaccctgagcacccagagcgcctgccagaacagcgtgcacccagccaacaagcccatcgcccccaacttcagcgcccccctgcccttcggccccttcagcaccctgtttgagaacagccccaccagcgcccacgccttctggggcggctctgtggtgagcagccagagcaccccagagagcatgctgagcggcaagagcagctacctgcccaacagcgaccccctgcaccagagcgacaccagcaaggcccctggcttccggccccccctgcagaggcctgcccccagccccagcggcatcgtgaacatggacagcccctacggctctgtgacccccagcagcacccacctgggcaactttgccagcaacatcagcggcggccagatgtatggccctggggcccccctgggcggggccccagctgctgccaacttcaaccggcagcacttcagccccctgagcctgctgaccccctgcagcagcgccagcaatgacagcagcgcccagagcgtgtcctctggagtgcgggcccccagccctgcccccagctctgtgcccctgggcagcgagaagcccagcaatgtgtcccaggacatcgtggccagcggccccctgaagggcctggtggccatcaagaccaagtag

SEQ ID NO: 21093 - DNA, 6033 bp, synthetic construct
  source 1..6033: mol_type = other DNA; note = Synthetic coding sequence
atggagaaggccaccgtgcctgtggccgccgccacagctgctgagggggagggcagccccccagctgtggccgctgtggccggccccccagctgctgctgaggtgggcggcggcgtgggcggcagcagccgggcccggagcgccagcagcccccggggcatggtgcgggtgtgtgacctgctgctgaagaagaagccaccccagcagcagcaccacaaggccaagaggaacagaacctgccggccccccagcagcagcgagagcagcagtgacagcgacaacagcggcggcggcggcggcggcggcggcggcggcggcggcggcggcggcaccagcagcaacaacagcgaggaggaggaggatgatgatgatgaggaggaggaggtgtctgaggtggagagcttcatcctggaccaggatgacctggagaaccccatgctggagacagccagcaagctgctgctgagcggcacagcagatggagctgacctgaggacagtggaccctgagacccaggcccggctggaggccctgctggaggccgccggcatcggcaagctgagcacagcagatggcaaggcctttgctgaccctgaggtgctgcggcggctgaccagctctgtgtcctgtgccctggatgaagctgctgctgccctgaccaggatgagagctgagagcacagccaatgccggccagagcgacaacagaagcctggccgaggcctgcagtgaaggagatgtgaatgctgtgaggaagctgctgattgagggccgctctgtgaatgagcacacagaggagggggagagcctgctgtgcctggcctgcagcgctggctactatgagctggcccaggtgctgctggccatgcacgccaacgtggaggaccggggcatcaagggggacatcacccccctgatggccgccgccaacggcggccacgtgaagatcgtgaagctgctgctggcccacaaggcagatgtgaatgcccagagcagcactggaaacacagccctgacctacgcctgtgccggcggctacgtggatgtggtgaaggtgctgctggagagcggggccagcattgaggaccacaatgaaaatggccacacccccctgatggaggccggcagcgctggccacgtggaggtggcccggctgctgctggagaatggagctggcatcaacacccacagcaatgagttcaaggagagcgccctgaccctggcctgctacaagggccacctggagatggtgcgcttcctgctggaggccggggctgaccaggagcacaagacagatgagatgcacacagccctgatggaggcctgcatggatggccacgtggaggtggcccggctgctgctggacagcggggcccaggtgaacatgcctgctgacagctttgagagccccctgaccctggccgcctgtggcggccacgtggagctggccgccctgctgattgagcggggggccagcctggaggaggtgaatgatgagggctacacccccctgatggaggccgcccgggagggccacgaggagatggtggccctgctgctgggccagggcgccaacatcaatgcccagacagaggagacccaggagacagccctgaccctggcctgctgcggcggcttcctggaggtggccgacttcctgatcaaggccggggctgacatcgagctgggctgcagcacccccctgatggaggccgcccaggagggccacctggagctggtgaagtacctgctggccgccggggccaacgtgcacgccaccacagccaccggggacacagccctgacctacgcctgtgaaaatggccacacagatgtggctgatgtgctgctgcaggccggggctgacctggagcatgaaagtgaaggaggccgcacccccctgatgaaggccgcccgggccggccacgtgtgcaccgtgcagttcctgatcagcaagggggccaacgtgaacagaaccacagccaacaatgaccacacagtgctgagcctggcctgtgccggcggccacctggccgtggtggagctgctgctggcccacggggctgaccccacccaccggctgaaggatggcagcaccatgctgattgaggccgccaagggcggccacacctctgtggtgtgctacctgctggactaccccaacaacctgctgagcgcccctcctccagatgtgacccagctgaccccacccagccatgacctgaacagagccccccgggtgcctgtgcaggccctgcccatggtggtgcccccccaggagccagacaagcccccagccaacgtggccaccaccctgcccatccggaacaaggccgccagcaagcagaagagcagcagccacctgcctgccaacagccaggatgtgcagggctacatcaccaaccagagccctgagagcatcgtggaggaggcccagggcaagctgacagagctggagcagaggatcaaggaggccatcgagaagaatgcccagctgcagagcctggagctggcccacgccgaccagctgaccaaggagaagattgaggagctgaacaagacccgggaggagcagatccagaagaagcagaagatcctggaggagctgcagaaggtggagcgggagctgcagctgaagacccagcagcagctgaagaagcagtacctggaggtgaaggcccagaggatccagctgcagcagcagcagcagcagagctgccagcacctgggcctgctgacccctgtgggcgtgggggagcagctgtctgagggggactatgcccggctgcagcaggtggaccctgtgctgctgaaggatgagccccagcagacagctgcccagatgggctttgcccccatccagcccctggccatgccccaggccctgcccctggccgccggccccctgcccccaggcagcatcgccaacctgacagagctgcaggtgctgagcagcctgctgcagccctgcttcctgagcaccctgcccctcatcctgatgcaccggctgcgggtcatcatgacccggcccaagagcagcagcaccagcgagagcggggacagcgacaacatgaggatcagcagctgcagtgatgagagcagcaacagcaacagcagcaggaagagtgacaaccacagccctgctgtggtgaccaccaccgtgagcagcaagaagcagcccagcgtgctggtgaccttccccaaggaggagaggaagtctgtgtctgggaaggccagcatcaagctgtctgagaccatcagcgagggcaccagcaacagcctgagcacctgcaccaagagcggccccagccccctgagcagccccaacgggaagctgactgtggccagccccaagaggggccagaagcgggaggagggctggaaggaggtggtgcggcgcagcaagaaggtgtctgtgcccagcaccgtcatcagcagggtcatcggccggggcggctgcaacatcaatgccatccgggagttcaccggggcccacatcgacatcgacaagcagaaggacaagacaggagaccgcatcatcaccatccggggcggcacagagagcacccggcaggccacccagctgatcaatgccctgatcaaggaccctgacaaggagattgatgagctgatccccaagaaccggctgaagagcagcagcgccaacagcaagattggcagcagcgcccccaccaccacagctgccaacaccagcctgatgggcatcaagatgaccaccgtggccctgagcagcaccagccagacagccacagccctgactgtgcctgccatcagcagcgccagcacccacaagaccatcaagaaccctgtgaacaacgtgcggcccggcttccctgtgtccctgcccctggcctaccccccaccccagtttgcccacgccctgctggccgcccagaccttccagcagatccggcccccccggctgcccatgacccactttggaggcaccttccccccagcccagagcacctggggccccttccctgtgcggcccctgagccctgcccgggccaccaacagccccaagccccacatggtgcccaggcacagcaaccagaacagcagcggcagccaggtgaacagcgctggcagcctgaccagcagccccaccaccaccaccagcagcagcgccagcacagtgcccggcaccagcaccaacggcagccccagcagccccagcgtgcggcggcagctgtttgtgacagtggtgaagaccagcaatgccaccaccaccaccgtgaccaccacagccagcaacaacaacacagcccccaccaatgccacctaccccatgcccacagccaaggagcactaccctgtgagcagccccagcagccccagccccccagcccagcctggaggagtgtccaggaacagccccctggactgtggcagcgccagccccaacaaggtggccagcagcagcgagcaggaggccggcagcccccctgtggtggagaccaccaacaccaggcctcccaacagcagcagcagcagcggcagcagcagcgcccacagcaaccagcagcagcccccaggctctgtgtcccaggagccccggccccccctgcagcagagccaggtgcccccacctgaggtgaggatgacagtgccccccctggccaccagcagcgcccctgtggccgtgcccagcacagcccctgtgacctaccccatgccccagacccccatgggctgcccccagcccacccccaagatggagaccccagccatccggcccccaccccacggcaccacagccccccacaagaacagcgcctctgtgcagaacagctctgtggccgtgctgtctgtgaaccacatcaagaggccccacagcgtgcccagctctgtgcagctgcccagcaccctgagcacccagagcgcctgccagaacagcgtgcacccagccaacaagcccatcgcccccaacttcagcgcccccctgcccttcggccccttcagcaccctgtttgagaacagccccaccagcgcccacgccttctggggcggctctgtggtgagcagccagagcaccccagagagcatgctgagcggcaagagcagctacctgcccaacagcgaccccctgcaccagagcgacaccagcaaggcccctggcttccggccccccctgcagaggcctgcccccagccccagcggcatcgtgaacatggacagcccctacggctctgtgacccccagcagcacccacctgggcaactttgccagcaacatcagcggcggccagatgtatggccctggggcccccctgggcggggccccagctgctgccaacttcaaccggcagcacttcagccccctgagcctgctgaccccctgcagcagcgccagcaatgacagcagcgcccagagcgtgagcagcggcgtgcgggcccccagccctgcccccagctctgtgcccctgggcagcgagaagcccagcaatgtgtcccaggacaggaaggtgcctgtgcccatcggcacagagaggtctgcccgcatccggcagacaggcaccagcgcccccagcgtgattggcagcaacctgagcacctctgtgggccacagcggcatctggagctttgagggcatcggcggcaaccaggacaaggtggactggtgcaaccctggcatgggcaaccccatgatccaccggcccatgtctgaccccggggtcttcagccagcaccaggccatggagcgggacagcacaggcatcgtgacccccagcggcaccttccaccagcacgtgcctgctggctacatggacttccccaaggtgggcggcatgcccttctctgtgtatggaaatgccatgatcccccctgtggcccccatcccagatggagctgggggccccatcttcaacggcccccacgccgctgaccccagctggaacagcctcatcaagatggtgagcagcagcacagaaaataatggcccccagacagtgtggacaggcccctgggccccccacatgaacagcgtgcacatgaaccagctgggctag

SEQ ID NO: 21094 - DNA, 1446 bp, synthetic construct
  source 1..1446: mol_type = other DNA; note = Synthetic coding sequence
atggccagcgctgcctctgtgaccagcctggctgatgaggtgaactgccccatctgccagggcaccctgcgggagcctgtgaccatcgactgtggccacaacttctgccgggcctgcctgacccgctactgtgagatccctggccctgacctggaggagagccccacctgccccctgtgcaaggagcccttccggcccggcagcttccggcccaactggcagctggccaacgtggtggagaacatcgagcggctgcagctggtgtccaccctgggcctgggggaggaggatgtgtgccaggagcacggggagaagatctacttcttctgtgaagatgatgagatgcagctgtgtgtggtgtgccgggaggccggggagcacgccacccacaccatgaggttcctggaggatgctgctgccccctaccgggagcagatccacaagtgcctgaagtgcctgaggaaggagcgggaggagatccaggagatccagagccgggagaacaagaggatgcaggtgctgctgacccaggtgtccaccaagaggcagcaggtgatcagcgagtttgcccacctgaggaagttcctggaggagcagcagagcatcctgctggcccagctggagagccaggatggagacatcctgcggcagagagatgaatttgacctgctggtggccggggagatctgccgcttcagcgccctgattgaggagctggaggagaagaatgaaagacctgcccgggagctgctgacagacatccgcagcaccctcatccgctgtgagaccaggaaatgtaggaagcctgtggccgtgtccccagagctgggccagaggatccgggacttcccccagcaggccctgcccctgcagcgggagatgaagatgttcctggagaagctgtgctttgagctggactatgagcccgcccacatcagcctggacccccagaccagccaccccaagctgctgctgtctgaggaccaccagagggcccagttctcctacaagtggcagaacagcccagacaacccccagagatttgaccgggccacctgtgtgctggcccacacaggcatcactggaggccgccacacctgggtggtgtccattgacctggcccatggaggcagctgcaccgtgggcgtggtgtctgaagatgtgcagaggaaaggagagctgcggctgcggcctgaggagggcgtgtgggccgtgcggctggcctggggctttgtgtctgccctgggcagcttccccacccggctgaccctgaaggagcagccccggcaggtgcgggtgtccctggactatgaggtgggctgggtgaccttcaccaatgctgtgacccgggagcccatctacaccttcaccgccagcttcaccaggaaggtgatccccttcttcggcctgtggggccggggcagcagcttcagcctgagcagctag

SEQ ID NO: 21095 - DNA, 1566 bp, synthetic construct
  source 1..1566: mol_type = other DNA; note = Synthetic coding sequence
atgcccagcccccagctgctggtgctgtttggcagccagacaggaacagcccaggatgtgtctgagcggctgggccgggaggccaggagaagaaggctgggctgccgggtgcaggccctggacagctaccctgtggtgaacctgatcaatgagcccctggtgatctttgtgtgtgccaccaccggccagggcgaccccccagacaacatgaagaacttctggaggttcatcttcaggaagaacctgcccagcacagccctgtgccagatggactttgctgtgctgggcctgggggacagcagctatgccaagttcaactttgtggccaagaagctgcaccggcggctgctgcagctgggcggcagcgccctgctgcctgtgtgcctgggagatgaccagcacgagctgggcctgcccagcaagttcaccctgctcttcctgcaggaggcccccagcactggaagtgagggccagagggtggcccaccctggcagccaggagccccccagcgagagcaagcccttcctggcccccatgatcagcaaccagagggtgacaggccccagccacttccaggatgtgcggctgattgaatttgacatcctgggcagcggcatcagctttgctgctggagatgtggtgctgatccagcccagcaacagcgctgcccacgtgcagcgcttctgccaggtgctgggcctggaccctgaccagctgttcatgctgcagccccgggagccagatgtgagcagccccacccggctgccccagccctgcagcatgaggcacctggtgagccactacctggacatcgcctctgtgccccggcgctccttctttgagctgctggcctgcctgagcctgcacgagctggagcgggagaagctgctggagttcagcagcgcccagggccaggaggagctgtttgagtactgcaaccggcccaggaggaccatcctggaggtgctgtgtgacttcccccacacagctgctgccatccccccagactacctgctggacctgatccctgtgatccggccccgggccttcagcatcgccagcagcctgctgacccaccccagccggctgcagatcctggtggccgtggtgcagttccagacccggctgaaggagccccggcggggcctgtgcagctcctggctggccagcctggaccccggccagggccctgtgcgggtgcccctgtgggtgcggcccggcagcctggccttccctgagaccccagacacccctgtgatcatggtgggccctggcaccggggtggcccccttccgggccgccatccaggagcgggtggcccagggccagacaggcaacttcctgttcttcggctgccgctggagggaccaggacttctactgggaggccgagtggcaggagctggagaagagggactgcctgaccctcatcccagccttcagccgggagcaggagcagaaggtgtatgtgcagcaccggctgcgggagctgggcagcctggtgtgggagctgctggaccggcaggccacccccagcccctgccagaggaccagcaggaagccctag

SEQ ID NO: 21096 - DNA, 753 bp, synthetic construct
  source 1..753: mol_type = other DNA; note = Synthetic coding sequence
tgacagcccagccctgtggagccccggggccccttctacttctgccgcctgctgctggatgacctgggcatgaacagctgggacaggaggaagaacttccacctgctgaagaagaacagcaagctgctgcgggagctgaagaacctggacagccggcagtgccgggagacccacaagattgctgtgttctacatcgccgagggccaggaggacaagtgcagcatcctgagcaatgaaagaggcagccaggcctatgaggactttgtggccggcctgggctgggaggtggacctgagcacccactgcggcttcatgggcggcctgcagagaaatggcagcacaggccagacagccccctactatgccaccagcacagtggaggtgatcttccacgtgtccaccaggatgcccagcgacagtgatgacagcctgaccaagaagctgcggcacctgggcaatgatgaggtgcacatcgtgtggagcgagcacagccgggactaccgccggggcatcatccccacagcctttggagatgtgtccatcatcatctaccccatgaagaaccacatgttcttcatcgccatcaccaagaagccagaggtgcccttcttcggccccctgtttgatggagccatcgtgtctgggaagctgctgcccagcctggtgtgtgccacctgcatcaatgccagcagagctgtgaagtgcctgatccccctgtaccagagcctgtacctgtttgccctgaatgtgtag

SEQ ID NO: 21097 - DNA, 345 bp, synthetic construct
  source 1..345: mol_type = other DNA; note = Synthetic coding sequence
atggtgctgatcctgggccgccgcctgaaccgggaggacctgggcgtgcgggacagccctgccaccaagaggaaggtgtttgagatggaccccaagagcctgactggacatgagttctttgacttcagcagcggcagcagccatgctgagaacatcctgcagatcttcaatgagttccgggacagccgcctcttcacagatgtgatcatctgtgtggagggcaaggagttcccctgccacagagctgtgctgagcgcctgcagcagctacttccgggccatgttctgcaatgaccaccgggagagccgggagatgctggtggagatcaatggcatcctggcctag

SEQ ID NO: 21098 - DNA, 1830 bp, synthetic construct
  source 1..1830: mol_type = other DNA; note = Synthetic coding sequence
atggccagcctgagccgggccctgcgggtggccgccgcccacccccggcagagccccacccggggcatgggcccctgcaacctgagcagcgctgctggccccacagctgagaagtctgtgccctaccagaggaccctgaaggagggccagggcacctctgtggtggcccagggccccagccggcccctgcccagcacagccaacgtggtggtgattggaggcggcagcctgggctgccagaccctgtaccacctggccaagctgggcatgtctggagctgtgctgctggagcgggagcggctgaccagcggcaccacctggcacacagctggcctgctgtggcagctgcggcccagtgatgtggaggtggagctgctggcccacacccggcgggtggtgtcccgggagctggaggaggagaccggcctgcacacaggctggatccagaatggaggcctcttcatcgccagcaaccggcagaggctggatgagtacaagaggctgatgagcctgggcaaggcctatggagtggagagccacgtgctgagccctgctgagaccaagaccctgtaccccctgatgaatgtggatgacctgtatggcaccctgtatgtgccccatgatggcaccatggaccctgctggcacctgcaccaccctggcccgggccgccagcgcccggggggcccaggtgattgagaactgccctgtgacaggcatccgggtgtggacagatgactttggagtgcggcgggtggccggcgtggagacccagcacggcagcatccagaccccctgtgtggtgaactgtgccggcgtgtgggccagcgctgtgggccgcatggccggcgtgaaggtgcccctggtggccatgcaccacgcctacgtggtgacagaaagaattgagggcatccagaacatgcccaacgtgcgggaccatgatgcctctgtgtacctgcggctgcagggagatgccctgtctgtgggcggctatgaggccaaccccatcttctgggaggaggtgtctgacaagtttgccttcggcctgtttgacctggactgggaggtgttcacccagcacattgaaggagccatcaacagagtgcctgtgctggagaagacaggcatcaagagcacagtgtgtggccctgagagcttcaccccagaccacaagcccctgatgggagaggcccctgagctgcggggcttcttcctgggctgcggcttcaacagcgctggcatgatgctgggcggcggctgcggccaggagctggcccactggatcatccacggccggcctgagaaggacatgcacggctatgacatccgccgcttccaccacagcctgacagaccacccccgctggatccgggagaggagccatgagagctatgccaagaactacagcgtggtgttcccccatgatgagcccctggccggcaggaacatgaggcgggaccccctgcacgaggagctgctgggccagggctgtgtgttccaggagagacatggctgggagcggcccggctggttccacccccggggccctgcccctgtgctggagtatgactactatggagcctacggcagccgggcccacgaggactatgcctacagaaggctgctggctgatgagtacacctttgccttccccccccaccacgacaccatcaagaaggagtgcctggcctgcagaggagctgctgctgtgtttgacatgagctactttgggaagttctacctggtgggcctggatgccaggaaggctgctgactggctgttcagcgcagatgtgtccaggcctcctggcctgcaccgggtgcacgtgtag

SEQ ID NO: 21099 - DNA, 129 bp, synthetic construct
  source 1..129: mol_type = other DNA; note = Synthetic coding sequence
atggacaacatgagcccccggctgcgggccttcctgtctgagcccatcggggagaaggatgtgtgctgggtggatggcatcagccatgagctggccatcaacctggtgaccaagggcatcaacaagtag

SEQ ID NO: 21100 - DNA, 3120 bp, synthetic construct
  source 1..3120: mol_type = other DNA; note = Synthetic coding sequence
atggtgagcagcgcccagatgggcttcaacctgcaggccctgctggagcagctgagccaggatgagctgagcaagttcaagtacctgatcaccaccttcagcctggcccacgagctgcagaagatcccccacaaggagatggccagcctgcaggtgtttgagaagatgcacaggatggacctgtctgagcgggccaaggatgaggtgcgggaggccgccctgaagagcttcaacaagaggaagcccctgagcctgggcatcaccaggaaggagaggcctcccctggatgtggatgagatgctggagcgcttcaagacagaggcccaggccttcacagagaccaagggaaatgtcatctgcctgggcaaggaggtgttcaagggcaagaagccagacaaggacaaccgctgccgctacatcctgaagaccaagttccgggagatgtggaagtcctggccaggggacagcaaggaggtgcaggtgatggccgagcgctacaagatgctgatccccttcagcaacccccgggtgctgcccggccccttctcctacacagtggtgctgtatggccctgctggcctgggcaagaccaccctggcccagaagctgatgctggactgggccgaggacaacctgatccacaagttcaagtatgccttctacctgagctgccgggagctgagccggctgggcccctgcagctttgctgagctggtgttccgggactggccagagctgcaggatgacatcccccacatcctggcccaggccaggaagatcctgtttgtgattgatggctttgatgagctgggcgccgcccctggggccctgattgaggacatctgtggggactgggagaagaagaagcctgtgcctgtgctgctgggcagcctgctgaacagagtgatgctgcccaaggccgccctgctggtgaccacccggccccgggccctgcgggacctgcgcatcctggccgaggagcccatctacatccgggtggagggcttcctggaggaggacagaagagcctacttcctgcggcactttggagatgaggaccaggccatgagggcctttgagctgatgaggagcaatgctgccctcttccagctgggcagcgccccagctgtgtgctggatcgtgtgcaccaccctgaagctgcagatggagaagggagaagatcctgtgcccacctgcctgaccaggacaggcctcttcctgcgcttcctgtgcagccgcttcccccagggcgcccagctgcggggggccctgcggaccctgagcctgctggccgcccagggcctgtgggcccagacctctgtgctgcaccgggaggacctggagcggctgggcgtgcaggagagtgacctgcggctcttcctggatggagacatcctgcggcaggacagagtgtccaagggctgctacagcttcatccacctgtccttccagcagttcctgacagccctcttctacaccctggagaaggaggaggaggaggacagagatggccacacctgggacattggagatgtgcagaagctgctgtctggagtggagcggctgagaaatccagacctgatccaggccggctactacagctttggcctggccaatgagaagagggccaaggagctggaggccaccttcggctgcaggatgagcccagacatcaagcaggagctgctgcgctgtgacatcagctgcaagggcggccacagcacagtgacagacctgcaggagctgctgggctgcctgtatgagagccaggaggaggagctggtgaaggaggtgatggcccagttcaaggagatcagcctgcacctgaatgctgtggatgtggtgcccagcagcttctgtgtgaagcactgcaggaacctgcagaagatgagcctgcaggtgatcaaggagaacctgcctgaaaatgtgacagccagcgagagtgatgctgaggtggagaggagccaggatgaccagcacatgctgcccttctggacagacctgtgcagcatcttcggcagcaacaaggacctgatgggcctggccatcaatgacagcttcctgagcgccagcctggtgcgcatcctgtgtgagcagatcgccagtgacacctgccacctgcagagggtggtgttcaagaacatcagccctgcagatgcccacaggaacctgtgcctggccctgcggggccacaagacagtgacctacctgaccctgcagggcaatgaccaggatgacatgtttcctgccctgtgtgaggtgctgcggcaccctgagtgcaacctgcgctacctgggcctggtgtcctgcagcgccaccacccagcagtgggccgacctgagcctggccctggaggtgaaccagagcctgacctgtgtgaacctgagtgacaatgagctgctggatgagggcgccaagctgctgtacaccaccctgcggcaccccaagtgcttcctgcagaggctgagcctggagaactgccacctgacagaggccaactgcaaggacctggccgctgtgctggtggtgtcccgggagctgacccacctgtgcctggccaagaaccccatcggcaacacaggagtgaagttcctgtgtgagggcctgcgctacccagagtgcaagctgcagaccctggtgctgtggaactgtgacatcaccagtgatggctgctgtgacctgaccaagctgctgcaggagaagagcagcctgctgtgcctggacctgggcctgaaccacatcggcgtgaagggcatgaagttcctgtgtgaggccctgaggaagcccctgtgcaacctgcgctgcctgtggctgtggggctgcagcatcccccccttcagctgtgaggacctgtgcagcgccctgagctgcaaccagagcctggtgaccctggacctgggccagaaccccctgggcagcagcggcgtgaagatgctgtttgagaccctgacctgcagcagcggcaccctgcggaccctgcggctgaagattgatgacttcaatgatgagctgaacaagctgctggaggagattgaggagaagaacccccagctgatcatcgacacagagaagcaccacccctgggccgagcggcccagcagccatgacttcatgatctag

SEQ ID NO: 21101 - DNA, 1899 bp, synthetic construct; identical to SEQ ID NO: 18887
  source 1..1899: mol_type = other DNA; note = Synthetic coding sequence

SEQ ID NO: 21102 - DNA, 189 bp, synthetic construct
  source 1..189: mol_type = other DNA; note = Synthetic coding sequence
atgagcatcagcagtgatgaggtgaacttcctggtgtaccgctacctgcaggagagcggcttcagccacagcgccttcaccttcggcatcgagagccacatcagccagagcaacatcaacggggccctggtgcccccagctgccctgatcagcatcatccagaagggcctgcagtatgtggaggcctag

SEQ ID NO: 21103 - DNA, 417 bp, synthetic construct
  source 1..417: mol_type = other DNA; note = Synthetic coding sequence
atggagcccagcgcccagcagctgcagctggccgccagcctgcctgccaacctgagcaacttctgccagggcagcgagatgcccaccaccagcaggcctgccctggatgtgaagggcggcaccagccctgccaaggaggatgccaaccaggagatgagctctgtggcctacagcaacctggccgtgaaggacaggaaggctgtggccatcctgcactacccaggagtggccagcaatggcaccaaggccagcggggcccccaccagcagcagcggcagccccatcggcagccccaccaccaccccacccaccaagccacccagcttcaacctgcacccagccccccacctgctggcctccatgcacctgcagaagctgaacagccagtaccagggcatggctgctgccaccccctag

SEQ ID NO: 21104 - DNA, 1473 bp, synthetic construct; identical to SEQ ID NO: 18917
  source 1..1473: mol_type = other DNA; note = Synthetic coding sequence

SEQ ID NO: 21105 - DNA, 357 bp, synthetic construct
  source 1..357: mol_type = other DNA; note = Synthetic coding sequence
atggccagcagcgcccgggagcacctgctgtttgtgagaagaagaaacccccagatgagatacaccctgagccctgagaacctgcagagcctggccgcccagagctccatgcctgagaacatgaccctgcagagggccaacagcgacacagacctggtgaccagcgagagccgcagcagcctgacagcctccatgtatgagtacaccctgggccaggcccagaacctgatcatcttctgggacatcaaggaggaggtggaccccagcgactggattggcctgtaccacattgatgagaacagccctgccaacttctgggacagcaagaacagaggagtgacaggcacccagaagtag

SEQ ID NO: 21106 - DNA, 1620 bp, synthetic construct; identical to SEQ ID NO: 19050
  source 1..1620: mol_type = other DNA; note = Synthetic coding sequence

SEQ ID NO: 21107 - DNA, 270 bp, synthetic construct; identical to SEQ ID NO: 20498
  source 1..270: mol_type = other DNA; note = Synthetic coding sequence

SEQ ID NO: 21108 - DNA, 909 bp, synthetic construct; identical to SEQ ID NO: 18366
  source 1..909: mol_type = other DNA; note = Synthetic coding sequence

SEQ ID NO: 21109 - DNA, 1521 bp, synthetic construct
  source 1..1521: mol_type = other DNA; note = Synthetic coding sequence
atgtctgtgctgagccctggggacctgaagcccaagaggggcagcccccaccggggcagcctggacagaacagatgccagcacagacctggccatgaggtcctggcccagcgagctgggcagcaggacctgcagcaccagcgccaccaccacagcccccagcaacagcacccccatcgcccggcaccctggccgcaccaagggctacaacagtgatgacaacctgtgtgagcccagcctggagtttgaggtgcccaaccaccggcagtatgtgtcccggcccagcagcctggagagcagcaggaacaccagcagcaacagcagccccctgaacctgaagggcagcagcgagcagctgcacggccgctctgagagcttcagcagtgaagatctcatccccagccgggacctggccaccctgccccgggaggccagcaccccaggaagaaatgccctgggcagacatgagtaccccctgcccagaaatggccccctgccccaggagggcgcccagaagaggggcacagccccaccctacgtgggcgtgcggccctgcagcgccagccccagcagcgagatggtgaccctggaggagttcctggaggagagcaacagaagcagccccacccatgacacccccagctgcagagatgacctgctgagtgactacttcaggaaggccagtgaccccccagccatcggcggccagcccggccccccagccaagaaggagggcgccaagatgcccaccaactttgtggcccccaccgtgaagatggccgcccccaccagcgagggccggcccctgaagccaggccagtatgtgaagcccaacttccggctgacagaggccgaggcccctccttctgtggccccccggcaggcccagcccccccagagcctgagcctgggccggccccggcaggcccctgaggccctgggcggccgggagaccggcagccacaccctgcagagccctgccccacccagcagccacagcctggcccgggagaggacccccctggtgggcaaggccggcagcagctgccagggccctggccccaggagccggcccctggacacccggcgcttcagcctggccccacccaaggaggagcggctggcccccctgcaccagagcgccacagccccagccatcgccacagctggagctggagctgctgctgctggcagcggcagcaacagccagctgctgcacttctccccagctgctgccccagctgcccggaccaagcccaaggccccacccaggtctggagaggtggccaccatcacccctgtgcgggccggcctgagcctgtctgaaggagatggagtgcccggccagggctgcagcgagggcctgcctgccaagagccctggccgcagcccagacctggccccccacctgggccgggccctggaggactgcagccggggctctgtgtccaagagcagccctgccagccctgagcccggcggggacccccagacagtgtggtatgaatatggctgtgtgtag

SEQ ID NO: 21110 - DNA, 678 bp, synthetic construct
  source 1..678: mol_type = other DNA; note = Synthetic coding sequence
atggcccagacagtgcccccctgtgagctgccctgcaaggagtatgatgtggccagaaatactggagcctacaccagcagcggcctggccacagccagcttccgcaccagcaagtacctgctggaggagtggttccagaactgctacgcccgctaccaccaggcctttgctgaccgggaccagagcgagcggcagagacatgagagccagcagctggccacagagacccaggccctggcccagaggacccagcaggacagcaccaggacagtgggggagcggctgcaggacacccacagctggaagtctgagctgcagcgggagatggaggccctggccgctgagaccaacctgctgctggcccagaagcagaggctggagcgggccctggatgccacagaggtgcccttcagcatcaccacagacaacctgcagtgccgggagcggcgggagcaccccaacctggtgcgggaccacgtggagacagagctgctgaaggccctgcccccagccctgagccagtgcctgaagaacagctgcagcagcaggaagctgagcgccaggaacaagggcacctgccagctgatggagaccctgactgtgcacggggaggccaaccctggcatcgagggccgccgcacccgggccctggcccacaaggaggtgcccagcggctag

SEQ ID NO: 21111 - DNA, 309 bp, synthetic construct
  source 1..309: mol_type = other DNA; note = Synthetic coding sequence
atggccaatgacagccctgccaagagcctggtggacatcgacctgagcagcctgcgggaccctgctggcatctttgagctggtggaggtggtgggcaatggcacctacggccaggtgtacaagggccgccacgtgaagacaggccagctggccgccatcaaggtgatggatgtgacagaagatgaggaggaggagatcaagctggagatcaacatgctgaagaagtacagccaccacaggaacatcgccacctactacggggccttcatcaagaagagccccccaggccatgatgaccagctgtggtag

SEQ ID NO: 21112 - DNA, 369 bp, synthetic construct
  source 1..369: mol_type = other DNA; note = Synthetic coding sequence
atggccaccagcgcccccctgcggagcctggaggaggaggtgacctgcagcatctgcctggactacctgcgggaccctgtgaccatcgactgtggccacgtgttctgccgcagctgcaccacagatgtgcggcccatcagcggcagcaggcctgtgtgccccctgtgcaagaagcccttcaagaaggagaacatccggcctgtgtggcagctggccagcctggtggagaacatcgagcggctgaaggtggacaagggccggcagcctggagaggtgacccgggagcagcaggatgccaagctgtgtgagcggcaccgggagaagctgcactactactgtgaagatgatggcaagctgctgtgtgtgtag

SEQ ID NO: 21113 - DNA, 312 bp, synthetic construct
  source 1..312: mol_type = other DNA; note = Synthetic coding sequence
atgtctgggggcctgctgaaggccctgcggagtgacagctatgtggagctgagccagtacagagaccagcacttccggggggacaatgaggagcaggagaagctgctgaagaagagctatgcagaaaatgccatgagatacatcaatggcacccggctggatgaccgcatcatcagaacagactgggatgctggcttcaaggagggccggcagtatggccggggccgcagcggcggccaggtgagagatgagtaccggcaggactatgatgctggccggggcggctacggcaagctggcccagaaccagtag

SEQ ID NO: 21114 - DNA, 894 bp, synthetic construct
  source 1..894: mol_type = other DNA; note = Synthetic coding sequence
atgtggcccttccccagccgcagcctcttccccccacccacccaggcctggctgcagacagtgtccagtgaccctgaggcccagggctggggcgcctggaatgagaccaaggagatcctgggccctgagggcggggagggcaaggaggagaaggaggaggaggaggatgctgaggaggaccaggatggagatgctggcttcctgctgagcctgctggagcaggagaacctggctgaatgtcccctgcctgaccaggagctggaggccatcaagatgaaggtgtgtgccatggagcaggccgagggcaccccccggcccccaggagtgcagcagcaggccgaggaggaggagggcacagctgctggccagctgctgagccctgagaccgtgggctgccccctgagcggcaccccagaggagaaggtggaggccgaccacaggtctgtgtatgtgggcaacctgtgcctgcaccgggtgtgccaccagggcctgcgggccggcagaagaggagctggccctgagcccctgcccggccctggccaccagggcgctgctgagaagaaccagctgccctgggaccagctgcaccggccccggggccccagcaggaccccccggctgcagggcggcaccctgcccccccagaggcctcctggccaggccccagcccagaccaccagggctgagcccggcccctggaagatcctgaccatggtgttcaccgtgctgaagggccgcccagactttgaaagaggagctggggcctggatccgcagcaagcccctggtgctgcaccctggggccggggccggcagcggggccggggcccggcctgaggagcggggcgtgcagagcagccactggccacccctgggcggcggcatggcccagtag

SEQ ID NO: 21115 - DNA, 1059 bp, synthetic construct; identical to SEQ ID NO: 20256
  source 1..1059: mol_type = other DNA; note = Synthetic coding sequence

SEQ ID NO: 21116 - DNA, 363 bp, synthetic construct
  source 1..363: mol_type = other DNA; note = Synthetic coding sequence
atggagctggacctcttcctgggcctggatgatgtgttcccccggctgctgcacggcctgctgcaccgggccttcagcgtcttcctgttcaacacagagaacaagctgctgctgcagcagaggagtgatgccaagatcaccttccctggctgcttcaccaacacctgctgcagccaccccctgagcaacccagctgagctggaggagagtgatgccctgggcgtgcggcgggccgcccagaggcggctgaaggccgagctgggcatccccctggaggaggtgaccagcagccccacccagccctacaagctgaagcccaagcacaccatcaagcgcttcctgatcaagttcctgaacagctag

SEQ ID NO: 21117 - DNA, 339 bp, synthetic construct
  source 1..339: mol_type = other DNA; note = Synthetic coding sequence
atggaggagatcccagcccaggaggccgccggcagcccccgggtgcagttccagagcctggagacccagagtgaatgtctgagccctgagccccagtttgtgcaggacacagacatggagcagggcctgaccggcggcttccccatcagcaagccagatggcatcagccagctggagcaggacctgcaggtgtttgacctggagaccaagacccgggaggtgctgagagatgactgcagtgatggagagacccgggaggagaacaagctgctgatccccaagcagaagatcagcgaggaggtgcacagctacaaggtgcgggtgggccgcctgaagtag

SEQ ID NO: 21118 - DNA, 1818 bp, synthetic construct
  source 1..1818: mol_type = other DNA; note = Synthetic coding sequence
atgtctgagatcctgaagcagaaggacacagagcccaccaacttcaaggtggccgccggcaccctggatgccagcaccaagatctatgctgtgcgggtggatgctgtgcatgctgatgtgtacagagtgctgggcggcctgggcaaggatgcccccagcctggaggaggtggagggccacgtggctgatggcagcgccacagagatgggcaccaccaagaaggctgtgaagcccaagaagaagcacctgcacaggaccatcgagcagaacatcaacaacctgaatgtgtctgaggccgacagaaaatgtgaaattgaccccatgttccagaagacagctgccagctttgatgagtgcagcacagctggggtcttcctgagcaccctgcactgccaggactacagaagtgagctgctcttccccagtgatgtgcagaccctgagcactggagagcccctggagctgcctgagctgggctgtgtggagatgacagacctgaaggcccccctgcagcagtgtgctgaagatcggcagatctgccccagcctggccggcttccagttcacccagtgggacagcgagacccacaatgaatctgtgtctgccctggtggacaagttcaagaagaatgaccaggtgtttgacatcaatgctgaggtggatgaaagtgactgtggggacttcccagatggcagcctgggagatgactttgatgccaatgatgagccagaccacacagctgtgggggaccacgaggagttccgctcctggaaggagccctgccaggtgcagagctgccaggaggagatgatcagcctgggagatggagacatccgcaccatgtgccccctgctgtccatgaagccaggagagtacagctacttcagccccaggaccatgtccatgtgggccggccctgaccactggaggttccggcccaggaggaagcaggatgcccccagccagagcgagaacaagaagaagagcaccaagaaggactttgaaattgactttgaagatgacatcgactttgatgtgtacttcaggaagaccaaggccgccaccatcctgaccaagagcaccctggagaaccagaactggagggccaccaccctgcccacagacttcaactacaacgtggacaccctggtgcagctgcacctgaagccaggcacccggctgctgaagatggcccagggccaccgggtggagacagagcactatgaggagattgaggactatgactacaacaaccccaatgacaccagcaacttctgccccggcctgcaggccgctgacagtgatgatgaggacctggatgacctgtttgtgggccctgtgggcaacagcgacctgagcccctacccctgccacccccccaagacagcccagcagaatggagacaccccagaggcccagggcctggacatcaccacctacggggagagcaacctggtggccgagccccagaaggtgaacaagattgagatccactacgccaagacagccaagaagatggacatgaagaagctgaagcagagcatgtggagcctgctgacagccctgagcggcaaggaggctgatgctgaggccaaccaccgggaggccggcaaggaggccgccctggccgaggtggctgatgagaagatgctgagcggcctgaccaaggacctgcagaggagcctgccccctgtgatggcccagaacctgagcatccccctggcctttgcctgcctgctgcacctggccaatgagaagaacctgaagctggagggcacagaggacctgagtgatgtgctggtgcggcagggcgactag

SEQ ID NO: 21119 - DNA, 2253 bp, synthetic construct
  source 1..2253: mol_type = other DNA; note = Synthetic coding sequence
atgagcagcagccctgtgaatgtgaagaagctgaaggtgtctgagctgaaggaggagctgaagaagaggcggctgagtgacaagggcctgaaggccgagctgatggagcggctgcaggccgccctggatgatgaggaggccggcggccgcccagccatggagcctggaaatggagatgaccagggcttccaggagggagaagatgagctgggagatgaggaggagggcgctggagatgaaaatggacatggagagcagcagccccagcccccagccacccagcagcagcagccccagcagcagagaggagctgccaaggaggccgccggcaagagcagcggccccaccagcctgtttgctgtgacagtggcccctcctggggcccggcagggccagcagcaggccggcggcaagaagaaggccgagggcggcggcggcggcggccggcctggggccccagctgctggagatggcaagacagagcagaagggcggggacaagaagaggggcgtgaagaggccccgggaggaccacggccggggctactttgagtacatcgaggagaacaagtacagccgggccaagagcccccagccccctgtggaggaggaggatgagcactttgatgacacagtggtgtgcctggacacctacaactgtgacctgcacttcaagatcagccgggaccggctgagcgccagcagcctgaccatggagagctttgccttcctgtgggccggcggccgggccagctatggagtgtccaagggcaaggtgtgctttgagatgaaggtgacagagaagatccctgtgcgccacctgtacaccaaggacatcgacatccacgaggtgcgcatcggctggagcctgaccaccagcggcatgctgctgggggaggaggagttctcctatggctacagcctgaagggcatcaagacctgcaactgtgaaacagaagattatggagagaagtttgatgaaaatgatgtgatcacctgctttgccaactttgaaagtgatgaggtggagctgtcctatgccaagaatggccaggacctgggcgtggccttcaagatcagcaaggaggtgctggccggccggcccctcttcccccacgtgctgtgccacaactgtgctgtggagttcaactttggccagaaggagaagccctacttccccatccctgaggagtacaccttcatccagaatgtgcccctggaggacagagtgcggggccccaagggccctgaggagaagaaggactgtgaggtggtgatgatgattggcctgcctggagctgggaagaccacctgggtgaccaagcatgctgctgaaaatcctgggaagtacaacatcctgggcaccaacaccatcatggacaagatgatggtggccggcttcaagaagcagatggctgacaccgggaagctgaacaccctgctgcagagggccccccagtgcctgggcaagttcatcgagattgctgccaggaagaagaggaacttcatcctggaccagaccaacgtgtctgctgctgcccagaggaggaagatgtgcctgtttgctggcttccagaggaaggctgtggtggtgtgccccaaggatgaggactacaagcagaggacccagaagaaggccgaggtggagggcaaggacctgcctgagcacgctgtgctgaagatgaagggcaacttcaccctgcctgaggtggccgagtgctttgatgagatcacctacgtggagctgcagaaggaggaggcccagaagctgctggagcagtacaaggaggagagcaagaaggccctgcccccagagaagaagcagaacacaggcagcaagaagagcaacaagaacaagagcggcaagaaccagttcaacagaggaggcggccaccggggccggggcggcttcaacatgagaggaggcaacttccggggcggggcccctggcaacagaggaggctacaacagaagaggcaacatgccccagagaggaggcggcggcggcggcagcggcggcatcggctacccctacccccgggcccctgtgtttcctggccggggcagctacagcaacagaggcaactacaacagaggaggcatgcccaacagaggcaactacaaccagaacttccggggccggggcaacaacagaggctacaagaaccagagccagggctacaaccagtggcagcagggccagttctggggccagaagccctggagccagcactaccaccagggctactactag

SEQ ID NO: 21120 - DNA, 804 bp, synthetic construct
  source 1..804: mol_type = other DNA; note = Synthetic coding sequence
atgtgggaccagaggctggtgaagctggccctgctgcagcacctgcgggccttctacggcatcaaggtgaagggcgtgcggggccagtgtgacagaagaagacatgaaacagctgccacagagatcggcggcaagatctttggagtgcccttcaatgccctgccccacagcgctgtgcctgaatatggccacatccccagcttcctggtggatgcctgcaccagcctggaggagcacatccacacagagggcctcttcaggaagagcggcagcgtcatccggctgaaggccctgaagaacaaggtggaccacggggagggctgcctgagcagcgccccaccctgtgacattgctggcctgctgaagcagttcttccgggagctgcctgagcccatcctgcctgctgacctgcacgaggccctgctgaaggcccagcagctgggcacagaggagaagaacaaggccatcctgctgctgagctgcctgctggccgaccacacagtgcacgtgctgcgctacttcttcaacttcctgagaaatgtgtccctgcggagcagcgagaacaagatggacagcagcaacctggccgtcatctttgcccccaacctgctgcagaccagcgagggccacgagaagatgagcagcaatgctgagaagaagggcgtgtaccagaccctgtcctggaagcgctaccagccctgctgggtgctgatggtgtctgtgctgctgcaccactggaaggccctgaagaaggtgaacatgaagctgctggtgaacatccgggagcgggaggacaacgtgtag

SEQ ID NO: 21121 - DNA, 600 bp, synthetic construct
  source 1..600: mol_type = other DNA; note = Synthetic coding sequence
atgccccacaagattggatttgtggtggtgagcagcagcggccatgaagatggcttcagcgcccgggagctgatgattcatgcccccaccgtgtctggctggaggagccccagctatgtgtccctgtgtgacaatgagaagacaggctgcaaggcccgggagctgaagtctgtgtatgtggatgctgtgggccagttcctgaagctgatcttccaccagaaccacgtgaacaagtacaacatctacaaccaggtggccctggtggccatcaacatcattggagaccctgctgacttcagtgatgagagcaacacagccagccgggagaagctgattgaccactacctgggccacaacagtgaagatcctgccctggagggcacctacgccaggaagagtgactacatcagccccctggatgacctggcctttgacatgtaccaggaccctgaggtggcccagatcatcaggaagctggatgagaggaagcgggaggccgtgcagaaggagagatatgactatgccaagaagctgaagcaggccatcgctgacctgcagaaggtgggggagcggctgggccgctatgaggtggagaagtag

SEQ ID NO: 21122 - DNA, 471 bp, synthetic construct
  source 1..471: mol_type = other DNA; note = Synthetic coding sequence
atgacagaggacagccagaggaacttccgctctgtgtactatgagaaggtgggcttccggggcgtggaggagaagaagagcctggagatcctgctgaaggatgaccggctggacacagagaagctgtgcaccttcagccagcgcttccccctgcccagcatgtaccgggccctggtgtggaaggtgctgctgggcatcctgcccccccaccacgagagccacgccaaggtgatgatgtacaggaaggagcagtacctggatgtgctgcacgccctgaaggtggtgcgctttgtgtctgatgccaccccccaggccgaggtgtacctgaggatgtaccagctggagagcggcaagctgcccaggagccccagcttccccctggagccagatgatgaggtgttcctggccatcgccaaggccatggaggagatggtggaggacagcgtggactgctactggatcaccaggtag

SEQ ID NO: 21123 - DNA, 2730 bp, synthetic construct
  source 1..2730: mol_type = other DNA; note = Synthetic coding sequence
atgatcagacatgctggggccccagcccggggggaccccaccggccctgtgcctgtggtgggcaagggggaggaggaggaggaggaggatggcatgaggctgtgcctgcctgccaaccccaagaactgcctgccccacagaagaggcatcagcatcctggagaagctgatcaagacctgccctgtgtggctgcagctgagcctgggccaggccgaggtggcccgcatcctgcaccgggtggtggccggcatgttcctggtgcggcgggacagcagcagcaagcagctggtgctgtgtgtgcacttccccagcctgaatgaatcttctgctgaggtgctggagtacaccatcaaggaggagaagagcatcctgtacctggagggcagcgccctggtgtttgaggacatcttccgcctcatcgccttctactgtgtgtcccgggacctgctgcccttcaccctgcggctgccccaggccatcctggaggccagcagcttcacagacctggagaccatcgccaacctgggcctgggcttctgggacagcagcctgaaccccccccaggagcggggcaagccagctgagcccccccgggaccgggcccctggcttccccctggtgagcagcctgcggcccacagcccatgatgccaactgtgcctgtgaaattgagctgtctgtgggcaatgaccggctgtggtttgtgaaccccatcttcatcgaggactgcagcagcgccctgcccacagaccagccccccctgggcaactgcccagcccggcccctgccccccaccagtgatgccaccagccccaccagccgctgggccccccggcggcccccacctcctcctcctgtgctgcccctgcagccctgcagccctgcccagcccccacccctgcctgccaagaagaacctgcccacagccccacccaggagaagagtgtctgagcgggtgtccctggaggaccagagccctggcatggctgctgagggggaccagctgagcctgcccccccagggcaccagtgatggccctgaggacaccccccgggagagcacagagcagggccaggacacagaggtgaaggccagtgacccccacagcatgcctgagctgcccaggacagccaagcagccccctgtgcccccacccaggaagaagaggatcagccggcagctggccagcaccctgcctgcccccctggagaatgctgagctgtgcacccaggccatggccctggagacccccaccccaggccccccccgggagggccagagccctgccagccaggccggcacccagcaccccccagcccaggccacagcccacagccagagcagccctgagttcaagggcagcctggccagcctgagtgacagcctgggcgtgtctgtgatggccacagaccaggacagctacagcaccagcagcacagaggaggagctggagcagttcagcagccccagcgtgaagaagaagcccagcatgatcctgggcaaggcccggcaccggctgagctttgccagcttcagctccatgttccacgccttcctgagcaacaacaggaagctgtacaagaaggtggtggagctggcccaggacaagggcagctacttcggcagcctggtgcaggactacaaggtgtacagcctggagatgatggcccggcagaccagcagcacagagatgctgcaggagatccgcaccatgatgacccagctgaagagctacctgctgcagagcacagagctgaaggccctggtggaccctgccctgcacagcgaggaggagctggaggccatcgtggagagcgccctgtacaagtgtgtgctgaagcccctgaaggaggccatcaacagctgcctgcaccagatccacagcaaggatggcagcctgcagcagctgaaggagaaccagctggtgatcctggccaccaccaccacagacctgggcgtgaccacctctgtgcctgaggtgcccatgatggagaagatcctgcagaagttcacctccatgcacaaggcctacagccctgagaagaagatcagcatcctgctgaagacctgcaagctgatctatgacagcatggccctgggcaaccctgggaagccctacggggctgatgacttcctgcctgtgctgatgtatgtgctggcccggagcaacctgacagagatgctgctgaatgtggagtacatgatggagctgatggaccctgccctgcagctgggggagggcagctactacctgaccaccacctatggagccctggagcacatcaagagctatgacaagatcaccgtgacccggcagctgtctgtggaggtgcaggacagcatccaccgctgggagaggaggaggaccctgaacaaggcccgggccagccgcagctctgtgcaggacttcatctgtgtgtcctacctggagcctgagcagcaggcccggaccctggccagcagagctgacacccaggcccaggccctgtgtgcccagtgtgccgagaagtttgctgtggagcggccccaggcccaccggctgtttgtgctggtggatggccgctgcttccagctggctgatgatgccctgccccactgcatcaagggctacctgctgcggtctgagcccaagagggacttccactttgtgtaccggcccctggatggcggcggcggcggcggcggcggcagccccccctgcctggtggtgcgggagcccaacttcctgtag

SEQ ID NO: 21124 - DNA, 1728 bp, synthetic construct
  source 1..1728: mol_type = other DNA; note = Synthetic coding sequence
atgagcagtgatgaggagaagtacagcctgcctgtggtgcagaatgacagcagccggggcagctctgtgagcagcaacctgcaggaggagtatgaggagctgctgcactacgccatcgtgacccccaacatcgagccctgtgccagccagagcagccaccccaagggggagctggtgcctgatgtgcgcatcagcaccatccatgacatcctgcacagccagggcaacaacagcgaggtgcgggagacagccatcgaggtgggcaagggctgtgacttccacatcagcagccacagcaagacagatgagagcagccctgtgctgagccccaggaagcccagccaccctgtgatggacttcttcagcagccacctgctggccgacagcagcagccctgccaccaacagcagccacacagatgcccacgagatcctggtgtctgacttcctggtgtctgatgagaacctgcagaagatggagaatgtgctggacctgtggagcagcggcctgaagaccaacatcatcagcgagctgagcaagtggaggctgaacttcatcgactggcacaggatggagatgaggaaggagaaggagaagcatgctgcccacctgaagcagctgtgcaaccagatcaatgagctgaaggagctgcagaagacctttgagatcagcattggaaggaaggatgaagtcatcagcagcctgagccacgccatcggcaagcagaaggagaagattgagctgatgaggaccttcttccactggagaattggacatgtgcgggcccggcaggatgtgtatgagggcaagctggccgaccagtactaccagaggaccctgctgaagaaggtgtggaaggtgtggaggtctgtggtgcagaagcagtggaaggatgtggtggagcgggcctgccaggcccgggcagaggaggtgtgcatccagatcagcaatgactatgaggccaaggtggccatgctgagcggggccctggagaatgccaaggccgagatccagaggatgcagcacgagaaggagcactttgaggacagcatgaagaaggccttcatgaggggcgtgtgtgccctgaacctggaggccatgaccatcttccagaacagaaatgatgctggcatcgacagcaccaacaacaagaaggaggagtatggccctggggtgcagggcaaggagcacagcgcccacctggaccccagcgccccacccatgcccctgcctgtgaccagccccctgctgcccagccccccagctgctgtgggcggggccagcgccacagctgtgcccagcgctgcctccatgaccagcaccagggctgccagcgccagctctgtgcacgtgcctgtgtctgccctgggcgccggcagcgctgccacagctgccagcgaggagatgtatgtgccccgggtggtgaccagcgcccagcagaaggccggccgcaccatcacagcccgcatcaccggccgctgtgactttgccagcaagaaccgcatcagcagcagcctggccatcatgggcgtgtccccacccatgagctctgtggtggtggagaagcaccaccctgtgacagtgcagaccatcccccaggccacagctgccaagtaccccaggaccatccaccctgagagcagcaccagcgccagccgcagcctgggcaccaggtctgcccacacccagagcctgacctctgtgcacagcatcaaggtggtggactag

SEQ ID NO: 21125 - DNA, 2091 bp, synthetic construct
  source 1..2091: mol_type = other DNA; note = Synthetic coding sequence
atggccaactacagaaacaccagcgagatccccctggtgctggtgggcacccaggatgccatcagcagcgccaacccccgggtgattgatgatgcccgggccaggaagctgagcaatgacctgaagcgctgcacctactatgagacctgtgccacctacggcctgaatgtggagagggtcttccaggatgtggcccagaagatcgtggccaccaggaagaagcagcagctgagcatcggcccctgcaagagcctgcccaacagccccagccacagctctgtgtgcagcgcccaggtgtctgctgtgcacatcagccagaccagcaatggaggcggcagcctgagtgactacagcagctctgtgcccagcacccccagcaccagccagaaggagctgagaattgatgtgcccccaacagccaacacccccacccctgtgaggaagcagagcaagaggaggagcaacctcttcaccagcaggaaaggaagtgaccctgacaaggagaagaagggcctggagagcagagctgacagcatcggcagcggccgggccatccccatcaagcagggcatgctgctgaagaggtctgggaagagcctgaacaaggagtggaagaagaagtatgtgaccctgtgtgacaacggggtgctgacctaccaccccagcctgcatgactacatgcagaatgtgcacggcaaggagattgacctgctgcggaccaccgtgaaggtgcctgggaagaggcctccccgggccaccagcgcctgtgcccccatcagcagccccaagaccaacggcctgagcaaggacatgagcagcctgcacatcagccccaacagcggaaatgtgaccagcgccagcggcagccagatggccagcggcatcagcctggtgtccttcaacagcaggccagatggcatgcaccagaggagctacagcgtgagcagcgctgaccagtggagcgaggccaccgtcatcgccaacagcgccatcagcagtgacaccggcctgggggacagcgtgtgcagcagccccagcatcagcagcaccaccagccccaagctggaccccccacccagcccccacgccaacaggaagaagcacaggaggaagaagagcaccagcaacttcaaggcagatggcctgtctggaacagctgaggagcaggaggagaactttgagttcatcatcgtgtccctgaccggccagacctggcactttgaggccaccacctatgaggagagagatgcctgggtgcaggccatcgagagccagatcctggccagcctgcagagctgtgagagcagcaagaacaagagccggctgaccagccagagcgaggccatggccctgcagagcatccggaacatgaggggcaacagccactgtgtggactgtgagacccagaaccccaactgggccagcctgaacctgggcgccctgatgtgcattgaatgttctggcatccacaggaacctgggcacccacctgagccgggtgcgcagcctggacctggatgactggcctgtggagctgatcaaggtgatgagcagcattggaaatgagctggccaacagcgtgtgggaggagagcagccagggccgcaccaagcccagcgtggacagcacccgggaggagaaggagcgctggatccgggccaagtatgagcagaagctgttcctggcccccctgccctgcacagagctgagcctgggccagcacctgctgcgggccacagcagatgaggacctgaggacagccatcctgctgctggcccacggcagcagagatgaggtgaatgagacctgtggggagggagatggccgcacagccctgcacctggcctgcaggaaaggaaatgtggtgctggcccagctgctgatctggtacggcgtggatgtgacagccagagatgcccacggcaacacagccctggcctatgcccggcaggccagcagccaggagtgcattgatgtgctgctgcagtatggctgcccagatgaaagatttgtgctgatggccacccccaacctgagcagaagaaacaacaacagaaacaacagcagcggccgggtgcccaccatcatctag

SEQ ID NO: 21126 - DNA, 270 bp, synthetic construct; identical to SEQ ID NO: 20498
  source 1..270: mol_type = other DNA; note = Synthetic coding sequence

SEQ ID NO: 21127 - DNA, 1785 bp, synthetic construct
  source 1..1785: mol_type = other DNA; note = Synthetic coding sequence
atgacagacacccggcggcgggtgaaggtgtacaccctgaatgaagatcggcagtgggatgaccggggcaccggccacgtgagcagcggctacgtggagcggctgaagggcatgagcctgctggtgcgggcagagagtgatggcagcctgctgctggagagcaagatcaaccccaacacagcctaccagaagcagcaggaggatgagaagttcctgacagacctgtttgcccagctgacagatgaggccacagatgaggagaagaggcaggagctggtgaacttcctgaaggagttctgtgccttcagccagaccctgcagccccagaacagagatgccttcttcaagaccctgagcaacatgggcatcctgcctgccctggaggtgatcctgggcatggatgacacccaggtgcgctctgctgccacagacatcttctcctacctggtggagtacaaccccagcatggtgcgggagtttgtgatgcaggaggcccagcagaatgatgatgtgtccaagaagctgacagagcagaagatcaccagcaaggacatcctgctgatcaacctgatcatcgagcacatgatctgtgacacagatcctgagctgggcggcgctgtgcagctgatgggcctgctgcggaccctggtggaccctgagaacatgctggccacagccaacaagacagagaagacagagttcctgggcttcttctacaagcactgcatgcacgtgctgacagcccccctgctggccaacaccacagaggacaagcccagcaaggatgacttccagacagcccagctgctggccctggtgctggagctgctgaccttctgtgtggagcaccacacctaccacatcaagaactacatcatcaacaaggacatcctgcggcgggtgctggtgctgatggccagcaagcacgccttcctggccctgtgtgccctgcgcttcaagaggaagatcatcggcctgaaggatgagttctacaaccgctacatcatgaagagcttcctgtttgagcctgtggtgaaggccttcctgaacaacggcagccgctacaacctgatgaacagcgccatcatcgagatgtttgagttcatccgggtggaggacatcaagagcctgacagcccacgtgattgagaactactggaaggccctggaggatgtggactatgtgcagaccttcaagggcctgaagctgcgctttgagcagcagcgggagcggcaggacaaccccaagctggacagcatgaggagcatcctgaggaaccaccgctacagaagagatgcccggaccctggaggatgaggaggagatgtggttcaacacagatgaagatgacatggaggatggagaggccgtggtgagccccagcgacaagaccaagaatgatgatgacatcatggaccccatcagcaagttcatggagaggaagaagctgaaggagagcgaggagaaggaggtgctgctgaagaccaacctgagcggccggcagagccccagcttcaagctgagcctgagcagcggcaccaagaccaacctgaccagccagagcagcaccaccaacctgcccggcagccctggcagccctggcagccctggcagccctggcagccctggctctgtgcccaagaacaccagccagacagctgccatcaccaccaagggcggcctggtgggcctggtggactacccagatgatgatgaagatgatgatgaagatgaggacaaggaggacaccctgcccctgagcaagaaggccaagtttgacagctag

SEQ ID NO: 21128 - DNA, 522 bp, synthetic construct
  source 1..522: mol_type = other DNA; note = Synthetic coding sequence
atgttcacagaaggagaggagatgtacctgcagggcagcacagtgtggcacccagactgcaagcagagcaccaagacagaggagaagctgcggcccaccaggaccagcagcgagagcatctacagccggcccggcagcagcatccctggcagccctggccacaccatctatgccaaggtggacaatgagatcctggactacaaggacctggccgccatccccaaggtgaaggccatctatgacatcgagaggccagacctgatcacctatgagcccttctacaccagcggctatgatgacaagcaggagcggcagagcctgggggagagccccaggaccctgagccccaccccatctgctgagggctaccaggatgtgcgggacaggatgatccacaggagcaccagccagggcagcatcaacagccctgtgtacagccgccacagctacacccccaccaccagccgcagcccccagcacttccacaggccagaccagggcatcaacatctacaggaagtag

SEQ ID NO: 21129 - DNA, 1620 bp, synthetic construct; identical to SEQ ID NO: 19050
  source 1..1620: mol_type = other DNA; note = Synthetic coding sequence

SEQ ID NO: 21130 - DNA, 2112 bp, synthetic construct
  source 1..2112: mol_type = other DNA; note = Synthetic coding sequence
atgttccgctatgagagcctggaggactgccccctggatgaagatgaagatgccttccagggcctgggggaggaggatgaggagattgaccagttcaatgatgacacctttggaagtggagctgtggatgatgactggcaggaggcccacgagcggctggccgagctggaggagaagctgcctgtggccgtgaatgagcagacaggaaatggagagagagatgagatggacctgctgggggaccacgaggagaacctggccgagcggctgagcaagatggtgattgaaaatgagctggaggaccctgccatcatgagagctgtgcagaccaggcctgtgctgcagccccagcccggcagcctgaacagcagcatctgggatggcagcgaggtgctgcggcgcatccggggccccctgctggcccaggagatgcccaccgtgtctgtgctggagtatgccctgccccagaggcctccccagggcccagaagatgaccgggacctgtctgagcgggccctgcccaggaggagcaccagccccatcatcggcagcccccctgtgcgggctgtgcccatcggcaccccacccaagcagatggctgtgcccagcttcacccagcagatcctgtgccccaagcctgtgcacgtgcggccccccatgccaccccgctacccagccccctacggggagaggatgagccccaaccagctgtgcagcgtgcccctgcagcccggccgcatgagccccagccagtttgcccgggtgcccggctttgtgggcagccccctggccgccatgaaccccaagctgctgcagggccgggtgggccagatgctgcccccagcccctggcttccgggccttcttcagcgccccacccagcgccaccccaccaccccagcagcaccccccaggccctggcccccacctgcagaacctgcggagccaggcccccatgttccggccagacaccacccacctgcacccccagcaccggcggctgctgcaccagaggcagcagcagaacagaagccagcacaggaacctgaatggagctggggaccggggcagccacaggagcagccaccaggaccacctgaggaaggacccctatgccaacctgatgctgcagcgggagaaggactgggtgtccaagatccagatgatgcagctgcagagcacagacccctacctggatgacttctactaccagaactactttgagaagctggagaagctgtctgctgctgaggagatccagggagatggccccaagaaggagaggaccaagctgatcaccccccaggtggccaagctggagcacgcctacaagcctgtgcagtttgagggcagcctgggcaagctgactgtgtcctctgtgaacaaccccaggaagatgattgatgctgtggtgaccagccgctcagaagatgatgagaccaaggagaagcaggtgcgggacaagaggaggaagaccctggtgatcatcgagaagacctacagcctgctgctggatgtggaggactatgaaagacgctacctgctgagcctggaggaggagaggcctgccctgatggatgacaggaagcacaagatctgcagcatgtatgacaacctgcggggcaagctgcccggccaggagcggcccagtgatgaccactttgtgcagatcatgtgcatcaggaagggcaagaggatggtggcccgcatcctgcccttcctgagcacagagcaggccgctgacatcctgatgaccacagccaggaacctgcccttcctgatcaagaaggatgcccaggatgaggtgctgccctgcctgctgagccccttcagcctgctgctgtaccacctgcccagcgtgtccatcaccagcctgctgcggcagctgatgaacctgcccagcagtgaccctgccacagagagcacccagaacaaccagtggacagaggtgatgttcatggccacccgggagctgctgcgcatcccccaggccgccctggccaagcccatcagcatccccaccaacctggtgtccctcttcagccgctacgtggaccggcagaagctgaacctgctggagaccaagctgcagctggtgcagggcatcagatag

SEQ ID NO: 21131 - DNA, 957 bp, synthetic construct
  source 1..957: mol_type = other DNA; note = Synthetic coding sequence
atgtctgcccacaacagaggaacagagctggacctgtcctggatcagcaagatccaggtgaaccaccctgctgtgctgcggcgggcagagcagatccaggccaggagaacagtgaagaaggagtggcaggccgcctggctgctgaaggctgtgaccttcatcgacctgaccaccctgtctggagatgacaccagcagcaacatccagaggctgtgctacaaggccaagtaccccatccgggaggacctgctgaaggccctgaacatgcatgacaagggcatcaccacagctgctgtgtgtgtgtacccagcccgggtgtgtgatgctgtgaaggccctgaaggccgccggctgcaacatccctgtggcctctgtggccgccggcttccctgctggccagacccacctgaagacccggctggaggagatccggctggccgtggaggatggagccacagaaattgatgtggtgatcaacagaagcctggtgctgaccggccagtgggaggccctgtatgatgagatccggcagttcaggaaggcctgtggggaggcccacctgaagaccatcctggccactggagagctgggcaccctgaccaacgtgtacaaggcctccatgattgccatgatggccggcagtgacttcatcaagaccagcacaggcaaggagaccgtgaatgccaccttccctgtggccatcgtgatgctgcgggccatccgggacttcttctggaagacaggcaacaagattggcttcaagccagctgggggcatccgcagcgccaaggacagcctggcctggctgagcctggtgaaggaggagctgggagatgagtggctgaagccagagctgttccgcatcggggccagcaccctgctgagtgacatcgagcggcagatctaccaccacgtgacaggccgctatgctgcctaccatgacctgcccatgtcctag

SEQ ID NO: 21132 - DNA, 1188 bp, synthetic construct; identical to SEQ ID NO: 20054
  source 1..1188: mol_type = other DNA; note = Synthetic coding sequence

SEQ ID NO: 21133 - DNA, 3288 bp, synthetic construct
  source 1..3288: mol_type = other DNA; note = Synthetic coding sequence
atggccgagggcgccgccggcagagaagatcctgcccccccagatgctgctggaggagaagatgacccccgggtgggcccagatgctgctggggactgtgtgacagctgccagcggcggccgcatgagggacagaagaagtggagtggccctgcccggggctgctggcaccccagctgacagcgaggccggcctgctggaggccgcccgggccaccccccggcgcagcagcatcatcaaggaccccagcaaccagaagtgtggcggcaggaagaagacagtgtccttcagctccatgcccagcgagaagaagatcagcagcgccaatgactgcatctccttcatgcaggccggctgtgagctgaagaaggtgcggcccaacagccgcatctacaaccgcttcttcaccctggacacagacctgcaggccctgcgctgggagcccagcaagaaggacctggagaaggccaagctggacatcagcgccatcaaggagatccggctgggcaagaacacagagaccttcaggaacaacggcctggccgaccagatctgtgaggactgtgccttcagcatcctgcacggggagaactatgagagcctggacctggtggccaacagcgcagatgtggccaacatctgggtgtctggcctgcgctacctggtgagccgcagcaagcagcccctggacttcatggagggcaaccagaacaccccccgcttcatgtggctgaagacagtgtttgaggccgcagatgtggatggaaatggcatcatgctggaggacacctctgtggagctgatcaagcagctgaaccccaccctgaaggaggccaagatccggctgaagttcaaggagatccagaagagcaaggagaagctgaccaccagggtgacagaggaggagttctgtgaggccttctgtgagctgtgcaccaggcctgaggtgtacttcctgctggtgcagatcagcaagaacaaggagtacctggatgccaatgacctgatgctgttcctggaggccgagcagggcgtgacccacatcacagaggacatctgcctggacatcatccgccgctatgagctgtctgaggagggccggcagaagggcttcctggccattgatggcttcacccagtacctgctgagcagtgaatgtgacatctttgatcctgagcagaagaaggtggcccaggacatgacccagcccctgagccactactacatcaatgccagccacaacacctacctgattgaggaccagttccggggccctgctgacatcaatggctacatccgggccctgaagatgggctgccgctctgtggagctggatgtgtctgatggcagtgacaatgagcccatcctgtgcaacagaaacaacatgaccacccacgtgtccttccgcagcgtcatcgaggtgatcaacaagtttgcctttgtggccagcgagtaccccctcatcctgtgcctgggcaaccactgcagcctgccccagcagaaggtgatggcccagcagatgaagaaggtgtttggaaacaagctgtacacagaggcccccctgcccagcgagagctacctgcccagccctgagaagctgaagaggatgatcatcgtgaagggcaagaagctgcccagcgaccctgatgtgctggagggggaggtgacagatgaagatgaggaggccgagatgagcaggaggatgtctgtggactacaatggagagcagaagcagatccggctgtgccgggagctgagtgacctggtgtccatctgcaagtctgtgcagtacagagactttgagctgtccatgaagagccagaactactgggagatgtgcagcttcagcgagacagaggccagcagaattgccaatgagtacccagaagattttgtgaactacaacaagaagttcctgagccgcatctaccccagcgccatgagaattgacagcagcaacctgaacccccaggacttctggaactgtggctgccagatcgtggccatgaacttccagaccccaggccccatgatggacctgcacacaggctggttcctgcagaatggaggctgcggctacgtgctgcggcccagcatcatgagagatgaggtgtcctacttcagcgccaacaccaagggcatcctgcccggggtgagccccctggccctgcacatcaagatcatcagcggccagaacttccccaagcccaagggggcctgtgccaagggagatgtgattgacccctacgtgtgcatcgagatccacggcatcccagctgactgcagcgagcagaggaccaagacagtgcagcagaacagcgacaaccccatctttgatgagacctttgagttccaggtgaacctgcctgagctggccatgatccgctttgtggtgctggatgatgactacatcggagatgagttcatcggccagtacaccatcccctttgaatgtctgcagcccggctacagacatgtgcccctgcggagctttgtgggggacatcatggagcacgtgaccctgtttgtgcacatcgccatcaccaacagaagtggcggcggcaaggcccagaagaggagcctgtctgtgaggatgggcaagaaggtgcgggagtacaccatgctgaggaacatcggcctgaagaccattgatgacatcttcaagattgctgtgcaccccctgcgggaggccatcgacatgagggagaacatgcagaatgccatcgtgtccatcaaggagctgtgtggcctgccccccatcgccagcctgaagcagtgcctgctgaccctgagcagccgcctcatcaccagtgacaacacccccagcgtgtccctggtgatgaaggacagcttcccctacctggagcccctgggcgccatcccagatgtgcagaagaagatgctgacagcctatgacctgatgatccaggagagccgcttcctgattgagatggctgacacagtgcaggagaagatcgtgcagtgccagaaggccggcatggagttccacgaggagctgcacaacctgggcgccaaggagggcctgaagggcaggaagctgaacaaggccacagagagctttgcctggaacatcaccgtgctgaagggccagggcgacctgctgaagaatgccaagaatgaggccatcgagaacatgaagcagatccagctggcctgcctgagctgtggcctgagcaaggcccccagcagcagcgctgaggccaagagcaagaggagcctggaggccatcgaggagaaggagagcagtgaagaaaatggcaagctgtag

SEQ ID NO: 21134 - DNA, 543 bp, synthetic construct
  source 1..543: mol_type = other DNA; note = Synthetic coding sequence
atggagcagcccaagggcgtggactggacagtcatcatcctgacctgccagtacaaggacagcgtgcaggtgttccagcgggagctggaggtgcggcagaagcgggagcagatcccagctggcaccctgctgctggccgtggaggaccctgagaagagggtgggcagcggcggggccaccctgaatgccctgctggtggccgctgagcacctgagcgcccgggccggcttcaccggccgggacttcccctttgatgactgtggccgggccttcacctgcctgcctgtggagaaccctgaggcccctgtggaggccctggtgtgcaacctggactgcctgctggacatcatgacctaccgcctgggccctggcagccccccaggagtgtgggtgtgcagcacagacatgctgctgtctgtgcctgccaaccctggagagcctgagaccacctgggactgcctgcccagcagccagccccagcaggaggccagcagcgccctgctggcccacccagccagcggccctgcccccctgccctactag

SEQ ID NO: 21135 - DNA, 429 bp, synthetic construct
  source 1..429: mol_type = other DNA; note = Synthetic coding sequence
atgaatgaggtggtgcacaccagccccaccatcggcagcaatgtggaggagatcgtcatcaacaacacccgcttcctgatgtgggacatcggcggccaggagagcctgcggagctcctggaacacctactacaccaacacagaatttgtgattgtggtggtggacagcacagaccgggagcgcatctctgtgacccgggaggagctgtacaagatgctggcccacgaggacctgaggaaggccggcctgctgatctttgccaacaagcaggatgtgaaggagtgcatgacagtggccgagatcagccagttcctgaagctgaccagcatcaaggaccaccagtggcacatccaggcctgctgtgccctgaccggggagggcctgtgccagggcctggagtggatgatgagccggctgaagatcagatag

SEQ ID NO: 21136 - DNA, 342 bp, synthetic construct
  source 1..342: mol_type = other DNA; note = Synthetic coding sequence
atggagggcgtgctgtacaagtggaccaactacctgagcggctggcagccccgctggttcctgctgtgtggcggcatcctgagctactatgacagcccagaagatgcctggaagggctgcaagggcagcatccagatggctgtgtgtgagatccaggtgcacagcgtggacaacaccaggatggacctgatcatccctggagagcagtacttctacctgaaggcccggtctgtggccgagcggcagcgctggctggtggccctgggcagcgccaaggcctgcctgacagacagcaggacccagaaggagaagggcaacctgctgaagaccctgaagacctag

SEQ ID NO: 21137 - DNA, 1119 bp, synthetic construct
  source 1..1119: mol_type = other DNA; note = Synthetic coding sequence
atggccagcaaccacaagagcagcgctgcccggcctgtgtcccggggcggcgtgggcctgaccggccggccccccagcggcatccggcccctgagcggcaacatccgggtggccacagccatgcctcctggaacagcccggcccggcagccggggctgccccatcggcactggaggagtgctgagcagccagatcaaggtggcccacaggcctgtgacccagcagggcctgaccggcatgaagacaggcaccaagggcccccagaggcagatcctggacaagagctactacctgggcctgctgcggagcaagatcagcgagctgaccacagaggtgaacaagctgcagaagggcatcgagatgtacaaccaggagaacagcgtgtacctgtcctatgagaagagagctgagaccctggccgtggagatcaaggagctgcagggccagctggccgactacaacatgctggtggacaagctgaacaccaacacagagatggaggaggtgatgaatgactacaacatgctgaaggcccagaatgaccgggagacccagagcctggatgtgatcttcacagagcggcaggccaaggagaagcagatccgctctgtggaggaggagattgagcaggagaagcaggccacagatgacatcatcaagaacatgagctttgagaaccaggtgaagtacctggagatgaagaccaccaatgagaagctgctgcaggagctggacaccctgcagcagcagctggacagccagaacatgaagaaggagagcctggaggccgagatcgcccacagccaggtgaagcaggaggccgtgctgctgcacgagaagctgtatgagctggagagccaccgggaccagatgattgctgaggacaagagcatcggcagccccatggaggagcgggagaagctgctgaagcagatcaaggatgacaaccaggagatcgcctccatggagcggcagctgacagacaccaaggagaagatcaaccagttcatcgaggagatccggcagctggacatggacctggaggagcaccaggaccccaccaactacggctggaagatcctggagaagaacacaggcagcttcaagaagcaggtgtag

SEQ ID NO: 21138 - DNA, 345 bp, synthetic construct; identical to SEQ ID NO: 20878
  source 1..345: mol_type = other DNA; note = Synthetic coding sequence

SEQ ID NO: 21139 - DNA, 327 bp, synthetic construct
  source 1..327: mol_type = other DNA; note = Synthetic coding sequence
atggccatggcccccagccccagcctggtgcaggtgtacaccagccctgctgctgtggccgtgtgggagtggcaggacggcctgggcacctggcacccctacagcgccaccgtgtgcagcttcatcgagcagcagtttgtgcagcagaagggccagcgcttcggcctgggcagcctggcccacagcatccccctgggccaggccgaccccagcctggccccctacatcatcgacctgcccagctggacccagttccggcaggacaccggcaccatgagagctgtgcggcggcacctgttcccccagcacagcgcccctggccgctag

SEQ ID NO: 21140 - DNA, 549 bp, synthetic construct
  source 1..549: mol_type = other DNA; note = Synthetic coding sequence
atgagggagtgcatcagcatccacgtgggccaggccggcgtgcagattggaaatgcctgctgggagctgtactgcctggagcacggcatccagccagatggccagatgcccagcgacaagaccatcggcggcggagatgacagcttcaacaccttcttcagcgagaccggggccggcaagcacgtgcccagggctgtgtttgtggacctggagcccaccgtgattgactggtgccccaccggcttcaaggtgggcatcaactaccagccccccaccgtggtgcctggaggagacctggccaaggtgcagagagctgtgtgcatgctgagcaacaccacagccatcgccgaggcctgggcccggctggaccacaagtttgacctgatgtatgccaagagggcctttgtgcactggtacgtgggggagggcatggaggagggggagttcagcgaggcccgggaggacatggccgccctggagaaggactatgaggaggtgggcgtggacagcgtggagggggagggggaggaggagggggaggagtactag

SEQ ID NO: 21141 - DNA, 483 bp, synthetic construct; identical to SEQ ID NO: 20009
  source 1..483: mol_type = other DNA; note = Synthetic coding sequence

SEQ ID NO: 21142 - DNA, 3483 bp, synthetic construct
  source 1..3483: mol_type = other DNA; note = Synthetic coding sequence
atggcctgcagaagacgctactttgtggagggggaggcccccagcagcgagaccggcaccagcctggacagccccagcgcctacccccagggccccctggtgcccggcagcagcctgagcccagaccactatgagcacacctctgtgggcgcctacggcctgtacagcggccccccaggccagcagcagaggacccggcggcccaagctgcagcacagcaccagcatcctgaggaagcaggccgaggaggaggccatcaagaggagccgcagcctgtctgagagctatgagctgagcagtgacctgcaggacaagcaggtggagatgctggagaggaaatatggaggccgcctggtgaccaggcatgctgcccggaccatccagacagccttccggcagtaccagatgaacaagaactttgagcggctgcggagctccatgtctgaaaataggatgagccgccgcatcgtgctgagcaacatgaggatgcagttctcctttgagggccctgagaaggtgcacagcagctactttgagggcaagcaggtgtctgtgaccaatgatggcagccagctgggcgccctggtgtccccagaatgtggggacctgtctgagcccaccaccctgaagagccctgcccccagcagtgactttgctgatgccatcacagagctggaggatgccttcagccggcaggtgaagagcctggccgagagcattgatgatgccctgaactgccgcagcctgcacacagaggaggccccagccctggatgctgcccgggcccgggacacagagccccagacagccctgcacggcatggaccacaggaagctggatgagatgacagccagctacagtgatgtgaccctgtacattgatgaggaggagctgagcccccccctgcccctgagccaggccggggaccggcccagcagcacagaaagtgacctgcggctgcgggccggcggggccgccccagactactgggccctggcccacaaggaggacaaggctgacacagacaccagctgccgcagcacccccagcctggagcggcaggagcagaggctgcgggtggagcacctgcccctgctgaccatcgagccccccagcgacagctctgtggacctgagtgacagaagtgagcggggcagcctgaagaggcagagcgcctatgaaagaagcctgggcggccagcagggcagccccaagcacggcccccacagcggggcccccaagagcctgccccgggaggagcctgagctgcggcccaggcctccccggcccctggacagccacctggccatcaatggcagcgccaaccggcagagcaagtctgagagtgactacagtgatggagacaatgacagcatcaacagcaccagcaacagcaatgacaccatcaactgcagcagcgagagcagcagccgggacagcctgcgggagcagaccctgagcaagcagacctaccacaaggaggccaggaacagctgggacagccctgccttcagcaatgatgtgatcaggaagaggcactaccgcatcggcctgaacctcttcaacaagaagccagagaagggcgtgcagtacctgattgagcggggctttgtgcctgacacccctgtgggcgtggcccacttcctgctgcagaggaagggcctgagccggcagatgattggagagttcctgggcaaccggcagaagcagttcaacagagatgtgctggactgtgtggtggatgagatggacttcagcaccatggagctggatgaggccctgaggaagttccaggcccacatccgggtgcagggcgaggcccagaaggtggagcggctcatcgaggccttcagccagcgctactgcatctgcaaccctggggtggtgcggcagttcagaaatccagacaccatcttcatcctggcctttgccatcatcctgctgaacacagacatgtacagccccaacgtgaagccagagaggaagatgaagctggaggacttcatcaagaacctgcggggcgtggatgatggagaggacatcccccgggagatgctgatgggcatctatgaaagaatcaggaagcgggagctgaagaccaatgaagaccacgtgtcccaggtgcagaaggtggagaagctgattgtgggcaagaagcccatcggcagcctgcaccctggcctgggctgtgtgctgagcctgccccaccggcggctggtgtgctactgccgcctgtttgaggtgcctgaccccaacaagccccagaagctgggcctgcaccagcgggagatcttcctgttcaatgacctgctggtggtgaccaagatcttccagaagaagaagaacagcgtgacctacagcttccggcagagcttcagcctgtatggcatgcaggtgctgctgtttgagaaccagtactacccaaatggcatccggctgaccagctctgtgcctggagctgacatcaaggtgctgatcaacttcaatgcccccaacccccaggacaggaagaagttcacagatgacctgcgggagagcattgctgaggtgcaggagatggagaagcaccgcatcgagagcgagctggagaagcagaagggcgtggtgcggcccagcatgagccagtgcagcagcctgaagaaggagagcggaaatggcaccctgagccgggcctgcctggatgacagctatgccagcggggagggcctgaagaggtctgccctgagcagcagcctgcgggacctgtctgaggccggcaagagaggaagaagaagcagcgctggcagcctggagagcaatgtggagggcagcatcatcagcagcccccacatgagaagaagagccaccagcaccagagaatgtcccagccggccccaccagaccatgcccaacagcagcagcctgctgggcagcctgtttggcagcaagaggggcaagcccccaccccaggcccacctgcccagcgccccagccctggccaccccaccacccaccggcggccctgccagcctggccgccctgtgtggctggcccccacctggggcccccagaggagctgctgctggaagacatgcccgggccagccaccctgtgctgccccatgctgagcccagccctgtgccccccagccccccacctccacccaccccagcccacccagcccggacccctgtgcccccccggcccccctggggcccccccagcctgcggggcccctgcccccggcccccagctgctgccctgggccccaggggggcccacagcgccccaccctgggccgccccctgcccagctgccccccaccagcagcagggccagacccagaggcaccagcacaactgtgtggacagcctgggccggggcccccggctgcctgagaccccagcccaccacacaggccacgcccggggcagccctgctgcccaccagacccggggcacctctgtggccatcagccccctgtgccccagccggcccaactag

SEQ ID NO: 21143 - DNA, 378 bp, synthetic construct
  source 1..378: mol_type = other DNA; note = Synthetic coding sequence
atgaagaaggagcacgtgctgcactgccagttcagcgcctggtaccccttcttccggggcgtgaccatcaagagcgtcatcctgcccctgccccagaatgtgaaggactacctgctggatgatggcaccctggtggtgtctggaagagatgacccccccacccacagccagcctgacagtgatgatgaggccgaggagatccagtggagcgatgatgaaaatacagccaccctgacagatgcctactggatcgccatgaacagcagcctgaagtgcaagaccctgagtgacatcttcctgctcttcaagagcagtgacttcatcacccgggacttcacccagcccttcatccactgcacagatgacagcccagactag

SEQ ID NO: 21144 - DNA, 414 bp, synthetic construct; identical to SEQ ID NO: 20774
  source 1..414: mol_type = other DNA; note = Synthetic coding sequence

SEQ ID NO: 21145 - DNA, 3222 bp, synthetic construct
  source 1..3222: mol_type = other DNA; note = Synthetic coding sequence
atggaggagaggaagcatgagaccatgaacccagcccacgtgctgtttgacagatttgtgcaggccaccacctgcaagggcaccctgaaggccttccaggagctgtgtgaccacctggagctgaagcccaaggactaccgctccttctaccacaagctgaagagcaagctgaactactggaaggccaaggccctgtgggccaagctggacaagaggggcagccacaaggactacaagaagggcaaggcctgcaccaacaccaagtgcctgatcatcggggccggcccctgtggcctgaggacagccatcgacctgagcctgctgggcgccaaggtggtggtgattgagaagagagatgccttcagcagaaataatgtgctgcacctgtggcccttcaccatccatgacctgcggggcctgggcgccaagaagttctacggcaagttctgtgccggggccatcgaccacatcagcatccggcagctgcagctgatcctgctgaaggtggccctgatcctgggcatcgagatccacgtgaatgtggagttccagggcctcatccagcccccagaggaccaggagaatgaaagaattggctggagggccctggtgcaccccaagacccaccctgtgtctgaatatgaatttgaggtgatcattggaggagatggaagaagaaacaccctggagggcttccggaggaaggagttccggggcaagctggccatcgccatcacagccaacttcatcaacagaaacaccacagctgaggccaaggtggaggagatcagcggcgtggccttcatcttcaaccagaagttcttccaggagctgcgggaggccaccggcatcgacctggagaacatcgtgtactacaaggatgacacccactactttgtgatgacagccaagaagcagagcctgctggacaagggcgtcatcctgcatgactatgctgacacagagctgctgctgagccgggagaatgtggaccaggaggccctgctgtcctatgcccgggaggccgctgacttcagcacccagcagcagctgcccagcctggactttgccatcaaccactacggccagccagatgtggccatgtttgacttcacctgcatgtatgcctctgaaaatgctgccctggtgcgggagcagaatggccaccagctgctggtggccctggtgggggacagcctgctggagcccttctggcccatgggcactggaattgcccggggcttcctggccgccatggattctgcctggatggtgcgctcctggagcctgggcaccagccccctggaggtgctggccgagcgggagagcatctaccgcctgctgccccagaccaccccagaaaatgtgtccaagaacttcagccagtacagcattgatcctgtgacccgctaccccaacatcaacgtgaacttcctgcggcccagccaggtgcgccacctgtatgacaccggggagaccaaggacatccacctggagatggagagcctggtgaacagcaggaccacccccaagctgaccagaaatgaatctgtggcccggagcagcaagctgctgggctggtgccagaggcagacagatggctacgccggcgtgaatgtgacagacctgaccatgtcctggaagagcggcctggccctgtgtgccatcatccaccgctacagaccagacctgattgactttgacagcctggatgagcagaatgtggagaagaacaaccagctggcctttgatattgctgagaaggagctgggcatcagccccatcatgaccgggaaggagatggcctctgtgggggagccagacaagctgtccatggtgatgtacctgacccagttctatgagatgttcaaggacagcctgcccagcagtgacaccctggacctgaatgctgaggagaaggctgtgctgattgccagcaccaggagccccatctccttcctgagcaagctgggccagaccatcagcaggaagaggagccccaaggacaagaaggagaaggacctggatggagctgggaagaggaggaagaccagccagagcgaggaggaggaggccccccggggccacagaggagagcggcccaccctggtgtccaccctgacagacaggaggatggatgtggccgtgggcaaccagaacaaggtgaagtacatggccacccagctgctggccaagtttgaagaaaatgccccagcccagagcatcggcatccggcggcagcagcgggagaaggagtgcagcaggacctgccccaagaaggtgatcaccctgagccccccacccaccccaccaccctgccgggcccacggcggccagcagacctacagagacctggatgctgacaacagaggcaagcagagcccccaccacgagaggcctgagcctgagcccccccggcgcttctttgtggaccagtgggagctgagcctgagcctgcggagcagcgcccggcctgccagccccagcagtgacagcctgcggcagaagtacatcaagatgtacacaggaggagtgagcagcctggccgagcagatcgccaaccagctgcagaggaaggagcagcccaaggccctgctggacaagaaggagctgggctccatgaagaaggagttcccccagaacctgggcggcagtgacacctgctacttctgccagaagagggtgtatgtgatggagcggctgtctgctgagggcaagttcttccacaggagctgcttcaagtgtgagtactgtgccaccaccctgcggctgagcgcctatgcctatgacattgaagatggcaagttctactgcaagccccactactgctaccgcctgagcggctacgcccagaggaagaggcctgctgtggcccccctgagcggcaaggaggccaagggccccctgcaggatggagccaccacagatgccaacggccgggccaatgctgtggccagcagcacagagaggaccccaggcagcctgaccagcctgtttggctgggtggcccggcacagcctgggcctgtgtgacaaggccaagggcatgagccagcacctgcagagcaacatcagcagctttggccagcaggtggcccagaaccccctggacagcttcttcatgtgccagctgctggcctttggagtgcccttcctgtatggcctgtctgaggtgctggtgcagatccggggggagttccactggcaggccgtggcccagtag

SEQ ID NO: 21146 - DNA, 543 bp, synthetic construct
  source 1..543: mol_type = other DNA; note = Synthetic coding sequence
atgttcctgagctgtggcagcctgcaccagaggggccctgagacagatggcaccgtcttccgcatccacaccaaggccgagggcttcatggatgtggacatccccctggagctggtgttccacctgcctgtgaactaccccagctgcctgcccggcatcagcatcaacagcgagcagctgacccgggcccagtgtgtgacagtgaaggagaacctgctggagcaggccgagagcctgctgtctgagcccatggtgcatgagctggtgctgtggatccagcagaacctgcggcacatcctgagccagcctgagactggaagtggcagcgagaagtgcaccttcagcaccagcaccaccatggatgatggcctgtggatcaccctgctgcacctggaccacatgagggccaagaccaagtatgtgaagatcgtggagaagtgggccagtgacctgcggctgaccggccgcctgatgttcatgggcaagatcatcctgatcctgctgcagggcgacaggaacaacctgaaggtgcccaagagctag

SEQ ID NO: 21147 - DNA, 1521 bp, synthetic construct
  source 1..1521: mol_type = other DNA; note = Synthetic coding sequence
atgaagagaagatctgtgaccatgacagatggcctgacagctgacaaggtgaccaggagtgatggctgccccaccagcaccagcctgccccggccccgggacagcatccgcagctgtgccctgtccatggaccagatcccagacctgcacagccccatgagccccatcagcgagagccccagcagccctgcctacagcacagtgaccagggtgcatgctgccccagctgcccccagcgccacagccctgcctgccagccctgtggcccggcgcagcagcgagccccagctgtgccccggcagcgcccccaagacccacggggagagtgacaagggcccccacaccagccccagccacaccctgggcaaggccagccccagccccagcctgagcagctacagcgaccctgacagcggccactactgccagctgcagccccctgtgcggggcagccgggagtgggccgccacagagaccagcagccagcaggcccggagctatggagagcggctgaaggagctgtctgaaaatggagcccctgagggggactggggcaagaccttcaccgtgcccatcgtggaggtgaccagcagcttcaacccagccaccttccagagcctgctgatcccccgggacaaccggcccctggaggtgggcctgctgaggaaggtgaaggagctgctggccgaggtggatgcccggaccctggcccggcacgtgaccaaggtggactgcctggtggcccgcatcctgggcgtgaccaaggagatgcagaccctgatgggcgtgcgctggggcatggagctgctgaccctgccccacggccggcagctgcggctggacctgctggagcgcttccacaccatgagcatcatgctggccgtggacatcctgggctgcaccggcagcgctgaggagcgggccgccctgctgcacaagaccatccagctggccgctgagctgcggggcaccatgggcaacatgttctcctttgctgctgtgatgggcgccctggacatggcccagatcagccggctggagcagacctgggtgaccctgcggcagaggcacacagagggcgccatcctgtatgagaagaagctgaagcccttcctgaagagcctgaatgaaggcaaggagggcccccccctgagcaacaccaccttcccccacgtgctgcccctcatcaccctgctggagtgtgacagcgcccctcctgagggccctgagccctggggcagcacagaacatggagtggaggtggtgctggcccacctggaggccgccaggacagtggcccaccacggcggcctgtaccacaccaatgctgaggtgaagctgcagggcttccaggcccggcctgagctgctggaggtgttcagcacagagttccagatgaggctgctgtggggcagccagggcgccagcagcagccaggccaggagatatgagaagtttgacaaggtgctgacagccctgagccacaagctggagcctgctgtgcgcagcagcgagctgtag

SEQ ID NO: 21148 - DNA, 369 bp, synthetic construct; identical to SEQ ID NO: 21112
  source 1..369: mol_type = other DNA; note = Synthetic coding sequence

SEQ ID NO: 21149 - DNA, 369 bp, synthetic construct
  source 1..369: mol_type = other DNA; note = Synthetic coding sequence
atgcctgagatcaacaccaaccacctggacaagcagcaggtgcagctgctggccgagatgtgcatcctgattgatgaaaatgacaacaagattggagctgagaccaagaagaactgccacctgaatgaaaatattgagaagggcctgctgcaccgggccttctctgtgttcctgttcaacacagagaacaagctgctgctgcagcagaggagtgatgccaagatcaccttccctggctgcttcaccaacacctgctgcagccaccccctgagcaacccagctgagctggaggagagtgatgccctgggcgtgagaagagctgcccagaggcggctgaaggccgagctgggcatccccctggaggagtag

SEQ ID NO: 21150 - DNA, 408 bp, synthetic construct; identical to SEQ ID NO: 20517
  source 1..408: mol_type = other DNA; note = Synthetic coding sequence

SEQ ID NO: 21151 - DNA, 3282 bp, synthetic construct
  source 1..3282: mol_type = other DNA; note = Synthetic coding sequence
atgggcactggagacttcatctgcatctccatgactggaggagccccctggggcttccggctgcagggcggcaaggagcagaagcagcccctgcaggtggccaagatccggaaccagagcaaggccagcggcagcggcctgtgtgaaggagatgaggtggtgtccatcaatggaaacccctgtgccgacctgacctacccagaggtgatcaagctgatggagagcatcacagacagcctgcagatgctgatcaagaggcccagcagcggcatcagcgaggccctgatcagtgaaaatgaaaacaagaacctggagcacctgacccatggaggctacgtggagagcaccaccctgcagatccggcctgccaccaagacccagtgcacagagttcttcctggcccctgtgaagacagaggtgcccctggccgagaaccagaggagcggccctgactgtgccggcagcctgaaggaggagaccggccccagctaccagagggccccccagatgccagacagccagaggggccgggtggccgaggagctgatcctgcgggagaaggtggaggccgtgcagcccggccctgtggtggagctgcagctgagcctgagccaggagcggcacaagggggccagcggccccctggtggccctgcctggagctgagaagagcaagagcccagaccctgaccccaacctgagccatgaccgcatcgtgcacatcaacagcatccccaccaatgagaaggctgaccccttcctgcggagcagcaagatcatccagatcagcagcggccgggagctgcgggtcatccaggagagcgaggccggagatgctggcctgccccgggtggaggtgatcctggactgcagcgaccggcagaagacagagggctgccgcctgcaggccggcaaggaatgtgtggacagccctgtggagggcggccagagcgaggccccacccagcctggtgtcctttgctgtgagcagcgagggcacagagcagggcgaggaccccaggtctgagaaggaccacagccggccccacaagcaccgggcccggcatgcccggctgcggcgctctgagagcctgtctgagaagcaggtgaaggaggccaagagcaagtgcaagagcatcgccctgctgctgacagatgcccccaaccccaacagcaagggcgtgctgatgttcaagaagagaagaagaagagccaggaagtacaccctggtgtcctatggcaccggggagctggagcgggaggctgatgaggaggaggagggggacaaggaggacacctgtgaggtggccttcctgggcgccagcgagagcgaggtggatgaggagctgctgagtgatgtggatgacaacacccaggtggtgaactttgactgggacagcggcctggtggacatcgagaagaagctgaacagaggagacaagatggagatgctgcctgacaccaccgggaagggggccctgatgtttgccaagaggcgggagaggatggaccagatcacagcccagaaggaggaggacaaggtgggcggcacccccagccgggagcaggatgctgcccagacagatggcctgcggaccaccaccagctaccagaggaaggaggaggagagcgtgaggacccagagctctgtgtccaagagctacatcgaggtgagccacggcctgggccacgtgccccagcagaatggcttcagcggcaccagcgagacagccaacatccagaggatggtgcccatgaacagaacagccaagcccttccctggctctgtgaaccagcctgccacccccttcagccccaccaggaacatgaccagccccatcgctgacttccctgcccccccaccctacagcgctgtgaccccacctccagatgccttcagcagaggagtgagcagccccatcgccggccctgcccagcccccaccctggccccagcctgccccctggagccagcctgccttctatgacagcagcgagagaattgccagcagagatgagcgcatctctgtgcctgccaagaggacaggcatcctgcaggaggccaagagaagaagcaccaccaagcccatgttcaccttcaaggagcccaaggtgagccccaaccctgagctgctgagcctgctgcagaacagcgagggcaagaggggcactggagctggaggagacagcggccctgaggaggactacctgagcctgggcgctgaggcctgcaacttcatgcagagcagcagcgccaagcagaagaccccacctcctgtggcccccaagccagctgtgaagagcagcagcagccagcctgtgacccctgtgtcccctgtgtggagccctggggtggcccccacccagcccccagccttccccaccagcaaccccagcaaaggaacagtggtgagcagcatcaagatcgcccagcccagctaccccccagcccggcctgccagcaccctgaatgtggccggccccttcaagggcccccaggccgctgtggccagccagaactacacccccaagcccaccgtgtccacccccaccgtgaatgctgtgcagcccggggctgtgggccccagcaatgagctgcccggcatgagcggccgcggggcccagctgtttgccaagaggcagagcaggatggagaagtatgtggtggacagcgacacagtgcaggcccatgctgcccgggcccagagccccacccccagcctgcctgcctcctggaagtacagcagcaatgtgcgggcccctcctcctgtggcctacaaccccatccacagccccagctaccccctggccgccctgaagagccagcccagcgctgcccagcccagcaagatgggcaagaagaagggcaagaagcccctgaatgccctggatgtgatgaagcaccagccctaccagctgaatgccagcctcttcaccttccagcccccagatgccaaggatggcctgccccagaagagctctgtgaaggtgaacagcgccctggccatgaagcaggccctgccccccaggcctgtgaatgctgccagccccaccaacgtgcaggccagctctgtgtacagcgtgcctgcctacaccagccccccatccttctttgctgaggccagcagccctgtgtctgccagccctgtgcctgtgggcatccccaccagccccaagcaggagagcgccagcagcagctactttgtggccccccggcccaagttcagcgccaagaagtctggagtgaccatccaggtgtggaagcccagcgtggtggaggagtag

SEQ ID NO: 21152 - DNA, 600 bp, synthetic construct
  source 1..600: mol_type = other DNA; note = Synthetic coding sequence
atggccatcgtgcagaccctgcctgtgcccctggagcccgcccctgaggccgccacagccccccaggcccctgtgatgggctctgtgagcagcctcatcagcggccggccctgccctgggggccctgccccacccaggcaccacggccccccaggccccaccttcttccggcagcaggacggcctgctgcggggcggctatgaggcccaggagcccctgtgcccagctgtgccccccaggaaggctgtgcctgtgaccagcttcacctacatcaatgaagacttcagaacagagagcccccccagccccagcagtgatgtggaggatgcccgggagcagagggcccacaatgcccacctgcggggccccccacccaagctgatccctgtgtctgggaagctggagaagaacatggagaagatcctgatccggcccacagccttcaagcctgtgctgcccaagcccaggggggcccccagcctgcccagcttcatgggcccccgggccaccggcctgagcggcagccagggcagcctgacccagctgtttggaggccctgccagcagcagcagcagcagcagcagcagcagcgctgcctag

SEQ ID NO: 21153 - DNA, 612 bp, synthetic construct
  source 1..612: mol_type = other DNA; note = Synthetic coding sequence
atgcccagcaccccagccagcaccatcagcgcccgggaggagctggtgcagagaattcctgaggccagcctgaacttccagaaggtgcccccaggcagcctgaacagccgggactttgaccagaacatgaatgacagctgtgaagatgccctggccaacaagacccggcccaggaaccgggaggaggtgatctttgacaacctgatgctgaaccctgtgtcccagctgagccaggccatccgggagaacacagagcacctggccgagaagatgaagatcctcttccagaacacaggccgggcctgggaggacctggaggcccgcatcaatgcagaaaatgaggtgcccatcctgaagaccagcaacaaggagatcagcagcatcctgaaggagctgcggcgggtgcagaagcagctggaggtgatcaatgccatcgtggaccccagcggcagcctggacctgctgctgcccaccctgagcagctttgtgcccccacctccagcctttgcctgggagctggtgctggtgtgccgggccagcagaagagtgcactgcacctttgtgctgcgctggagctgtggctgcctgtctgaaaatggctacttcatctag

SEQ ID NO: 21154 - DNA, 321 bp, synthetic construct
  source 1..321: mol_type = other DNA; note = Synthetic coding sequence
tgacccaccaccagcaggcctgccctggatgtgaagggcggcaccagccctgccaaggaggatgccaaccaggagatgagctctgtggcctacagcaacctggccgtgaaggacaggaaggctgtggccatcctgcactacccaggagtggccagcaatggcaccaagagccctgccatcatcgacagcgaccctgtggatgaggaggtgctgatgagcctggtggtggagctgggcctggaccgggccaatgagctgcctgagctgtggctgggccagaatgaatttgacttcaccgctgacttccccagcagctgctag

SEQ ID NO: 21155 - DNA, 456 bp, synthetic construct
  source 1..456: mol_type = other DNA; note = Synthetic coding sequence
atggccgccttccgggacatcgaggaggtgtcccagggcctgctgagcctgctgggcgccaacagagctgaggcccagcagaggcggctgctgggcagacatgagcaggtggtggagcggctgctggagacccaggatggagctgagaagcagctgcgggagatcctgaccatggagaaggaggtggcccagagcctgctgaatgccaaggagcaggagcggcaggagaaggaggtggatgaggacaccaccgtgaccatccccagcgctgtgtatgtggcccagctgtaccaccaggtgtccaagattgagtgggactatgaatgtgagcccggcatggtgaagggcatccaccacggccccagcgtggcccagcccatccacctggacagcacccagctgagcaggaagttcatcagtgactacctgtggagcctggtggacacagagtggtag

SEQ ID NO: 21156 - DNA, 444 bp, synthetic construct
  source 1..444: mol_type = other DNA; note = Synthetic coding sequence
atgctgcgctgtggccagatgatctttgcccaggccctggtgtgccgccacctgggccgggactggcgctggacccagaggaagaggcagcctgacagctacttctctgtgctgaatgccttcatcgacaggaaggacagctactacagcatccaccagatcgcccagatgggcgtgggggagggcaagagcatcggccagtggtacggccccaacacagtggcccaggtgctgaagaagctggccgtgtttgacacctggagcagcctggccgtgcacatcgccatggacaacacagtggtgatggaggagatccggcggctgtgcaggacctctgtgccctgtgccggggccacagccttccctgctgacagcgacagacactgcaatggcttccctgctggagctgaggtgaccaaccggcccagcccctggaggccctag

SEQ ID NO: 21157 - DNA, 1482 bp, synthetic construct
  source 1..1482: mol_type = other DNA; note = Synthetic coding sequence
atggagaagtatgagaacctgggcctggtgggggagggcagctatggcatggtgatgaagtgcaggaacaaggacaccggcagaattgtggccatcaagaagttcctggagagtgatgatgacaagatggtgaagaagatcgccatgagggagatcaagctgctgaagcagctgcggcatgagaacctggtgaacctgctggaggtgtgcaagaagaagaagcgctggtacctggtgtttgaatttgtggaccacaccatcctggatgacctggagctgttccccaacggcctggactaccaggtggtgcagaagtacctgttccagatcatcaatggcatcggcttctgccacagccacaacatcatccaccgggacatcaagccagagaacatcctggtgtcccagagcggcgtggtgaagctgtgtgactttggatttgcccggaccctggccgcccctggagaggtgtacacagattatgtggccacccgctggtaccgggcccctgagctgctggtgggagatgtgaagtatggcaaggctgtggatgtgtgggccatcggctgcctggtgacagagatgttcatgggagagcccctcttccctggggacagcgacatcgaccagctgtaccacatcatgatgtgcctgggcaacctgatccccaggcaccaggagctgttcaacaagaaccctgtgtttgctggggtgcggctgcctgagatcaaggagcgggagcccctggagcggcgctaccccaagctgtctgaggtggtgattgacctggccaagaagtgcctgcacatcgaccctgacaagaggcccttctgtgccgagctgctgcaccacgacttcttccagatggatggctttgctgagcgcttcagccaggagctgcagctgaaggtgcagaaggatgccagaaatgtgtccctgagcaagaagagccagaacaggaagaaggagaaggagaaggatgacagcctggtggaggagaggaagaccctggtggtgcaggacaccaatgctgaccccaagatcaaggactacaagctgttcaagatcaagggcagcaagattgatggagagaaggccgagaagggcaacagagccagcaatgccagctgcctgcatgacagcaggaccagccacaacaagatcgtgcccagcaccagcctgaaggactgcagcaatgtgtctgtggaccacaccaggaaccccagcgtggccatcccccccctgacccacaacctgtctgctgtggcccccagcatcaacagcggcatgggcacagagaccatccccatccagggctacagagtggatgagaagaccaagaagtgcagcatcccctttgtgaagcccaacagacacagccccagcggcatctacaacatcaacgtgaccaccctggtgtctggcccccccctgagtgatgacagcggggctgacctgccccagatggagcaccagcactag

SEQ ID NO: 21158 - DNA, 6189 bp, synthetic construct
  source 1..6189: mol_type = other DNA; note = Synthetic coding sequence
atggatggctgcctggacacagagacccccaccgtgtccatccaggagaatgtggatgtggccagcctgaagcccatcagtgacagcggcatcaacttcacagatgccatctggagccccacctgtgagaggaggacctgtgagtgccacgagagcattgagaagaacaaggacaagacagacctgccccagagcgtggtgtaccagaatgaggagggccgctgggtgacagacctggcctactacaccagcttcaacagcaagcagaacctgaatgtgtccctgagtgatgagatgaatgaagacttccgcagcggcagcgaggcctttgacctgattgcccaggatgaggaggagttcaacaaggagcaccagttcatccagcccagctttggctacttcatccgcagccctgagaagcgggagcccatcgccctgatcaggaagagtgatgtgtcccggggcaacctggagaaggagatggcccacctgaaccacgacctgtacagcggggacctgaatgagcagagccaggcccagctgtctgagggcagcatcaccctgcaggtggaggccgtggagagcaccagccaggtggatgaaaatgatgtgaccctgacagctgacaagggcaagacagaggacaccttcttcatgagcaacaagccccagcgctacaaggacaagctgcctgattctggggacagcatgctgcgcatcagcaccatcgccagcgccatcgccgaggcctctgtgaacacagaccccagccagctggccgccatgatcaaggccctgagcaacaagacccgggacaagaccttccaggaggatgagaagcagaaggactacagccacgtgcgccacttcctgcccaatgacctggagaagagcaatggcagcaatgccctggacatggagaagtacctgaagaagacagaggtgagccgctatgagagcgccctggagaacttcagccgggcctccatgtctgacacctgggacctgagcctgcccaaggagcagaccacccaggacatccaccctgtggacctgagcgccacctctgtgtctgtgcgggcccctgaggagaacacagctgccatcgtgtatgtggagaatggagagagcgagaaccaggagagcttccgcaccatcaacagcagcaacagcgtgaccaaccgggagaacaacagcgctgtggtggatgtgaagacctgcagcattgacaacaagctgcaggatgtgggcaatgatgagaaggccaccagcatcagcacccccagcgacagctacagctctgtgaggaacccccgcatcaccagcctgtgcctgctgaaggactgtgaggagatccgggacaaccgggagaaccagaggcagaatgaatgtgtgtctgagatcagcaacagcgagaagcacgtgacctttgagaaccaccgcatcgtgagccccaagaacagcgacctgaagaacaccagccctgagcacggcggccggggctctgaagatgagcaggagagcttccggcccagcaccagccccctgagccacagcagccccagcgagatcagcggcaccagcagcagcggctgtgccctggagagctttggatctgctgcccagcagcagcagcccccctgtgagcaggagctgagccccctggtgtgcagccctgctggggtgtcccggctgacctacgtgtctgagcctgagagcagctaccccaccacagccacagatgatgccctggaggacaggaagagtgacatcaccagcgagctgagcaccaccatcatccagggcagccctgctgccctggaggagcgggccatggagaagctgcgggagaaggtgcccttccagaacagaggcaagggcaccctgagcagcatcatccagaacaacagcgacaccaggaaggccacagagaccaccagcctgagcagcaagccagaatatgtgaagccagacttccgctggagcaaggaccccagcagcaagagcggcaacctgctggagaccagcgaggtgggctggaccagcaaccctgaggagctggaccccatccggctggccctgctgggcaagagcggcctgagctgccaggtgggcagcgccaccagccaccctgtgtcctgccaggagcccattgatgaggaccagaggatcagccccaaggacaagagcacagctggccgggagttcagcggccaggtgagccaccagaccaccagcgagaaccagtgcacccccatccccagcagcacagtgcacagctctgtggccgacatgcagaacatgcctgctgctgtgcacgccctgctgacccagcccagcctgtctgctgccccctttgcccagcgctacctgggcaccctgcccagcacaggcagcaccaccctgccccagtgccacgccggaaatgccaccgtgtgtggcttcagcggcggcctgccctacccagctgtggccggggagcctgtgcagaacagcgtggccgtgggcatctgcctgggcagcaacatcggcagcggctggatgggcaccagcagcctgtgcaacccctacagcaacaccctgaaccagaacctgctgagcaccaccaagcccttccctgtgcccagcgtgggcaccaactgtggcatcgagccctgggacagcggcgtgaccagcggcctgggctctgtgcgggtgcctgaggagctgaagctgccccacgcctgctgcgtgggcatcgccagccagaccctgctgtctgtgctgaaccccacagaccgctggctgcaggtgtccattggagtgctgagcatctctgtgaatggagagaaggtggacctgagcacctaccgctgcctggtgttcaagaacaaggccatcatccggccccacgccacagaggagatcaaggtgctcttcatccccagcagccctggggtcttccgctgcaccttctctgtggcctcctggccctgcagcacagatgctgagaccatcgtgcaggccgaggccctggccagcacagtgaccctgacagccatcgccgagagccctgtgattgaggtggagacagagaagaaggatgtgctggactttggagacctgacctatggaggctggaaggccctgcccctgaagctgatcaacagaacccacgccaccgtgcccatccgcctcatcatcaatgccaatgctgtggcctggcgctgcttcaccttcagcaaggagagcgtgcgggcccctgtggaggtggccccctgtgctgatgtggtgacccggctggccggccccagcgtggtgaaccacatgatgcctgccagctatgatggccaggaccctgagttcctgatgatctgggtgctcttccacagccccaagaagcagatcagcagcagtgacatcctggacagcgctgaggagttcagcgccaaggtggacatcgaggtggacagccccaaccccacccctgtgctgcggtctgtgtccctgcgggcccgggccggcatcgcccgcatccacgccccccgggacctgcagaccatgcacttcctggccaaggtggccagcagcaggaagcagcacctgcccctgaagaatgccggcaacatcgaggtgtacctggacatcaaggtgcctgagcagggcagccacttctctgtggaccccaagaacctgctgctgaagccaggagaggagcatgaagtcatcgtgtccttcacccccaaggaccctgaggcctgtgaggagcgcatcctgaagatctttgtgcagcccttcggcccccagtatgaggtggtgctgaagggggaggtgatcagcagcggcagcaagcccctgagccctggcccctgcctggacatccccagcatcctgagcaacaagcagttcctggcctggggcggcgtgcccctgggccgcacccagctgcagaagctggccctgaggaacaacagcgccagcaccacccagcacctgcggctgctgatccggggccaggaccaggactgcttccagctgcagaacacctttggaagtgagcagaggctgaccagcaactgtgagatccgcatccaccccaaggaggacatcttcatctctgtgctgtttgcccccacccggctgagctgcatgctggcccggctggagatcaagcagctgggcaacagaagccagcccggcatcaagttcaccatccccctgagcggctatggaggcaccagcaacctgatcctggagggcgtgaagaagctgagtgacagctacatggtgacagtgaatggcctggtgcctgggaaggagagcaagatcgtgttttctgtgaggaacacaggcagcagagctgcctttgtgaaggctgtgggcttcaaggacagccagaagaaggtgctgctggaccccaaggtgctgcgcatcttcccagacaagtttgtgctgaaggagaggacccaggagaatgtgaccctcatctacaaccccagcgaccggggcatcaacaacaagacagccacagagctgagcacagtgtacctgtttggaggagatgagatcagccggcagcagtaccgccgggccctgctgcacaagccagagatgatcaagcagatcctgcctgagcacagcgtgctgcagaacatcaactttgtggaggccttccaggatgagctgctggtgacagaggtgtatgacctgccccagaggcccaatgatgtgcagctgttctacggctccatgtgcaagatcatcctgtctgtgattggagagttccgggactgcatcagcagccgggagttcctgcagcccagcagcaaggccagcctggagagcaccagtgacctgggcgccagcggcaagcacggcggcaatgtgtccctggatgtgctgcctgtgaagggcccccagggcagccccctgctgagcagagctgcccggccccccctggaccagctggccagcgaggagccctggacagtgctgcctgagcacctgatcctggtggcccccagcccctgtgacatggccaagacaggccgcttccagatcgtgaacaacagcgtgcggctgctgcgctttgagctgtgctggccagcccactgcctgactgtgaccccccagcacggctgtgtggcccctgagagcaagctgcagatcctggtgagccccaacagcagcctgagcaccaagcagagcatgttcccctggagcggcctcatctacatccactgtgatgatggccagaagaagatcgtgaaggtgcagatccgggaggacctgacccaggtggagctgctgacccggctgaccagcaagcccttcggcatcctgagccctgtgtctgagcccagcgtgagccacctggtgaagcccatgaccaagccacccagcaccaaggtggagatccggaacaagagcatcaccttccccaccacagagcctggagagaccagcgagagctgcctggagctggagaaccacggcaccacagatgtgaagtggcacctgagcagcctggccccaccctacgtgaagggcgtggatgaaagtggagatgtgttccgggccacctacgccgccttccgctgcagccccatcagcggcctgctggagagccacggcatccagaaggtgtccatcaccttcctgccccggggccgcggggactatgcccagttctgggatgtggagtgccaccccctgaaggagccccacatgaagcacaccctgcgcttccagctgagcggccagagcattgaagcagaaaatgaaccagaaaatgcctgcctgagcacagacagcctcatcaagattgaccacctggtgaagccccggcggcaggccgtgtctgaggccagcgcccgcatccctgagcagctggatgtgacagcccggggcgtgtatgccccagaagatgtgtaccgcttccggcccacctctgtgggggagagcaggaccctgaaggtgaacctgaggaacaacagcttcatcacccacagcctgaagttcctgagcccccgggagcccttctacgtgaagcacagcaagtacagcctgcgggcccagcactacatcaacatgcctgtgcagttcaagcccaagtctgctgggaagtttgaggccctgctggtgatccagacagatgagggcaagagcatcgccatccggctgattggagaggccctgggcaagaactag

SEQ ID NO: 21159 - DNA, 1545 bp, synthetic construct
  source 1..1545: mol_type = other DNA; note = Synthetic coding sequence
atgagcatcagcagtgatgaggtgaacttcctggtgtaccgctacctgcaggagagcggcttcagccacagcgccttcaccttcggcatcgagagccacatcagccagagcaacatcaacggggccctggtgcccccagctgccctgatcagcatcatccagaagggcctgcagtatgtggaggccgaggtgtccatcaatgaagatggcaccctgtttgatggccggcccatcgagagcctgagcctgattgatgctgtgatgccagatgtggtgcagacccggcagcaggcctacagagacaagctggcccagcagcaggccgctgctgctgctgctgctgctgctgctgccagccagcagggcagcgccaagaatggagagaacacagccaacggggaggagaatggagcccacaccatcgccaacaaccacacagacatgatggaggtggatggagatgtggagatcccccccaacaaggctgtggtgctgcggggccacgagagcgaggtgttcatctgtgcctggaaccctgtgtctgacctgctggccagcggcagcggggacagcacagcccgcatctggaacctgtctgagaacagcaccagcggcagcacccagctggtgctgcggcactgcatccgggagggcggccaggatgtgcccagcaacaaggatgtgaccagcctggactggaacagcgagggcaccctgctggccaccggcagctatgatggctttgcccgcatctggaccaaggatggcaacctggccagcaccctgggccagcacaagggccccatctttgccctgaagtggaacaagaagggcaacttcatcctgtctgctggggtggacaagaccaccatcatctgggatgcccacactggagaggccaagcagcagttccccttccacagcgccccagccctggatgtggactggcagagcaacaacacctttgccagctgcagcacagacatgtgcatccacgtgtgcaagctgggccaggaccggcccatcaagaccttccagggccacaccaatgaggtgaatgccatcaagtgggaccccaccggcaacctgctggccagctgcagtgatgacatgaccctgaagatctggagcatgaagcaggacaactgtgtgcatgacctgcaggcccacaacaaggagatctacaccatcaagtggagccccaccggccctggcaccaacaaccccaatgccaacctgatgctggccagcgccagctttgacagcacagtgcggctgtgggatgtggaccggggcatctgcatccacaccctgaccaagcaccaggagcctgtgtacagcgtggccttctccccagatggccgctacctggccagcggcagctttgacaagtgtgtgcacatctggaacacccagacaggagccctggtgcacagctaccggggcactggaggcatctttgaggtgtgctggaatgctgctggggacaaggtgggcgccagcgccagtgatggctctgtgtgtgtgctggacctgaggaagtag

SEQ ID NO: 21160 - DNA, 2034 bp, synthetic construct
  source 1..2034: mol_type = other DNA; note = Synthetic coding sequence
atggaggagaccatgaagctggccaccatggaggacacagtggagtactgcctcttcctgatcccagatgagagccgggacagcgacaagcacaaggagatcctgcagaagtacatcgagcgcatcatcaccaggtttgcccccatgctggtgccctacatctggcagaaccagcccttcaacctgaagtacaagccaggcaagggcggcgtgcctgcccacatgtttggagtgaccaagtttggagacaacattgaagatgagtggttcatcgtgtatgtgatcaagcagatcaccaaggagttccctgagctggtggccagaattgaggacaatgatggagagttcctgctgattgaagctgctgacttcctgcccaagtggctggaccctgagaacagcaccaacagagtcttcttctgccacggggagctgtgcatcatcccagcccccaggaagagcggggctgagagctggctgcccaccaccccacccaccatcccccaggccctgaacatcatcacagcccacagcgagaagatcctggccagcgagagcatccgggctgctgtgaacagacgcatccggggctacccagagaagatccaggccagcctgcaccgggcccactgcttcctgcctgctggcatcgtggccgtgctgaagcagaggccccggctggtggccgctgctgtgcaggccttctacctgcgggaccccatcgacctgcgggcctgcagggtcttcaagaccttcctgcctgagacccgcatcatgacctctgtgaccttcaccaagtgcctgtatgcccagctggtgcagcagagatttgtgcctgacagaagaagtggctaccgcctgcccccacccagcgacccccagtaccgggcccacgagctgggcatgaagctggcccacggctttgagatcctgtgcagcaagtgcagcccccacttcagtgactgcaagaagagcctggtgacagccagccccctgtgggccagcttcctggagagcctgaagaagaatgactacttcaagggcctcatcgagggcagcgcccagtaccgggagcggctggagatggccgagaactacttccagctgtctgtggactggccagagcggctggaggtgcagtggagggaccccggcctgctgcaggcccctcctcctggcttcacccccttcatctgcctgagcctgctgagcacctgggacaacagcagcctggccatgagccctggagaggagatcctgaccctgctgcagaccatcccctttgatattgaggacctgaagaaggaggccgccaacctgcccccagaagatgatgaccagtggctggacctgagcccagaccagctggaccagctgctgcaggaggccgtgggcaagaaggagagcgagagcgtgtccaaggaggagaaggagcagaactatgacctgacagaggtgtctgagagcatgaaggccttcatcagcaaggtgtccacccacaagggagctgagctgccccgggagcccagcgaggcccccatcacctttgatgctgacagcttcctgaactactttgacaagatcctgggcccccggcccaatgaaagtgacagtgatgacctggatgatgaggactttgaatgtctggacagtgatgatgacctggactttgagacccatgagcccggggaggaggccagcctgaagggcaccctggacaacctgaagagctacatggcccagatggaccaggagctggcccacacctgcatcagcaagagcttcaccaccaggaaccaggtggagcctgtgtcccagaccacagacaacaacagtgatgaagaagattctggaactggagagagcgtgatggcccctgtggatgtggacctgaacctggtgagcaacatcctggagagctacagcagccaggccggcctggccggccctgccagcaacctgctgcagagcatgggcgtgcagctgcctgacaacacagaccaccggcccaccagcaagcccaccaagaactag

SEQ ID NO: 21161 - DNA, 1821 bp, synthetic construct
  source 1..1821: mol_type = other DNA; note = Synthetic coding sequence
atggaggagagccccctgagccgggcccccagcagaggaggagtgaacttcctgaatgtggcccggacctacatccccaacaccaaggtggagtgccactacaccctgcccccaggcaccatgcccagcgccagtgactggattggcatcttcaaggtggaggccgcctgtgtgcgggactaccacacctttgtgtggagctctgtgcctgagagcaccacagatggcagccccatccacacctctgtgcagttccaggagccccggcccatggatgagctggtgaccctggaggaggctgatggcggcagtgacatcctgctggtggtgcccaaggccaccgtgctgcagaaccagctggatgagagccagcaggagagaaatgacctgatgcagctgaagctgcagctggagggccaggtgacagagctgcggagccgggtgcaggagctggagcgggccctggccacagcccggcaggagcacacagagctgatggagcagtacaagggcatcagccgcagccacggggagatcacagaggagcgggacatcctgagccggcagcagggcgaccacgtggcccgcatcctggagctggaggatgacatccagaccatcagcgagaaggtgctgaccaaggaggtggagctggaccggctgcgggacacagtgaaggccctgacccgggagcaggagaagctgctgggccagctgaaggaggtgcaggccgacaaggagcagagcgaggccgagctggagcccctgaaggagcagctgcggggggcccaggagctggccgccagcagccagcagaaggccaccctgctgggggaggagctggccagcgctgctgctgcccgggacaggaccatcgccgagctgcacaggagccggctggaggtggccgaggtgaatggccgcctggccgagctgggcctgcacctgaaggaggagaagtgccagtggagcaaggagcgggccggcctgctgcagagcgtggaggccgagaaggacaagatcctgaagctgtctgctgagatcctgcggctggagaaggctgtgcaggaggagaggacccagaaccaggtgttcaagacagagctggcccgggagaaggacagcagcctggtgcagctgtctgagagcaagcgggagctgacagagctgcggagcgccctgcgggtgctgcagaaggagaaggagcagctgcaggaggagaagcaggagctgctggagtacatgaggaagctggaggcccggctggagaaggtggctgatgagaagtggaatgaagatgccaccacagaagatgaggaggccgctgtgggcctgagctgcccagctgccctgacagacagtgaagatgagagccctgaggacatgaggctgcccccctacggcctgtgtgagcggggggaccccggcagcagccctgctggcccccgggaggccagccccctggtggtgatcagccagcctgcccccatcagcccccacctgagcggccctgctgaggacagcagcagtgacagcgaggctgaagatgagaagtctgtgctgatggctgctgtgcagagcggcggggaggaggccaacctgctgctgcctgagctgggcagcgccttctatgacatggccagcggcttcaccgtgggcaccctgtctgagaccagcactggaggccctgccacccccacctggaaggagtgccccatctgcaaggagcgcttccctgctgagagtgacaaggatgccctggaggaccacatggatggccacttcttcttcagcacccaggaccccttcacctttgaatag

SEQ ID NO: 21162 - DNA, 2997 bp, synthetic construct
  source 1..2997: mol_type = other DNA; note = Synthetic coding sequence
atgaacagaagaaggaagttcctgctggcctctgtgctggccctgcagaacagcagcttcatctaccccagctgccagaagtgcttcagccgcatcatcctggtgtccaagaggagcaactgccccaagtgtggcagcactggagagagcggaaatgccaactaccgctacaagctgagcctgaaggtggccgagagcaacaagctgtttgtgatcaccgtgtttggcagctgcctggacaccttcttcggcctgacagccaccggcctgcaccgctacatccaggaccccaacaagatccctgagaccctggacaatgacaccacccagaacctgctgaccaaggctgtggagacctgctttgtgggccagagcttcatcttcggcgtgaccaactttgagaaccagcccggccagggcagtgatgccagcaacttcctgcagcagtgcagcgaccacaagaggaaggccaaggccctggtggcctgccagatcgtgctgcctgaccccggcattgctggcttcaccgtcatcgactacttccaccagctgctgcagaccttcaacttcaggaagctgcagtgtgacagccaggcccccaacaaccacctgctggccctggaccacagcaacagcgacctgagcagcatctacaccagtgacagcaccagtgacttcttcaagagctgcagcaaggacaccttcagcaagttctggcagcccagcctggagttcacctgcatcgtgtcccagctgacagacaatgatgacttcagcgccagcgagcagagcaaggccttcggcaccctgcagcagaacaggaagagcatcagcattgctgaggccaccggcagcagcagctgccacgaccccatccaggacagctggagcctggtgtcctacatggacaagaagagcacagctgagaagctgggcaaggagctgggcctgcaggccaaggagctgtctgctgtgcacagcagccaccacgagattggagtgaatgacagcaacctcttcagcctggagatgagggagcccctggagagcagcaacaccaagagcttccacagcgctgtggagatcaagaacagaagccagcacgagctgccctgcttccagcaccacggcatcgacacccccaccagcctgcagaagaggtctgcctgctgcccccccagcctgctgcggctggaggagacagccagcagcagccaggatggagacccccagatctgggatgacctgcccttcagcgagagcctgaacaagttcctggccgtgctggagagcgagattgctgtgacccaggctgatgtgagcagcaggaagcaccacgtggacaatgacatcgacaagttccacgccgaccacagccggctgtctgtgaccccccagaggaccactggagccctgcacaccccacccatcgccctgcggagcagccaggtgattgtgaaggccaactgcagcaaggatgacttcctgttcaactgcaagggcaacctgagccccagcgtggagaaggagagccagcctgacaacaaggtggaggccgtgtctgtgaaccacaacggccgggacatgtctgagtacttcctgcccaacccctacctgagcgccctgagcagcagcagcaaggacctggagaccatcgtgaccctgaagaagaccatccgcatcagcccccaccgggagagtgaccacagcagcctgaacaacaagtacctgaatggctgtggggagatctctgtgtctgagatgaatgagaagctgaccaccctgtgctacaggaagtacaatgatgtgtctgacctgtgcaagctggagaacaagcagtactgccgctggagcaagaaccaggatgacagcttcaccatctgcaggaagctgacctaccccctggagaccctgtgcaacagccccaacagaagcaccaacaccctgaaggagatgccctggggccacatcaacaacaacgtgacccagagctacagcatcggctatgagggcagctatgatgccagcgctgacctgtttgatgacatcgccaaggagatggacatcgccacagagatcaccaagaagagccaggacatcctgctgaagtggggcaccagcctggccgagagccaccccagcgagagtgacttcagcctgcggagcctgtctgaggacttcatccagcccagccagaagctgagcctgcagagcctgagtgacagccgccacagcaggacctgcagccccaccccccacttccagagcgacagcgagtacaactttgagaacagccaggactttgtgccctgcagccagagcacccccatcagcggcttccaccagacccgcatccacggcatcaacagagccttcaagaagcctgtgttctacagcgacctggatggcaactatgagaagatccgcatcttcccagaaaatgacaagcagcaggccagccccagctgccccaagaacatcaagacccccagccagaagatccgcagccccatcgtgtctggagtgtcccagccagatgtgttcaaccactacccctttgctgaatgtcatgaaacagacagtgatgagtgggtgccccccaccacccagaagatcttccccagcgacatgctgggcttccagggcatcggcctgggcaagtgcctggccgcctaccacttcccagaccagcaggagctgcccaggaagaagctgaagcacatccggcagggcaccaacaagggcctcatcaagaagaagctgaagaacatgctggccgctgtggtgaccaagaagaagacccacaagtacaactgcaagagcagcggctggatcagcaaatgtcctgacatccaggtgctggccgccccccagctgcaccccatcctgggccctgacagctgcagcgaggtgaagtgctgcctgcccttcagcgagaagggcccccccagcgtgtgtgagaccaggtctgcctggagccctgagctgttctcctag

SEQ ID NO: 21163 - DNA, 471 bp, synthetic construct
  source 1..471: mol_type = other DNA; note = Synthetic coding sequence
atggctgacagccctgggggctacaaggaatgtggcaccaatgaaggcccccaggaggatgaaaatggcagcagcgccagcggcagcagcaaggtgcggcagctgtggagcgaggacagctgtgagagcggcaagctgcctgccaccaggacagtgtactgcatgaatgaggccgagatcgtggatgtggccctgggcatcctgattgagagcaggaagcaggagaaggcctgtgagcagcctgccctggccggggctgacaaccctgagcacagccccccctgcagcgtgagcccccacaccagcagcggcagcagcagcgaggaggaggacagcggcaagcaggccctggcccctggcctgagccccagccagaggcctgggggcagcagcagcgcctgcagccgcagccctgaggaggaggaggaggaggatgtgctgaagtatgtgcgggagatcttcttctcctag

SEQ ID NO: 21164 - DNA, 1377 bp, synthetic construct
  source 1..1377: mol_type = other DNA; note = Synthetic coding sequence
atggccgagctgcagatgctgctggaggaggagatccctgggggccggcgggccctgtttgacagctacaccaacctggagcgggtggccgactactgtgagaacaactacatccagagcgctgacaagcagagggccctggaggagaccaaggcctacaccacccagagcctggcctctgtggcctacctgatcaacaccctggccaacaacgtgctgcagatgctggacatccaggccagccagctgcggaggatggagagcagcatcaaccacatcagccagacagtggacatccacaaggagaaggtggcccggcgggagatcggcatcctgaccaccaacaagaacaccagcaggacccacaagatcatcgccccagccaacctggagaggcctgtgcgctacatcaggaagcccatcgactacaccatcctggatgacattggacatggagtgaaggtgtccacccagaacatgaagatgggcggcctgcccaggaccaccccacccacccagaagccacccagcccccccatgtctgggaagggcaccctgggcagcagcggcagcagcggcggcagccaccccagcagccgcagcagcagcagagaaaattctggcagcggctctgtgggcgtgcccatcgctgtgcccacccccagccccccatctgtgtttcctgccccagctggcagcgctggcaccccacccctgcctgccaccagcgccagcgccccagcccccctggtgcctgccaccgtgcccagcagcacagccccagatgctgctgctggaggagcccagaccctggctgatggcttcaccagccccaccccacctgtggtgagcagcaccccacccaccggccaccctgtgcagttctacagcatgaacagacctgccagccgccacaccccacccaccatcggcggcagcctgccctacagaagacctccttccatcaccagccagaccagcctgcagaaccagatgaatggaggccccttctacagccagaaccctgtgtctgacaccccacctcctcctcctcctgtggaggagcctgtgtttgatgagagccccccacctcctcctcctccagaagattatgaggaggaggaggccgctgtggtggagtacagcgacccctatgcagaggaggaccccccctgggcccccaggagctacctggagaaggtggtggccatctatgactacaccaaggacaaggaggatgagctgtccttccaggagggcgccatcatctacgtgatcaagaagaatgatgatggctggtatgagggcgtgatgaatggagtgacaggcctcttccctggcaactacgtggagagcatcatgcactacagcgagtag

SEQ ID NO: 21165 - DNA, 5223 bp, synthetic construct
  source 1..5223: mol_type = other DNA; note = Synthetic coding sequence
tgaaaaatctacccagaggagatcacccccctgctgcctgccatcagcggggagaagattgctgaggaccagacctgcttcttcctgcagatcctgctgaagtacatggtgatccaggccgccagcctggagtggaagaacaaggagaaccaggacaccggcttcaagttcctgttcaccctcttcaggaagtactacctgccccacctgttccccagcttcaccaagctgaccaacatctacaagcctgtgctggacatcccccacctgcggcccaagcctgtgtacatcaccaccacccgggacaatgaaaacatctacagcaccaagatcccctacatggccgcccgggtggtgttcatcaagtggatcgtgaccttcttcctggagaagaagtacctgacagccacccagaacaccaagaatggagtggatgtgctgcccaagatcatccagacagtgggcggcggcgctgtgcaggagcgggcccctgagctggatggcggcggccccacagagcaggacaagagccacagcaacagcagcaccctgagtgaccggcggctgagcaacagcagcctgtgcagcattgaggaggagcacaggatggtgtatgagatggtgcagaggatcctgctgagcacccggggctacgtgaactttgtgaatgaggtgttccaccaggccttcctgctgcccagctgtgaaattgctgtgaccaggaaggtggtgcaggtgtacaggaagtggatcctgcaggacaagcctgtgttcatggaggagccagacaggaaggatgtggcccaggaggatgctgagaagctgggcttcagcgagacagacagcaaggaggccagcagcgagagcagcggccacaagaggagcagctcctggggccgcacctacagcttcaccagcgccatgagccggggctgtgtgacagaggaggagaacaccaacgtgaaggccggcgtgcaggccctgctgcaggtgttcctgaccaacagcgccaacatcttcctgctggagccctgtgccgaggtgcctgtgctgctgaaggagcaggtggatgcctgcaaggctgtgctgatcatcttccggaggatgatcatggagctgaccatgaacaagaagacctgggagcagatgctgcagatcctgctgcgcatcacagaagctgtgatgcagaagcccaaggacaagcagatcaaggacctgtttgcccagagcctggccggcctgctcttccgcaccctgatggtggcctggatccgggccaacctgtgtgtgtacatcagccgggagctgtgggatgacttcctgggcgtgctgagcagcctgacagagtgggaggagctgatcaatgagtgggccaacatcatggacagcctgacagctgtgctggccaggacagtgtatggagtggagatgaccaacctgcccctggacaagctgtctgagcagaaggagaagaagcagaggggcaagggctgtgtgctggacccccagaagggcaccaccgtgggccgctccttcagcctgtcctggaggagccacccagatgtgacagagcccatgaggttccgcagcgccaccaccagcggggcccctggggtggagaaggccagaaatattgtgcggcagaaggccacagaggtggaggagtgccagcagagtgaaaatgccccagctgctggcagcggccacctgactgtgggccagcagcagcaggtgctgcggagcagcagcaccagtgacatccctgagcccctgtgcagcgacagcagccagggccagaaggccgagaacacccagaacagcagcagcagcgagccccagcccatccaggagaacaagggccacgtgaagcgggagcacgagggcatcaccatcctggtgcggcgcagcagcagccctgctgagctggacctgaaggatgacctgcagcagacccagggcaagtgccgggagcggcagaagtctgagagcaccaacagcgacaccaccctgggctgcaccaatgaggccgagctgtccatgggcccctggcagacctgtgaggaggaccctgagctgaacacccccacagatgtggtggctgatgctgatgcccggcactggctgcagctgagccccacagatgccagcaacctgacagacagcagtgaatgtctgacagatgactgcagcatcatcgccggcggcagcctgaccggctggcacccagacagcgctgctgtgctgtggaggagagtgctgggcatcctgggagatgtgaacaacatccagagccccaagatccacgcccgggtcttctgctacctgtatgagctgtggtacaagctggccaagatccgggacaacctggccatcagcctggacaaccagagcagccccagcccccctgtgctgatcccccccctgaggatgtttgcctcctggctgttcaaggccgccaccctgcccaatgagtacaaggagggcaagctgcaggcctaccgcctcatctgtgccatgatgacccggcggcaggatgtgctgcccaacagcgacttcctggtgcacttctacctggtgatgcacctgggcctgaccagcgaggaccaggacatcctgaacaccatcatccgccactgccccccacgcttcttcagcctgggcttccctggcttctccatgctggtgggggacttcatcacagctgctgcccgggtgctgagcacagacatcctgacagcccccaggtctgaggccgtgacagtgctgggcagcctggtgtgcttccccaacacctaccaggagatccccctgctgcagagcgtgcctgaggtgaatgaggccatcactggaacagaagatgtgaagcactacctgatcaacatcctgctgaagaatgccacagaggagcccaatgaatatgcccgctgcatcgctgtgtgcagcctgggcgtgtggatctgtgaggagctggcccagtgcaccagccacccccaggtgaaggaggccatcaacgtcatcggcgtgaccctgaagttccccaacaagatcgtggcccaggtggcctgtgatgtgctgcagctgctggtgtcctactgggagaagctgcagatgtttgagaccagcctgcccaggaagatggccgagatcctggtggccaccgtggccttcctgctgcccagcgctgagtacagctctgtggagacagacaagaagttcatcgtgtccctgctgctgtgcctgctggactggtgcatggccctgcctgtgtctgtgctgctgcaccctgtgtccacagctgtgctggaggagcagcacagcgcccgggcccccctgctggactacatctacagagtgctgcactgctgcgtgtgtggcagcagcacctacacccagcagagccactacatcctgaccctggccgacctgagcagcacagattatgaccccttcctgcccctggccaacgtgaagagcagcgagcctgtgcagtaccacagcagcgctgagctgggcaacctgctgactgtggaggaggagaagaagaggaggagcctggagctgatccccctgacagccaggatggtgatggcccacctggtgaaccacctgggccactaccccctgagcggcggccctgccatcctgcacagcctggtgtctgaaaatcatgacaatgcccacgtggagggcagcgagctgagctttgaggtgttccgcagccccaacctgcagctgtttgtgttcaatgacagcaccctcatctcctacctgcagacccccacagagggccctgtgggcggcagccctgtgggcagcctgagtgatgtgcgggtgattgtgcgggacatcagcggcaagtacagctgggatggcaaggtgctgtatggccccctggagggctgcctggccccaaatggaagaaaccccagcttcctgatcagctcctggcaccgggacaccttcggcccccagaaggacagcagccaggtggaggagggagatgatgtgctggacaagctgctggagaacatcggccacaccagccctgagtgcctgctgcccagccagctgaacctgaatgagcccagcctgaccccctgtggcatgaactatgaccaggagaaggagatcatcgaggtgatcctgcggcagaatgcccaggaggatgagtacatccagagccacaactttgattctgccatgaaggtgaccagccagggccagcccagccctgtggagccccggggccccttctacttctgccgcctgctgctggatgacctgggcatgaacagctgggacaggaggaagaacttccacctgctgaagaagaacagcaagctgctgcgggagctgaagaacctggacagccggcagtgccgggagacccacaagattgctgtgttctacatcgccgagggccaggaggacaagtgcagcatcctgagcaatgaaagaggcagccaggcctatgaggactttgtggccggcctgggctgggaggtggacctgagcacccactgcggcttcatgggcggcctgcagagaaatggcagcacaggccagacagccccctactatgccaccagcacagtggaggtgatcttccacgtgtccaccaggatgcccagcgacagtgatgacagcctgaccaagaagctgcggcacctgggcaatgatgaggtgcacatcgtgtggagcgagcacagccgggactaccgccggggcatcatccccacagcctttggagatgtgtccatcatcatctaccccatgaagaaccacatgttcttcatcgccatcaccaagaagccagaggtgcccttcttcggccccctgtttgatggagccatcgtgtctgggaagctgctgcccagcctggtgtgtgccacctgcatcaatgccagcagagctgtgaagtgcctgatccccctgtaccagagcttctatgaggagcgggccctgtacctggaggccatcatccagaaccaccgggaggtgatgacctttgaagattttgctgcccaggtgttcagccccagccccagctacagcctgtctggaactggagccctggccagcagcctgtctgctgacctggaggagcccctgtctgaggaggagacagagcaccccctgctgcccctgccccgggccaccaagccccgcatcagcaggaagttccgctgctgcaccagcgccctgagccgcagcagccactag

SEQ ID NO: 21166 - DNA, 1836 bp, synthetic construct
  source 1..1836: mol_type = other DNA; note = Synthetic coding sequence
atgccccacctggacatgaagacccacgtgtgccccagcgtggagggccccaagaagaagggcggcatcacctgcttctgctgcggcggccccttccgggctgctgacaggagcaagaccaggagccccaagctgagccacagcccccagccccccagcctgggggaccctgtggagcacctgtctgagaccagcgctgacagcctggaggccatgtctgaaggagatgcccccacccccttcagccggggcagcaggacccgggccagcctgcctgtggtgcgcagcaccaaccagaccaaggagaggagcctgggcgtgctgtacctgcagtatggagatgagaccaagcagctgaggatgcccaatgagatcaccagcgctgacaccatccgggccctgtttgtgtctgccttcccccagcagctgaccatgaagatgctggagagccccagcgtggccatctacatcaaggatgagagcagaaatgtgtactatgagctgaatgatgtgaggaacatccaggacaggagcctgctgaaggtgtacaacaaggaccctgcccacgccttcaaccacacccccaagaccatgaatggagacatgaggatgcagcgggagctggtgtatgcccggggagatggccctggggcccccaggcctggcagcacagcccacccccctcatgccatccccaacagcccccccagcacccctgtgccccacagcatgccacccagccccagccgcatcccctatggaggcaccaggtccatggtggtgcctggaaatgccaccatcccccgggaccgcatcagcagcctgcctgtgtcccggcccatcagccccagccccagcgccatcctggagaggagagatgtgaagccagatgaggacatgtctgggaagaacatcgccatgtacagaaatgaaggcttctatgctgacccctacctgtaccacgagggccgcatgagcatcgccagcagccatggaggccaccccctggatgtgcctgaccacatcatcgcctaccacaggacagccatccgcagcgccagcgcctactgcaaccccagcatgcaggccgagatgcacatggagcagagcctgtaccggcagaagagcaggaagtacccagacagccacctgcccaccctgggcagcaagaccccaccagccagcccccaccgggtgtctgacctgaggatgattgacatgcacgcccactacaatgcccacggccccccccacaccatgcagcctgaccgggccagccccagccggcaggccttcaagaaggagcccggcaccctggtgtacatcgagaagcccaggtctgctgctggcctgagcagcctggtggacctgggcccccccctgatggagaagcaggtgtttgcctacagcacagccaccatccccaaggaccgggagaccagcgagaagatgatgaagaccacagccaacagaaaccacacagacagcgctggcacccctcatgtgtctgggggcaagatgctgagcgccctggagagcacagtgccccccagccagcccccacctgtgggcaccagcgccatccacatgagcctgctggagatgagaagatctgtggccgagctgcggctgcagctgcagcagatgaggcagctgcagctgcagaaccaggagctgctgcgggccatgatgaagaaggccgagctggagatcagcggcaaggtgatggagaccatgaagaggctggaggaccctgtgcagaggcagagggtgctggtggagcaggagcggcagaagtacctgcacgaggaggagaagatcgtgaagaagctgtag

SEQ ID NO: 21167 - DNA, 189 bp, synthetic construct
  source 1..189: mol_type = other DNA; note = Synthetic coding sequence
tgagaaaaccccctggtgtactgtgatggccacggctgcagcgtggccgtgcaccaggcctgctacggcatcgtgcaggtgcccaccggcccctggttctgcaggaaatgtgagagccaggagagagctgcccgggtggtgggccccatgtggtttgtgccctgcatcttccagcgctacaacctgtag

SEQ ID NO: 21168 - DNA, 1869 bp, synthetic construct; identical to SEQ ID NO: 19023
  source 1..1869: mol_type = other DNA; note = Synthetic coding sequence

SEQ ID NO: 21169 - DNA, 546 bp, synthetic construct
  source 1..546: mol_type = other DNA; note = Synthetic coding sequence
atgggcggccgcagcgcccaggccggcctgggcacccgcatcacccccatgatggagctgaagcccaatgccggcagtgaccgggcctgggtgtggaacacccacgccgactttgctgatgaatgtcccaagccagagctgctggccatccgcttcctgaatgcagaaaatgcccagaagttcaagaccaagtttgaagaatgtaggaaggagattgaggagcgggagaagaagggagatgtggtgccctgggtgggcggcctgctgtgccgcctgaccctgcacctgaccatcctgcccggcggctgcttcttctgcctgcctgacaagcacagccgggtgctgtggccccctcatgtgtcccgggtgatgcagctgcccggggacaccggggcctcctggggcgccctgagcacctgccagtgctgctggccccagagcaactgggccggcatcggcgtgcgggccctgcccggggcccaccagaaggtgctgtatgatggccccaggtttgtgtcccagagggcctggagccccctgccctag

SEQ ID NO: 21170 - DNA, 378 bp, synthetic construct
  source 1..378: mol_type = other DNA; note = Synthetic coding sequence
atgagcagcagcggctacccacccaaccagggcgccttcagcacagagcagagccgctacccaccccacagcgtgcagtacaccttccccaacaccaggcaccagcaggagtttgctgtgcctgactaccgcagcagccacctggaggtgtcccaggccagccagctgctgcagcagcagcagcagcagcagctgcggcggcggcccagcctgctgtctgagttccaccctggcagtgaccggccccaggagaggaggaccagctatgagcccttccaccctggccccagccctgtggaccatgacagcctggagagcaagaggccccggctggagcaggtgtctgacagccacttccagagggtgtctgctgcctag

SEQ ID NO: 21171 - DNA, 318 bp, synthetic construct
  source 1..318: mol_type = other DNA; note = Synthetic coding sequence
atgctgcgctgtggccagatgatctttgcccaggccctggtgtgccgccacctgggccgggactggcgctggacccagaggaagaggcagcctgacagctacttctctgtgctgaatgccttcatcgacaggaaggacagctactacagcatccaccagatcgcccagatgggcgtgggggagggcaagagcatcggccagtggtacggccccaacacagtggcccaggtgctgaagaagctggccgtgtttgacacctggagcagcctggccgtgcacatcgccatggacaacacagtggtgatggaggagatctag

SEQ ID NO: 21172 - DNA, 1305 bp, synthetic construct
  source 1..1305: mol_type = other DNA; note = Synthetic coding sequence
atggacatcgacaaggacctggaggcccccctgtacctgaccccagagggctggagcctcttcctgcagcgctactaccaggtggtgcatgagggcgctgagctgcggcacctggacacccaggtgcagagatgtgaggacatcctgcagcagctgcaggccgtggtgccccagattgacatggagggggacaggaacatctggatcgtgaagccaggggccaagagccggggccggggcatcatgtgcatggaccacctggaggagatgctgaagctggtgaatggaaatcctgtggtgatgaaggatggcaagtgggtggtgcagaagtacatcgagcggcccctgctgatcttcggcaccaagtttgacctgcggcagtggttcctggtgacagactggaaccccctgactgtgtggttctacagagacagctacatccgcttcagcacccagcccttcagcctgaagaacctggacaacagcgtgcacctgtgcaacaacagcatccagaagcacctggagaacagctgccaccgccaccccctgctgcccccagacaacatgtggagcagccagcgcttccaggcccacctgcaggagatgggcgccccaaatgcctggagcaccatcatcgtgcccggcatgaaggatgctgtgatccacgccctgcagaccagccaggacacagtgcagtgcaggaaggccagctttgagctgtatggagctgactttgtgtttggagaggacttccagccctggctgattgagatcaatgccagccccaccatggcccccagcacagctgtgacagcccggctgtgtgccggcgtgcaggccgacaccctgcgggtggtgattgacaggatgctggacaggaactgtgacacaggagcctttgagctgatctacaagcagcctgctgtggaggtgccccagtatgtgggcatccggctgctggtggagggcttcaccatcaagaagcccatggccatgtgccacaggaggatgggcgtgcggcctgctgtgcccctgctgacccagaggggcagcggggaggcccggcaccacttccccagcctgcacaccaaggcccagctgcccagcccccacgtgctgcggcaccagggccaggtgctgcggcggcagcacagcaagctggtgggcaccaaggccctgagcaccaccgggaaggccctgcggaccctgcccacagccaaggtgttcatcagcctgccccccaacctggacttcaaggtggcccccagcatcctgaagcccaggaaggtgggcctggacctgtag

SEQ ID NO: 21173 - DNA, 576 bp, synthetic construct
  source 1..576: mol_type = other DNA; note = Synthetic coding sequence
atggccatcggcaagaggctggccaccctgcccaccaaggagcagaagacccagaggctcatcagcgagctgagcctgctgaaccacaagctgcctgcccgggtgtggctgcccacagctggctttgaccaccacgtggtgcgggtgccccacacccaggccgtggtgctgaacagcaaggacaaggccccctacctgatctacgtggaggtgctggagtgtgaaaattttgacaccacctctgtgcctgcccgcatccctgagaaccgcatccgcagcaccaggtctgtggagaacctgcctgaatgtggcatcacccatgagcagagagctggcagcttcagcacagtgcccaactatgacaatgatgatgaggcctggagcgtggatgacatcggggagctgcaggtggagctgcctgaggtgcacaccaacagctgtgacaacatcagccagttctctgtggacagcatcaccagccaggagagcaaggagcccgtcttcatcgctgctggggacatcagaagaaggctgtctgagcagctggcccacacccccacagccttcaagaggtag

SEQ ID NO: 21174 - DNA, 903 bp, synthetic construct
  source 1..903: mol_type = other DNA; note = Synthetic coding sequence
atggccaagtggggccagggcaacccccactggatcgtggaggagagagaagatggcaccaacgtgaacaactggcgctggaggacagaaagagatgccaccagcctgagcaagggcaagttccaggagctgctggtgggcatcgtggtggagaatgatgctggccgcggggagatcaatgagctgaagcaggtggagggggaggccagctgcagcagcaggaagggcaagctgatcttcttctatgagtggaacatcaagctgggctggaagggcatcgtgaaggagagcggcgtgaagcacaagggcctgattgagatccccaacctgtctgaagaaaatgaggtggatgacacagaggtgtccctgagcaagaagaagggagatggagtcatcctgaaggacctgatgaagacagctggaacagccaaggtgcgggaggccctgggggactacctgaaggccctgaagacagagttcaccaccggcatgatcctgcccaccaaggccatggccacccaggagctgactgtgaagaggaagctgagcggcaacaccctgcaggtgcaggccagcagccctgtggccctgggcgtgcgcatccccaccgtggccctgcacatgatggagctgtttgacaccaccgtggagcagctgtacagcatcttcaccgtgaaggagctgaccaacaagaagatcatcatgaagtggaggtgtggcaactggccagaggagcactacgccatggtggccctgaactttgtgcccaccctgggccagacagagctgcagctgaaggagttcctgagcatctgcaaggaggagaacatgaagttctgctggcagaagcagcactttgaggagatcaagggcagcctgcagctgacccccctgaatggatag

SEQ ID NO: 21175 - DNA, 1137 bp, synthetic construct
  source 1..1137: mol_type = other DNA; note = Synthetic coding sequence
atgaaggatgtgcccggcttcctgcagcagagccagaacagcggccctggccagcctgctgtgtggcaccggctggaggagctgtacaccaagaacttcatgaagaccctgtctgtgaacctgaacacaggcaagagcctgagctctgtgttccactttgaaaatgaatgtattgatgcccggcgctgcagcaaggccggcggcttctacttccgggtgaaccccctgagcctggtggagatcatcctgcacgtggtgcggcagatgacagaccccaacgtggccctgaccttcctggagaagacccgggagaaggtgaagagcagtgatgaggccgtcatcctgtgcaagacagccatcggggccctgaagctgaacattggagacctgcaggtgaccaaggagaccattgaagatgtggaggagatgctgaacaacctgcccggggtgacctctgtgcacagccgcttctatgacctgagcagcaagtactaccagaccatcggcaaccacgccagctactacaaggatgccctgcgcttcctgggctgtgtggacatcaaggacctgcctgtgtctgagcagcaggagcgggccttcaccctgggcctggccggcctgctgggggagggcgtcttcaactttggagagctgctgatgcaccctgtgctggagagcctgaggaacacagaccggcagtggctgattgacaccctgtatgccttcaacagcggaaatgtggagcgcttccagaccctgaagacagcctggggccagcagcctgacctggccgccaatgaggcccagctgctgaggaagatccagctgctgtgcctgatggagatgaccttcaccaggcctgccaaccaccggcagctgacctttgaggagatcgccaagagcgccaagatcaccgtgaatgaggtggagctgctggtgatgaaggccctgtctgtgggcctggtgaagggcagcattgatgaggtggacaagagggtgcacatgacctgggtgcagccccgggtgctggacctgcagcagatcaagggcatgaaggaccggctggagttctggtgcacagatgtgaagtccatggagatgctggtggagcaccaggcccatgacatcctgacctag

SEQ ID NO: 21176 - DNA, 603 bp, synthetic construct
  source 1..603: mol_type = other DNA; note = Synthetic coding sequence
atgctgctggagcagaacctgatcaccgtggacatgcagaagcacagcctgaccttctggtggctggtggagtgctggccccaggtgttcaacaagctgatccgccgctacaagtacctggagaagggctttgaagatgaggtgaagaagctgctgctcttcctgaagggcttcagcgagagcgagaggaacaagctggccatgctgactggagtgctgctggccaacggcaccctgaatgccagcatcctgaacagcctgtacaatgaaaacctggtgaaggagggcgtgtctgctgcctttgctgtgaagctgttcaagtcctggatcaatgagaaggacatcaatgctgtggccgccagcctgaggaaggtgtccatggacaaccggctgatggagctgtttcctgccaacaagcagagcgtggagcacttcaccaagtacttcacagaggccggcctgaaggagctgtctgaatatgtgaggaaccagcagaccatcggggccaggaaggagctgcagaaggagctgcaggagcagatgagcagaggagaccccttcaaggacatcatcctgtatgtgaaggaggagatgaagaagtag

SEQ ID NO: 21177 - DNA, 1446 bp, synthetic construct; identical to SEQ ID NO: 21094
  source 1..1446: mol_type = other DNA; note = Synthetic coding sequence

SEQ ID NO: 21178 - DNA, 261 bp, synthetic construct
  source 1..261: mol_type = other DNA; note = Synthetic coding sequence
atgggcaagatggtgtctgtcatcaacacagtggacaccagccatgaggacatgattcatgatgcccagatggactactacggcacccggctggccacctgcagcagtgacagatctgtgaagatctttgatgtgagaaatggaggccagatcctgattgctgacctgcggggccacgagggccctgtgtggcaggtggcctgggcccaccccatgtatggcaacatcctggccagctgcagctatgacaggaaggtgtag

SEQ ID NO: 21179 - DNA, 660 bp, synthetic construct
  source 1..660: mol_type = other DNA; note = Synthetic coding sequence
atggagcccagcgcccagcagctgcagctggccgccagcctgcctgccaacctgagcaacttctgccagggcagcgagatgcccaccaccagcaggcctgccctggatgtgaagggcggcaccagccctgccaaggaggatgccaaccaggagatgagctctgtggcctacagcaacctggccgtgaaggacaggaaggctgtggccatcctgcactacccaggagtggccagcaatggcaccaaggccagcggggcccccaccagcagcagcggcagccccatcggcagccccaccaccaccccacccaccaagccacccagcttcaacctgcacccagccccccacctgctggcctccatgcacctgcagaagctgaacagccagtaccagggcatggctgctgccaccccaggccagcctggagaggccggccccctgcagaactgggactttggagcccaggccggcggcgctgagagcctgagccccagcgctggggcccagagccctgccatcatcgacagcgaccctgtggatgaggaggtgctgatgagcctggtggtggagctgggcctggaccgggccaatgagctgcctgagctgtggctgggccagaatgaatttgacttcaccgctgacttccccagcagctgctag

SEQ ID NO: 21180 - DNA, 396 bp, synthetic construct
  source 1..396: mol_type = other DNA; note = Synthetic coding sequence
atgctgtgctggggctactggagcctgggccagcccggcatcagcaccaacctgcagggcatcgtggccgagccccaggtgtgtggcttcatcagtgacagatctgtgaaggaggtggcctgtggcggcaaccacagcgtcttcctgctggaggatggagaggtgtacacctgtggcctgaacaccaagggccagctgggccacgagcgggagggcaacaagccagagcagatcggggccctggccgaccagcacatcatccacgtggcctgtggggagagccacagcctggccctgagtgaccggggccagctgttctcctggggcgccggcagtgatggccagctgggcctgatgaccacagaggacagcgtggccgtgcccaggctcatctag

SEQ ID NO: 21181 - DNA, 3099 bp, synthetic construct
  source 1..3099: mol_type = other DNA; note = Synthetic coding sequence
atggagggcgccctgacagcccgggacaaggtgggcgtgcaggactttgtgctgctggatgcctacaccagcgagagcgcctttgtggacaacctgaggaagcgcttcagcgagaacctgatctacacctacatcggcaccctgctggtgtctgtgaacccctaccaggagctgggcatctacacagtgtcccagatggagctgtaccagggcgtgaacttctttgagctgcccccccacgtgtatgccatcgctgacaatgcctacaggatgatgtgtgccgagctgaacaaccacttcatcctgatcagcggggagagcggggccggcaagacagaggccagcaagaagatcctggagtactttgctgtgacctgccccatgacccagagcctgcagatcgcccgggaccggctgctcttcagcaaccctgtgctggaggcctttggaaatgcccggaccctgagaaatgacaacagcagcagatttgggaagtacatggacatccagtttgacttccagggcatccctgtgggcggccacatcatctcctacctgattgagaagagccgggtggtgtaccagaatgaaggagagaggaacttccacatcttctaccagctgctggccggcggggaggaggagcggctgagctacctgggcctggagcgggacccccagctgtacaagtacctgagccagggccactgtgccaaggagagcagcatcagtgacaagaatgactggaagacagtgtccaatgccttctctgtgattgacttcacagaggccgacctggagaacctgtttggcatcatcgcctctgtgctgcacctgggcaacatcggctttgaggaggatgaccagggctgtgccaccatcccagacacccatgagatcaagtggatcgccaagctgctgggcgtgcaccccagcgtgctgctggaggccctgacccacaggaagattgaggccaagacagaggaggtgatctgccccctgaccctggagctgtctgtgtatgccagagatgccatggccaaggctgtgtatggccgcaccttcacctggctggtgaacaagatcaacagcagcctggtgaacaaggtgggccagaggatcctggaccccctgctgctgctgacctggaagacagtgattggcctgctggacatctacggctttgaggtgtttgacaagaatggatttgagcagttctgcatcaactactgcaatgagaagctgcagcagctgctgattgaaagaaccctgaaggccgagcaggccgagtatgagatggagggcatcgagtgggagcccatcaagtacttcaacaacaagatcatctgtgacctggtggaggagcggcacaagggcatcatcagcatcctggatgaggagtgcatccggcccggccctgccacagacctgtccttcctggagaagctggaggagaaggtgggcaagcacgcccactttgagaccaggaagctggccggccccaagggcaggaagagaattggctggatggagttccggctgctgcactacgccggggaggtgacctactgcaccaagggcttcctggagaagaacaatgacctgctgtaccgccacctgaaggaggtgctgtgcaagagcaagaacatcatcctgcgggagtgcttcctgctggccgagctggagaacagaagaagaccacccaccgtgggcacccagttcaagaacagcctgagcagcctgctggagaccctcatcagcaaggagcccagctacatccgctgcatcaagcccaatgacaggaaggagcccagcaagtttgatgacttcctgatccgccaccagatcaagtacctgggcctgatggagcacctgcgggtgcggcgggccggctttgcctacagaagaaaatatgagcacttcctgcagcgctacaagagcctgtgcccagacacctggccccactggcacggccccccagctgagggcgtggagcggctcatcaagtacatcggctacaagccagaggagtacaagctgggcaagaccaagatcttcatccgcttccccaggaccctgtttgccacagaagatgcctttgagttcagcaagcaccagctggtggcccgcatccaggccacctacaagcgctgcctgggcagaagagaatatgtgaagaagaggcaggccgccatcaagctggaggcccactggaggggggccctggccaggaaggccatccagaggaggaagtgggccgtgcgcatcatcaggaagttcatcaagggcttcatcagcaggaacaagcccctgtgcccagacaatgaggagttcatcgtgtttgtgaggaagaactacatcctgaacctgcgctaccacctgcccaagacagtgctggacaagtcctggctgcggcccccaggcatcctggagaatgccagtgacctgctgaggaagatgtgtgtgaggaacctggtgcagaagtactgccggggcatcacagctgagaggaaggccatgatgcagcagaaggtggtgaccagcgagatcttccggggcaggaaggatggctacacagagagcctgaaccagccctttgtgaacagcagaattgatgaaggagacatcaaccccaaggtgctgcagctgatcagccatgagaagatccagtatggagtgcctgtgatcaagtatgacaggaagggcttcaaggcccggcagaggcagctgatcctgacccagaaggccgcctacgtggtggagctggccaagatcaagcagaagattgagtacagcgccctgaagggcgtgtccaccagcaacctgagtgatggcatcctggtgatccacgtgtccccagaggacagcaagcagaagggagatgctgtgctgcagtgtggccacgtgtttgaggccgtgaccaagctggtgatgctggtgaagaaggaaaatattgtgaatgtggtgcagggcagcctgcagttcttcatcagccctgggaaggagggcaccatcgtgtttgacaccggcctggaggagcaggtgtacaagaacaagaatggccagctgactgtggtgtctgtgcggaggaagagctag

SEQ ID NO: 21182 - DNA, 1176 bp, synthetic construct
  source 1..1176: mol_type = other DNA; note = Synthetic coding sequence
atgtgcagccagctgtggttcctgacagaccggcgcatccgggaggactacccccaggtgcagatcctgcgggccctgcggcagcgctgcagcgagcaggatgtgcgcttccgggctgtgctgatggaccagattgctgtgaccatcgtgggcggccacctgggcctgcagctgaaccagaaggccctgaccaccttcccagatgtggtgctggtgcgggtgcccacccccagcgtgcagagcgacagcgacatcaccgtgctgcggcacctggagaagctgggctgccgcctggtgaaccggccccagagcatcctgaactgcatcaacaagttctggaccttccaggagctggccggccatggagtgcccatgccagacaccttctcctatggaggccacgaggacttcagcaagatgattgatgaggccgagcccctgggctaccctgtggtggtgaagagcacccggggccaccggggcaaggctgtgttcctggcccgggacaagcaccacctgagtgacatctgccacctgatcagacatgatgtgccctacctgttccagaagtatgtgaaggagagccacggcaaggacatccgggtggtggtggtgggcggccaggtgattggctccatgctgcgctgcagcacagatggccgcatgcagagcaactgcagcctgggcggcgtgggcgtgaagtgccccctgacagagcagggcaagcagctggccatccaggtgagcaacatcctgggcatggacttctgtggcatcgacctgctgatcatggatgatggcagctttgtggtgtgtgaggccaatgccaacgtgggcttcctggcctttgaccaggcctgcaacctggatgtgggcggcatcatcgctgactacaccatgagcctgctgcccaaccggcagacaggcaagatggctgtgctgcccggcctgagcagcccccgggagaagaatgaaccagatggctgtgccagcgcccagggcgtggccgagagcgtgtacaccatcaacagcggcagcaccagcagcgagagcgagcctgagctgggggagatccgggacagcagcgccagcaccatgggcgcccctccttccatgctgcctgagcccggctacaacatcaacaaccgcatcgccagcgagctgaagctgaagtag

SEQ ID NO: 21183 - DNA, 1065 bp, synthetic construct
  source 1..1065: mol_type = other DNA; note = Synthetic coding sequence
atggacatggaccacatcatgacctgggccacagatgtggccaagggcatgcactacctgcacatggaggcccctgtgaaggtgatccaccgggacctgaagagcagaaatgtggtgattgctgctgatggagtgctgaagatctgtgactttggagccagccgcttccacaaccacaccacccacatgagcctggtgggcaccttcccctggatggcccctgaggtgatccagagcctgcctgtgtctgagacctgtgacacctacagctatggagtggtgctgtgggagatgctgacccgggaggtgcccttcaagggcctggagggcctgcaggtggcctggctggtggtggagaagaatgaaaggctgaccatccccagcagctgccccaggagctttgctgagctgctgcaccagtgctgggaggctgatgccaagaagaggcccagcttcaagcagatcatcagcatcctggagagcatgagcaatgacaccagcctgcctgacaagtgcaacagcttcctgcacaacaaggccgagtggaggtgtgaaattgaggccaccctggagcggctgaagaagctggagcgggacctgtccttcaaggagcaggagctgaaggagcgggagcggcggctgaagatgtgggagcagaagctgacagagcagagcaacacccccctgctgctgcccctggccgccaggatgtctgaggagagctactttgagagcaagacagaggagagcaacagcgctgagatgagctgccagatcacagccaccagcaatggagagggccacggcatgaaccccagcctgcaggccatgatgctgatgggctttggagacatcttctccatgaacaaggccggggctgtgatgcacagcggcatgcagatcaacatgcaggccaagcagaacagcagcaagaccaccagcaagaggcggggcaagaaggtgaacatggccctgggcttcagtgactttgacctgtctgaaggagatgatgatgatgatgatgatggagaggaggaggacaatgacatggacaacagcgagtag

SEQ ID NO: 21184 - DNA, 1707 bp, synthetic construct
  source 1..1707: mol_type = other DNA; note = Synthetic coding sequence
atgctggagcggcccccagccctggccatgcccatgcccacagagggcaccccaccacccctgagcggcacccccatccctgtgcctgcctacttcagacatgctgagcccggcttcagcctgaagaggccccggggcctgagccgcagcctgcccccacctcctccagccaagggcagcatccccatcagccgcctcttcccccccaggaccccaggctggcaccagctgcagccccggcgggtgtccttccggggggaggccagcgagaccctgcagagccctggctatgaccccagcaggcctgagagcttcttccagcagagcttccagaggctgagccggctgggccacggcagctatggagaggtgttcaaggtgcgcagcaaagaagatggccgcctgtatgctgtgaagaggtccatgagccccttccggggccccaaggaccgggccaggaagctggccgaggtgggcagccatgagaaggtgggccagcacccctgctgcgtgcggctggagcaggcctgggaggagggcggcatcctgtacctgcagacagagctgtgtggccccagcctgcagcagcactgtgaggcctggggcgccagcctgcctgaggcccaggtgtggggctacctgcgggacaccctgctggccctggcccacctgcacagccagggcctggtgcacctggatgtgaagccagccaacatcttcctgggcccccggggccgctgcaagctgggggactttggcctgctggtggagctgggcacagctggagctggggaggtgcaggagggggacccccgctacatggcccctgagctgctgcagggcagctatggaacagctgctgatgtgttcagcctgggcctgaccatcctggaggtggcctgcaacatggagctgccccatggaggagagggctggcagcagctgcggcagggctacctgcccccagagttcaccgctggcctgagcagcgagctgcggtctgtgctggtgatgatgctggagccagaccccaagctgcgggccacagctgaggccctgctggccctgcctgtgctgcggcagccccgggcctggggcgtgctgtggtgcatggctgctgaggccctgagccggggctgggccctgtggcaggccctgctggccctgctgtgctggctgtggcacggcctggcccacccagcctcctggctgcagcccctgggccccccagccaccccacctggcagccccccctgcagcctgctgctggacagcagcctgagcagcaactgggatgatgacagcctgggccccagcctgagccctgaggccgtgctggccaggacagtgggcagcaccagcacccccaggagccgctgcaccccccgggtgctgacccccctgcggctgagccctgctgctgagcccagcgcccctggcctgggccctgctgctgaggccccctgctgcgtggagcagaggggcttcctgagccgccacatccccaggagcttcagcgccttccaggccgccccacccaagagcgcctgcaatgccctgcacctgcacggccacacccagcccagcgcctttgtgtggagcctgacctgcagcagccaccacggccgcacctttgaggcccggaccaaggtggaccccctcttcaagatctgtggcggcttcctgactgtgtttgctgacctgtag

SEQ ID NO: 21185 - DNA, 642 bp, synthetic construct
  source 1..642: mol_type = other DNA; note = Synthetic coding sequence
atggccgagacagaggagaggagcctggacaacttctttgccaagagggacaagaagaagaagaaggagaggagcaacagagctgccagcgctgctggagctgctggcagcgctgggggcagcagcggggctgctggagctgctgggggcggggccggggccggcaccaggcctggagatggcggcacagccagcgctggagctgctggccctggagctgccaccaaggctgtgaccaaggatgaagatgagtggaaggagctggagcagaaggaggtggactacagcggcctgcgggtgcaggccatgcagatcagcagcgagaaggaggaggatgacaatgagaagaggcaggaccccggggacaactgggaggagggcggcggcggcggcggcggcatggagaagagcagcggcccctggaacaagacagcccctgtgcaggcccccccagcccctgtgattgtgacagagaccccagagcccgccatgaccagcggcgtgtacagacctcctggggcccggctgaccaccaccaggaagaccccccagggccccccagagatctacagcgacacccagttccccagcctgcagagcacagccaagcacgtggagagcaggaaccgctacctgaagtag

SEQ ID NO: 21186 - DNA, 4140 bp, synthetic construct
  source 1..4140: mol_type = other DNA; note = Synthetic coding sequence
atggccagcagccccaccaagggcctgaccatgtctgtgcctgtggcccccaagaagagctgctacacccagctgcgggacaacagaaatgctgccaggaacaacaatgaaagcatcctgagcctgggggacaccaatgccaaccagatcatgctggaggtgagcagcagccatgatgagagcaagacctgtgacctgggagatgagatcggcaacaccaacagcagcgagccagaaaatagaacccacttccacaaggagttccaccagctgcagggctttgggaagggcagccaggccggcagcgccagcctgaaggacttccggctgagcagcaccatccagcgggagctgaatgaggagcacacagtggagcggggcacagacagcctgcagaccaccaggagcatccagggccccagcctgagctcctggagaaatgtgatgtctgaggccagcctggatgtgctggccaagagagatgctgagatccccaggcatgtgcccaaggacaagctggccaagaccctggacaatgaggagctgcggcggcacagcctggagcgggccagcagctctgtggccgctgtgggcagcctgaccccccagcacccccagcccctgagcctggacagccgggaggcccggggccagatccctgggggcggggagggcccccagaagaccctgcctgaccatgctgtgcctgctgccttccctgccacagacagcaccagcgagggcaagtctgtgcgccaccccaagcccagcaccagcgagagcaagcagagcaccccatctgagacccagacagtgggcgcccacgtgctgcaggtgtgcagcgagcacaccagccacagcgcccaccctgagcccgccctgaacctgaccctggccagcaaggagatccccagcaagctggaggcccagctgggccagggcaaaggagaggccaagctggacctgaagtatgtgcccccccggcgggtggagcaggagggcaaggccgcccaggagggctacctgggctgccacaaggaggagaacctgagcgccctggagggccgggacccctgtggggaggcccaccctgaggccacagatgccctgggccacctgctgaacagcgacctgcaccacctgggcgtgggccggggcaactgtgaggagaagaggggcgtgaaccctggagagcaggacagcctgcacaccacccccaagcagggcagcgccagcctgggcggcgctgacaaccagcccaccgggaagatcagcccctgtgccggggagaagctgggggagaggaccagcagcagcttcagccctggggacagccacgtggccttcatccccaacaacctgacagacagcaagcccctggatgtgattgaggaggagcggcggctgggcagcggcaacaaggacagcgtgatggtgctggtgttcaaccccagcgtgggggagaacaagacagaggtgcctgagcccctggacccccagagcggccgctctgaggcccgggagagcaaggaggtgaccacctctgtggccgagaacagaaacctgctggagaatgctgacaagattgagagcaccagcgcccgggctgacagcgtgctgaacatcccagcccccctgcaccctgagaccaccgtgaacatgacctaccagcccaccacccccagcagcagcttccaggatgtgtctgtgtttggcatggatgctggcagccccctggtggtgcccccacccacagattctgcccggctgctgaacaccagccccaaggtgcctgacaagaacacctgccccagcggcatccccaagcctgtgttcacccacagcaaggacacccccagcagccaggagggcatggagaactaccaggtggagaagacagaggagaggacagagaccaagcccatcatcatgcccaagcccaagcacgtgcggcccaagatcatcacctacatcagaagaaacccccaggccctgggccaggtggatgccagcctggtgcctgtgggcctgccctatgccccacccacctgcaccatgcccctgccccatgaggagaaggctgctggaggagacctgaagcccagcgccaacctgtatgagaagttcaagccagacctgcagaagcccagggtcttcagcagcggcctgatggtgtctggcatcaagcccccaggccaccccttcagccagatgtctgagaagttcctgcaggaggtgacagaccaccctgggaaggaggagttctgcagccccccctatgcccactatgaggtgccccccaccttctaccgcagcgccatgctgctgaagccccagctgggcctgggcgccatgagccggctgcccagcgccaagagccgcatcctgattgccagccagaggagcagcgccagcgccatccaccccccaggccccatcaccacagccaccagcctgtacagcagtgaccccagcgctgacctgaagaaggccagcagcagcaatgctgccaagagcaacctgcccaagagcggcctgcggcccccaggctacagccggctgcctgctgccaagctggccgccttcggctttgtgcgcagcagctctgtgtcctctgtgagcagcacccagagcggggacagcgcccagcctgagcagggccgcccagccaccaggagcacctttggaaatgaggagcagcctgtgctgaaggccagcctgcccagcaaggacacccccaagggggccggccgggtggcccccccagccagcagctctgtgacagcccccaggaggagcctgctgcctgcccccaagagcaccagcaccccagctggcaccaagaaggatgcccagaaggaccaggacaccaacaagccagctgtgagcagccccaagagggtggccgccagcaccaccaagctgcacagccctggctaccccaagcagaggacagctgctgccagaaatggcttcccccccaagccagacccccaggcccgggaggccgagcggcagctggtgctgcggctgaaggagcgctgtgagcagcagacccggcagctgggcgtggcccagggcgagctgaagagggccatctgtggctttgatgccctggccgtggccacccagcacttcttcaggaagaatgaaagtgccctggtgaaggagaaggagctgagcattgagctggccaacatcagagatgaggtggccttccacacagccaagtgtgagaagctgcagaaggagaaggaggagctggagaggagatttgaagatgaggtgaagaggctgggctggcagcagcaggccgagctgcaggagctggaggagcggctgcagctgcagtttgaggccgagatggcccggctgcaggaggagcacggggaccagctgctgagcatccgctgccagcaccaggagcaggtggaggacctgacagccagccatgatgctgccctgctggagatggagaacaaccacacagtggccatcaccatcctgcaggatgaccatgaccacaaggtgcaggagctgatgagcacccatgagctggagaagaaggagctggaggagaactttgagaagctgcggctgagcctgcaggaccaggtggacaccctgaccttccagagccagagcctgcgggaccgggccaggagatttgaggaggccctgaggaagaacacagaggagcagctggagatcgccctggccccctaccagcacctggaggaggacatgaagagcctgaagcaggtgctggagatgaagaaccagcagatccacgagcaggagaagaagatcctggagctggagaagctggccgagaagaacatcatcctggaggagaagatccaggtgctgcagcagcagaatgaagacctgaaggccagaattgaccagaacacagtggtgacccggcagctgtctgaggagaatgccaacctgcaggagtatgtggagaaggagacccaggagaagaagaggctgagcaggaccaatgaggagctgctgtggaagctgcagacaggagaccccaccagccccatcaagctgagccccaccagccctgtgtaccggggcagcagcagcggccccagcagccctgcccgggtgtccaccaccccaagatag

SEQ ID NO: 21187 - DNA, 1041 bp, synthetic construct
  source 1..1041: mol_type = other DNA; note = Synthetic coding sequence
atgcagcacctgaagagcaagaagcgggaggagcgctggatgagggccagcaagaggcagagcgagaaggagatggaggagctgcaccacaacattgatgacctgctgcaggagaagaagagcctggagtgtgaggtggaggagctgcacaggacagtgcagaagaggcagcagcagaaggacttcattgatggaaatgtggagagcctgatgacagagctggagattgagaagagcctgaagcaccacgaggacatcgtggatgaaattgaatgtattgagaagaccctgctgaagagaagaagtgagctgcgggaggccgaccggctgctggccgaggccgagagcgagctgagctgcaccaaggagaagaccaagaatgctgtggagaagttcacagatgccaagaggagcctgctgcagacagaaagtgatgctgaggagctggagcggcgggcccaggagacagctgtgaacctggtgaaggctgaccagcagctgcggagcctgcaggctgatgccaaggacctggagcagcacaagatcaagcaggaggagatcctgaaggagatcaacaagatcgtggccgccaaggacagcgacttccagtgcctgagcaagaagaaggagaagctgacagaggagctgcagaagctgcagaaggacatcgagatggccgagagaaatgaagaccaccacctgcaggtgctgaaggagagcgaggtgctgctgcaggccaagagagctgagctggagaagctgaagagccaggtgaccagccagcagcaggagatggctgtgctggaccggcagctgggccacaagaaggaggagctgcacctgctgcagggctccatggtgcaggccaaggctgacctgcaggaggccctgcggctgggggagacagaggtgacagagaagtgcaaccacatccgggaggtgaagagcctgctggaggagctgtccttccagaagggggagctgaatgtgcagatcagcgagaggaagacccagctgaccctcatcaagcaggagatctag

SEQ ID NO: 21188 - DNA, 369 bp, synthetic construct; identical to SEQ ID NO: 21112
  source 1..369: mol_type = other DNA; note = Synthetic coding sequence

SEQ ID NO: 21189 - DNA, 291 bp, synthetic construct
  source 1..291: mol_type = other DNA; note = Synthetic coding sequence
atgagcatcagcagtgatgaggtgaacttcctggtgtaccgctacctgcaggagagcggcttcagccacagcgccttcaccttcggcatcgagagccacatcagccagagcaacatcaacggggccctggtgcccccagctgccctgatcagcatcatccagaagggcctgcagtatgtggaggccgaggtgtccatcaatgaagatggcaccctgtttgatggccggcccatcgagagcctgagcctgattgatgctgtgatgccagatgtggtgcagacccggcagtag

SEQ ID NO: 21190 - DNA, 2913 bp, synthetic construct
  source 1..2913: mol_type = other DNA; note = Synthetic coding sequence
atgctgcagcaggtgaatggccacaaccctggcagtgatggccaggcccgggagtacctgcgggaggacctgcaggagttcctgggcggggaggtgctgctgtacaagctggatgacctgaccagggtgaaccctgtgaccctggagaccgtgctgcgctgcctgcaggcccgctacatggctgacaccttctacaccaatgccggctgcaccctggtggccctgaaccccttcaagcctgtgccccagctgtacagccctgagctgatgagggagtaccacgccgccccccagccccagaagctgaagccccacgtgttcaccgtgggggagcagacctacagaaatgtgaagagcctgattgagcctgtgaaccagagcatcgtggtgtctggagagagcggggccggcaagacctggaccagccgctgcctgatgaagttctatgctgtggtggccaccagccctgcctcctgggagagccacaagattgctgagcgcatcgagcagaggatcctgaacagcaaccctgtgatggaggcctttggaaatgcctgcaccctgaggaacaacaacagcagcagatttgggaagttcatccagctgcagctgaacagagcccagcagatgactggagctgctgtgcagacctacctgctggagaagaccagggtggcctgccaggccagcagcgagaggaacttccacatcttctaccagatctgcaagggggcctctgaagatgagcggctgcagtggcacctgcctgagggcgccgccttctcctggctgcccaaccctgagaggagcctggaggaggactgctttgaggtgacccgggaggccatgctgcacctgggcatcgacacccccacccagaacaacatcttcaaggtgctggccggcctgctgcacctgggcaacatccagtttgctgcctctgaagatgaggcccagccctgccagcccatggatgatgccaagtacagcgtgaggacagctgccagcctgctgggcctgcctgaagatgtgctgctggagatggtgcagatccgcaccatccgggccggccggcagcagcaggtgttcaggaagccctgtgcccgggcagaatgtgacacccggcgggactgcctggccaagctgatctatgcccggctgtttgactggctggtgtctgtcatcaacagcagcatctgtgccgacacagacagctggaccaccttcatcggcctgctggatgtgtatggctttgagagcttcccagacaacagcctggagcagctgtgcatcaactatgccaatgagaagctgcagcagcactttgtggcccactacctgcgggcccagcaggaggagtatgctgtggagggcctggagtggagcttcatcaactaccaggacaaccagccctgcctggacctgattgagggcagccccatcagcatctgcagcctcatcaatgaggagtgccgcctgaaccggcccagcagcgctgcccagctgcagacccgcatcgagacagccctggccggcagcccctgcctgggccacaacaagctgagccgggagcccagcttcatcgtggtgcactacgccggccctgtgcgctaccacacagctggcctggtggagaagaacaaggaccccatccccccagagctgacccggctgctgcagcagagccaggaccccctgctgatgggcctcttccccaccaaccccaaggagaagacccaggaggagcccccaggccagagccgggcccctgtgctgactgtggtgtccaagttcaaggccagcctggagcagctgctgcaggtgctgcacagcaccaccccccactacatccgctgcatcaagcccaacagccagggccaggcccagaccttcctgcaggaggaggtgctgagccagctggaggcctgtggcctggtggagaccatccacatctctgctgctggcttccccatccgggtgagccacaggaactttgtggagcgctacaagctgctgcggcggctgcacccctgcaccagcagcggccctgacagcccctacccagccaagggcctgcctgagtggtgcccccacagcgaggaggccaccctggagcccctcatccaggacatcctgcacaccctgcctgtgctgacccaggccgccgccatcactggagacagcgctgaggccatgcctgcccccatgcactgcggccgcaccaaggtgttcatgacagacagcatgctggagctgctggagtgtggccgggcccgggtgctggagcagtgtgcccgctgcatccagggcggctggaggaggcaccgccaccgggagcaggagcggcagtggagggctgtgatgctgatccaggccgccatccgctcctggctgaccaggaagcacatccagaggctgcacgccgccgccaccgtcatcaagagggcctggcagaagtggaggatccgcatggcctgcctggccgccaaggagctggatggagtggaggagaagcacttcagccaggccccctgcagcctgagcaccagccccctgcagacccggctgctggaggccatcatccggctgtggcccctgggcctggtgctggccaacacagccatgggcgtgggcagcttccagaggaagctggtggtgtgggcctgcctgcagctgccccggggcagccccagcagctacacagtgcagacagcccaggaccaggccggcgtgaccagcatccgggccctgccccagggcagcatcaagttccactgcaggaagagccccctgcgctatgctgacatctgcccagagcccagcccctacagcatcaccggcttcaaccagatcctgctggagcggcacaggctcatccacgtgaccagcagcgccttcaccggcctgggctag

SEQ ID NO: 21191 - DNA, 3303 bp, synthetic construct; identical to SEQ ID NO: 18635
  source 1..3303: mol_type = other DNA; note = Synthetic coding sequence

SEQ ID NO: 21192 - DNA, 390 bp, synthetic construct; identical to SEQ ID NO: 19988
  source 1..390: mol_type = other DNA; note = Synthetic coding sequence

SEQ ID NO: 21193 - DNA, 498 bp, synthetic construct
  source 1..498: mol_type = other DNA; note = Synthetic coding sequence
atgagcctgcacggcaagaggaaggagatctacaagtatgaggccccctggacagtgtatgccatgaactggagcgtgcggccagacaagcgcttccggctggccctgggcagctttgtggaggagtacaacaacaaggtgcagctggtgggcctggatgaggagagcagcgagttcatctgcaggaacacctttgaccacccctaccccaccaccaagctgatgtggatcccagacaccaagggcgtgtacccagacctgctggccaccagcggggactacctgcgggtgtggagggtgggggagacagagacccggctggagtgcctgctgaacaacaacaagaacagcgacttctgtgcccccctgaccagctttgactggaatgaggtggacccctacctgctgggcaccagcagcattgacaccacctgctgcttccagtggcctgtgtgcctgagcctgctgtgcacccactgctaccagaagctgctgtag

SEQ ID NO: 21194 - DNA, 1044 bp, synthetic construct
  source 1..1044: mol_type = other DNA; note = Synthetic coding sequence
atgagcctggcccagagccctggcatctggggcgaggaccctgtgaagctgaccctggccctgaagatgacccggcaggacctgaccaggacccagatggagctgaacaacatgaaggccaactttggagatgtggtgccccggcgggactttgagatgcaggagaagaccaacaaggacctgcaggagcagctggacaccctgcgggccagctatgaggaggtgaggaaggagcacgagatcctgatgcagctgcacatgagcaccctgaaggagcgggaccagttcttcagcgagctgcaggagatccagaggaccagcacccccaggccagactggaccaagtgcaaggatgtggtggccggcggccctgagcgctggcagatgctggccgagggcaagaacagcgaccagctggtggatgtgctgctggaggagatcggcagcggcctgctgcgggagaaggacttcttccctggcctgggctatggagaggccatcccagccttcctgcgctttgatggcctggtggagaacaagaagcccagcaagaaggatgtggtgaacctgctgaaggatgcctggaaggagcggctggccgaggagcagaaggagaccttcccagacttcttcttcaacttcctggagcacagatttggccccagtgatgccatggcctgggcctacaccatctttgagaacatcaagatcttccacagcaatgaggtgatgagccagttctatgctgtgctgatgggcaagagaagtgaaaatgtgtatgtgacccagaaggagaccgtggcccagctgctgaaggagatgaccaatgctgacagccagaatgaaggcctgctgaccatggagcagttcaacacagtgctgaagagcaccttccccctgaagacagaggagcagatccaggagctgatggaggccggcggctggcaccccagcagcagcaatgctgacctgctgaactaccgcagcctcttcatggaggatgaggagggccagagcgagccctttgtgcagaagctgtggtag

SEQ ID NO: 21195 - DNA, 219 bp, synthetic construct
  source 1..219: mol_type = other DNA; note = Synthetic coding sequence
atgtggagcctgacagccagcgagggggagagcaccacagcccacttcttcctgggcgctggagatgagggcctgggcacccggggcatcggcatgaggcctgaggagagtgacagcgagctgctggaggatgaggaggatgaggtgcccccagagccccagatcatcgtgggcatctgtgccatgaccaagaagagcaagagcaagcccatgacctag

SEQ ID NO: 21196 - DNA, 1149 bp, synthetic construct; identical to SEQ ID NO: 19044
  source 1..1149: mol_type = other DNA; note = Synthetic coding sequence

SEQ ID NO: 21197 - DNA, 1620 bp, synthetic construct; identical to SEQ ID NO: 19050
  source 1..1620: mol_type = other DNA; note = Synthetic coding sequence

SEQ ID NO: 21198 - DNA, 390 bp, synthetic construct; identical to SEQ ID NO: 19988
  source 1..390: mol_type = other DNA; note = Synthetic coding sequence

SEQ ID NO: 21199 - DNA, 1089 bp, synthetic construct; identical to SEQ ID NO: 18944
  source 1..1089: mol_type = other DNA; note = Synthetic coding sequence

SEQ ID NO: 21200 - DNA, 1266 bp, synthetic construct
  source 1..1266: mol_type = other DNA; note = Synthetic coding sequence
atgtctgccctgcggcgcagcggctacggccccagtgatggccccagctatggccgctactacggccctggaggaggagatgtgcctgtgcaccccccaccacccctgtaccccctgcggcctgagcccccccagccccccatctcctggagggtgcggggcggcggccctgctgagaccacctggctgggggagggcggcggcggagatggctactaccccagcggcggggcctggccagagcccggccgggccggcggcagccaccagagcctgaacagctacaccaatggagcctacggccccacctacccacctggccctggggccaacacagccagctacagcggggcctactatgcccctggctacacccagaccagctacagcacagaggtgcccagcacctaccgcagcagcggcaacagccccacccctgtgagccgctggatctacccccagcaggactgccagacagaggccccacccctgcggggccaggtgcccggctacccacccagccagaaccctggcatgaccctgccccactacccctatggagatggcaacagatctgtgccccagagcggccccaccgtgcggccccaggaggatgcctgggccagccctggggcctacggcatgggcggccgctacccctggcccagcagcgcccccagcgcccctcctggcaacctgtacatgacagagagcaccagcccctggcccagcagcggcagcccccagagcccccccagcccccctgtgcagcagcccaaggacagcagctacccctacagccagagcgaccagagcatgaacagacacaacttcccctgcagcgtgcaccagtatgagagcagcggcaccgtgaacaatgatgacagcgacctgctggacagccaggtgcagtacagcgctgagccccagctgtatggaaatgccaccagtgaccaccccaacaaccaggaccagagcagcagcctgcctgaggagtgtgtgcccagtgatgagagcaccccacccagcatcaagaagatcatccacgtgctggagaaggtgcagtacctggagcaggaggtggaggagtttgtgggcaagaagacagacaaggcctactggctgctggaggagatgctgaccaaggagctgctggagctggacagcgtggagaccggcggccaggacagcgtgcggcaggccaggaaggaggccgtgtgcaagatccaggccatcctggagaagctggagaagaagggcctgtag

SEQ ID NO: 21201 - DNA, 321 bp, synthetic construct
  source 1..321: mol_type = other DNA; note = Synthetic coding sequence
tgaaacctgcgggagggcgctgagcagaaggtggtgttcatcaccggccgggtgcaccctggagagacccccagcagctttgtgtgccagggcatcatcgacttcctggtgtcccagcaccccatcgcctgtgtgctgcgggagtacctggtgttcaagatcgcccccatgctgaacccagatggagtgtacctgggcaactaccgctgcctgagcctgatgagaaatggcagccggggccggcccttcttccccagcagcagcgccaggatgctgcggaccagccccatcccagcccaccccctgaccggcaccctgtag

SEQ ID NO: 21202 - DNA, 684 bp, synthetic construct
  source 1..684: mol_type = other DNA; note = Synthetic coding sequence
tgactcatctttgcctgcctggtgcccggcttccctgctgtgatgagcagccggggcccctgcaccctggagaccctcatcaaccccagccccagcgtggctgatgtgaagatctacccagaggagatcacccccctgctgcctgccatctctggagagaagattgctgaggaccagacctgcttcttcctgcagatcctgctgaagtacatggtgatccaggccgccagcctggagtggaagaacaaggagaaccaggacaccggcttcaagttcctgttcaccctcttcaggaagtactacctgccccacctgttccccagcttcaccaagctgaccaacatctacaagcctgtgctggacatcccccacctgcggcccaagcctgtgtacatcaccaccacccgggacaatgaaaacatctacagcaccaagatcccctacatggccgcccgggtggtgttcatcaagtggatcgtgaccttcttcctggagaagaagtacctgacagccacccagaacaccaagaatggagtggatgtgctgcccaagatcatccagacagtgggcggcggcgctgtgcaggagcgggcccctgagctggatggcggcggccccacagagcaggacaagagccacagcaacagcagcaccctgagtgaccggcggctgagcaacagctag

SEQ ID NO: 21203 - DNA, 573 bp, synthetic construct
  source 1..573: mol_type = other DNA; note = Synthetic coding sequence
atggagccccccatggagcccagcggcggggagcaggagcccggggctgtgcgcttcctggacctgccctgggaggatgtgctgctgccccacgtgctgaacagagtgcccctgcggcagctgctgcggctgcagagggtgtcccgggccttccgcagcctggtgcagctgcacctggccggcctgcggagatttgatgctgcccaggtgggcccccagatccccagggctgccctggcccggctgctgagagatgctgagggcctgcaggagctggccctggccccctgccacgagtggctgagtgatgaggacctggtgcctgtgctggccaggaacccccagctgcggtctgtggccctgggcggctgcggccagctgagcagaagagccctgggcgccctggccgagggctgcccccggctgcagaggctgagcctggcccactgtgactgggtggatggcctggccctgcggggcctggccgaccgctgcccagccctggaggagctggacctgacagcctgccggcagctgaaggatgaggccatcgtgtacctggcccagaggtag

SEQ ID NO: 21204 - DNA, 270 bp, synthetic construct; identical to SEQ ID NO: 20498
  source 1..270: mol_type = other DNA; note = Synthetic coding sequence

SEQ ID NO: 21205 - DNA, 381 bp, synthetic construct
  source 1..381: mol_type = other DNA; note = Synthetic coding sequence
atgaccaccaggtctgtgctggatgtggagacctttgtggccgacatcctgaagggggagaacctgagcaagaaggccaaggagaagcgggagagcctcatcaagaagatcaaggatgtgaagagcatctacctgcaggagttccaggacaagggagatgctgaagatggagaggagtatgatgacccctttgctggccccccagacaccatcagcctggccagcgagagatatgacaaggatgatgaggcccccagtgatggagcccagttcccccccatcgccgcccaggacctgccctttgtgctgaaggccggctacctggagaagaggaggaaggaccacagcttcctgggctttgagtggcagaagcgctggtag

SEQ ID NO: 21206 - DNA, 678 bp, synthetic construct
  source 1..678: mol_type = other DNA; note = Synthetic coding sequence
atgctgtctgctgtggcccggggctaccagggctggttccacccctgtgcccggctgtctgtgaggatgagcagcacaggcatcgacagaaaaggagtgctggccaacagagtggccgtggtgacaggcagcaccagcggcatcggctttgccatcgcccggcggctggccagagatggagcccacgtggtgatcagcagcaggaagcagcagaatgtggaccgggccatggccaagctgcagggcgagggcctgtctgtggccggcatcgtgtgccacgtgggcaaggccgaggaccgggagcagctggtggccaaggccctggagcactgcggcggcgtggacttcctggtgtgcagcgctggggtgaaccccctggtgggcagcaccctgggcaccagcgagcagatctgggacaagatcctgtctgtgaatgtgaagagccctgccctgctgctgagccagctgctgccctacatggagaacagaagaggagctgtgatcctggtgagcagcattgctgcctacaaccctgtggtggccctgggcgtgtacaacgtgtccaagacagccctgctgggcctgaccaggaccctggccctggagctggcccccaaggacatccgggtgaactgtgtggtgcccggcatcatcaagacagacttcagcaaggtgtag

SEQ ID NO: 21207 - DNA, 1080 bp, synthetic construct
  source 1..1080: mol_type = other DNA; note = Synthetic coding sequence
tgagccacagccatgaccagcgcctggctggcccagggcaccggggagggcgtgaatgatgtgaggaaaggagcctgtgccagccacgtgtccaccatggccagcttcctgaagggggcccacgtgaccatcaatgcccgggcagaggaggatgtggagcctgagtgcatcatggagaaggtggccaaggccagcggggccaactacagcttccacaaggagagcggccgcttccaggatgtgggcccccaggcccctgtgggctctgtgtaccagaagaccaatgctgtgtctgagatcaagagggtgggcaaggacagcttctgggccaaggccgagaaggaggaggagaacagaaggctggaggagaagagaagagctgaggaggcccagaggcagctggagcaggagcggcgggagcgggagctgcgggaggccgcccggcgggagcagcgctaccaggagcagggcggggaggccagcccccagaggacctgggagcagcagcaggaggtggtgtccaggaacagaaatgagcaggagagcgctgtgcacccccgggagatcttcaagcagaaggagcgggccatgagcaccaccagcatcagcagcccccagcccgggaagctgcggagccccttcctgcagaagcagctgacccagcctgagacccacttcggccgggagcctgctgctgccatcagccggcccagggctgacctgcctgctgaggagcccgcccccagcaccccaccctgcctggtgcaggccgaggaggaggccgtgtatgaggagcccccagagcaggagaccttctatgagcagccccccctggtgcagcagcagggcgccggcagcgagcacatcgaccaccacatccagggccagggcctgagcggccagggcctgtgtgcccgggccctgtatgactaccaggccgcagatgacacagagatcagctttgatcctgagaacctgatcaccggcatcgaggtgattgatgagggctggtggaggggctacggcccagatggccacttcggcatgtttcctgccaactacgtggagctgattgaatag

SEQ ID NO: 21208 - DNA, 483 bp, synthetic construct; identical to SEQ ID NO: 20009
  source 1..483: mol_type = other DNA; note = Synthetic coding sequence

SEQ ID NO: 21209 - DNA, 2616 bp, synthetic construct
  source 1..2616: mol_type = other DNA; note = Synthetic coding sequence
atgggagacagtgatgatgaatatgacagaagaagaagagacaagttcagaagagagaggagtgactatgacaggagccgggagagagatgagaggagaagaggagatgactggaatgaccgggagtgggaccggggccgggagaggaggagcagaggagagtacagagattatgacaggaacagaagagagcgcttcagcccccccaggcatgagctgagccccccccagaagaggatgagaagagactgggatgagcacagcagtgacccctaccacagcggctatgagatgccctatgccggcggcggcggcggccccacctacggccccccccagccctggggccacccagatgtgcacatcatgcagcaccacgtgctgcccatccaggcccggctgggcagcattgctgagattgacctgggcgtgcccccacctgtgatgaagaccttcaaggagttcctgctgagcctggatgacagcgtggatgaaacagaggccgtgaagcgctacaatgactacaagctggacttccggcggcagcagatgcaggacttcttcctggcccacaaggatgaggagtggttccgcagcaagtaccacccagatgaggtgggcaagaggcggcaggaggcccggggggccctgcagaaccggctgcgggtcttcctgagcctgatggagaccggctggtttgacaacctgctgctggacatcgacaaggcagatgccatcgtgaagatgctggatgctgctgtgatcaagatggagggcggcacagaaaatgacctgcgcatcctggagcaggaggaggaggaggagcaggccggcaagccaggagagcccagcaagaaggaggagggccgggccggggccggcctgggagatggagagaggaagaccaatgacaaggatgagaagaaggaggatggcaagcaggccgagaatgacagcagcaatgatgacaagaccaagaagtcagaaggagatggagacaaggaggagaagaaggaggacagcgagaaggaggccaagaagagcagcaagaagaggaacaggaagcacagcggagatgacagctttgatgagggctctgtgtctgagagcgagagcgagagcgagagcggccaggccgaggaggagaaggaggaggccgaggccctgaaggagaaggagaagcccaaggaggaggagtgggagaagcccaaggatgctgctggcctggagtgcaagccccggcccctgcacaagacctgcagcctcttcatgagaaatattgcccccaacatcagcagagctgagatcatcagcctgtgcaagcgctacccaggcttcatgagggtggccctgtctgagccccagcctgagcggcgcttcttccggcggggctgggtgacctttgacagatctgtgaacatcaaggagatctgctggaacctgcagaacatccggctgcgggagtgtgagctgagccctggggtgaacagagacctgaccaggagagtgaggaacatcaatggcatcacccagcacaagcagatcgtgagaaatgacatcaagctggccgccaagctgatccacaccctggatgacaggacccagctgtgggccagcgagcccggcaccccacccctgcccaccagcctgcccagccagaaccccatcctgaagaacatcacagactacctgattgaggaggtgtctgctgaggaggaggagctgctgggcagcagtggaggagcccctcctgaggagccccccaaggagggcaacccagctgagatcaacgtggagagagatgagaagctgatcaaggtgctggacaagctgctgctgtacctgagaattgtgcacagcctggactactacaacacctgtgagtacccaaatgaagatgagatgcccaacagatgtggcatcatccacgtgcggggccccatgccacccaaccgcatcagccatggagaggtgctggagtggcagaagacctttgaggagaagctgacccccctgctgtctgtgcgggagagcctgtctgaggaggaggcccagaagatgggcaggaaggaccctgagcaggaggtggagaagtttgtgaccagcaacacccaggagctgggcaaggacaagtggctgtgccccctgagcggcaagaagttcaagggccctgagtttgtgaggaagcacatcttcaacaagcacgccgagaagattgaggaggtgaagaaggaggtggccttcttcaacaacttcctgacagatgccaagaggcctgccctgcctgagatcaagccagcccagcccccaggccctgcccagagcctgaccccaggcctgccctacccccaccagaccccccagggcctgatgccctacggccagccccggccccccatcctgggctatggagctggagctgtgcggcctgctgtgcccaccggcggccccccctacccccacgccccctacggggccggccggggcaactatgatgccttccggggccagggcggctacccaggcaagcccaggaacaggatggtgcggggggacccccgggccatcgtggagtacagagacctggatgccccagatgatgtggacttcttctag

SEQ ID NO: 21210 - DNA, 2025 bp, synthetic construct; identical to SEQ ID NO: 19458
  source 1..2025: mol_type = other DNA; note = Synthetic coding sequence

SEQ ID NO: 21211 - DNA, 1467 bp, synthetic construct
  source 1..1467: mol_type = other DNA; note = Synthetic coding sequence
atgtctgatgaggtgttcagcaccaccctggcctacaccaagagccccaaggtgaccaagaggaccaccttccaggatgagctgatccgggccatcacagcccggagcgcccggcagaggagcagcgagtacagtgatgactttgacagtgatgaaattgtgtccctgggggacttcagtgacaccagcgcagatgagaacagcgtgaacaagaagatgaatgacttccacatcagtgatgatgaggagaagaaccccagcaagctgctcttcctgaagaccaacaagagcaatggaaacatcaccaaggatgagcctgtgtgtgccatcaagaatgaggaggagatggccccagatggctgtgaggacatcgtggtgaagagcttcagcgagagccagaacaaggatgaggagtttgagaaggacaagatcaagatgaagcccaagccccgcatcctgagcatcaagagcaccagcagcgagaacaacagcctggacacagatgaccacttcaagcccagcccccggcccaggtccatgctgaagaagaagagccacatggaggagaaggatggcctggaggacaaggagacagccctgtctgaggagctggagctgcacagcgcccccagcagcctgcccaccccaaatggcatccagctggaggccgagaagaaggccttcagcgagaacctggaccctgaggacagctgcctgaccagcctggccagcagcagcctgaagcagatcctgggggacagcttcagccctggcagcgagggcaatgccagcggcaaggaccccaatgaggagatcacagagaaccacaacagcctgaagagtgatgagaacaaggagaacagcttctctgctgaccacgtgaccacagctgtggagaagagcaaggagagccaggtgacagcagatgacctggaggaggagaaggccaaggccgagctgatcatggatgatgacagaacagtggaccccctgctgagcaagagccagagcatcctgatcagcaccagcgccacagccagcagcaagaagaccattgaagatagaaacatcaagaacaagaagagcaccaacaacagagccagcagcgccagcgcccggctgatgaccagcgagttcctgaagaagagcagcagcaagaggaggacccccagcaccaccaccagcagccactacctgggcaccctgaaggtgctggaccagaagcccagccagaagcagagcattgaaccagacagagctgacaacatccgggctgctgtgtaccaggagtggctggagaagaagaatgtgtacctgcacgagatgcaccgcatcaagagaattgaaagtgagaacctgcgcatccagaatgagcagaagaaggccgccaagcgggaggaggccctggccagctttgaggcctggaaggccatgaaggagaaggaggccaagaagattgctgcctag

SEQ ID NO: 21212 - DNA, 564 bp, synthetic construct
  source 1..564: mol_type = other DNA; note = Synthetic coding sequence
atggtgcgggagcccggccccaggcctggcaccccaggctgcagcgccagcggccagtggacagccaccctgcggccctacctgtctgctgtgcgggccaccctgcaggccgccctgtgcctggagaacttcagcagccaggtggtggagcggcacaacaagccagaggtggaggtgcgcagcagcaaggagctgctgctgcagcctgtgaccatcagcagaaatgagaaggagaaggtgctgattgagggcagcatcaacagcgtgcgggtgtccattgctgtgaagcaggctgatgaaattgagaagatcctgtgccacaagttcatgaggttcatgatgatgagagctgagaacttcttcatcctgcggaggaagcctgtggagggctatgacatctccttcctgatcaccaacttccacacagagcagatgtacaagcacaagctggtggactttgtgatccacttcatggaggagattgacaaggagatcagcgagatgaagctgtctgtgaatgcccgggcccgcatcgtggccgaggagttcctgaagaacttctag

SEQ ID NO: 21213 - DNA, 1068 bp, synthetic construct
  source 1..1068: mol_type = other DNA; note = Synthetic coding sequence
tgaagcctggccagcagcctgaggaacaaggagggcaccctgggcagcaaggtgggctacctggatgtggaggcccggggccctggagagggccggggcggcggcggggagagcccccccctgcagcccccacctccagcccctgtgctgctgtatgaccagggcggcggcagaagaagaagaggagaggccgaggccgaggccgaggagtgggaggccgagagcgtgctgggcaccctgctgcagaagctgcgggaggagggctacctggcctactacctgcagggcggcttcagccgcttccaggccgagtgcccccacctgtgtgagaccagcctggccggccgggccggcagctccatggcccctgtgcccggccctgtgcctgtggtgggcctgggcagcctgtgcctgggcagtgactgcagtgatgctgagagcgaggccgaccgggacagcatgagctgtggcctggacagcgagggcgccaccccacctcctgtgggcctgcgggccagcttccctgtgcagatcctgcccaacctgtacctgggcagcgcccgggacagcgccaacctggagagcctggccaagctgggcatccgctacatcctgaatgtgacccccaacctgcccaacttctttgagaagaatggagacttccactacaagcagatccccatcagtgaccactggagccagaacctgagccgcttcttccctgaggccatcgagttcattgatgaggccctgagccagaactgtggggtgctggtgcactgcctggccggcgtgagccgctctgtgacagtgacagtggcctacctgatgcagaagctgcacctgagcctgaatgatgcctatgacctggtgaagaggaagaagagcaacatcagccccaacttcaacttcatgggccagctgctggactttgagaggagcctgcggctggaggagcggcacagccaggagcagggcagcggcggccaggccagcgctgccagcaaccccccatccttcttcaccacccccaccagtgatggagcctttgagctggcccccacctag

SEQ ID NO: 21214 - DNA, 51 bp, synthetic construct; identical to SEQ ID NO: 20857
  source 1..51: mol_type = other DNA; note = Synthetic coding sequence

SEQ ID NO: 21215 - DNA, 1620 bp, synthetic construct; identical to SEQ ID NO: 19050
  source 1..1620: mol_type = other DNA; note = Synthetic coding sequence

SEQ ID NO: 21216 - DNA, 474 bp, synthetic construct; identical to SEQ ID NO: 20844
  source 1..474: mol_type = other DNA; note = Synthetic coding sequence

SEQ ID NO: 21217 - DNA, 2553 bp, synthetic construct
  source 1..2553: mol_type = other DNA; note = Synthetic coding sequence
atggagcctgagaggaagggcctgagcctggccagcagcagtgatggagatggccgggaggagaacaagctgaagcagggcatcagccaggacctggccagcagcagccggctggaccgctacaagatcgcccggcagctgacagagaaggccatcaaggagaagaagatcttcagcatctacggccactaccctgtggtgcgggccgccctgcggaggaagggctgggtggagaagaagttccacttcctgcccaaggtgatcccagatgtggaggatgaaggagcccgggtgaatgatgacacctgtgccaaggtgaaggagaaccaggagatggccctggagaagacagacaacatccatgatgtgatgagccggctggtgaagaatgagatgccctacctgctgtggaccatcaagagggacatcatcgactaccacagcctgacctatgaccagatgctgaaccactacgccaagacagccagcttcaccaccaagattggcctgtgtgtgaacatgaggagcctgccctggtacgtgcctgccaacccagacagcttcttcccccgctgctacagcctgtgcacagaaagtgagcagcaggagttcctggaggacttccggaggaccatggccagcagcatcctgaagtgggtggtgagccaccagagctgcagccgcagcagccgcagcaagccccgggaccagcgggaggaggccggcagcagtgacctgagcagccggcaggatgctgaaaatgctgaggccaagctgcggggcctgcccggccagctggtggacatcgcctgcaaggtgtgccaggcctacctgggccagctggagcacgaggacatcgacaccagcgcagatgctgtggaggacctgacagaagctgagtgggaggacctgacccagcagtactacagcctggtgcatggagatgccttcatcagcaacagcaggaactacttcagccagtgccaggccctgctgaaccgcatcacctctgtgaacccccagacagacattgatggcctgaggaacatctggatcatcaagccagctgccaagagccggggccgggacatcgtgtgcatggacagagtggaggagatcctggagctggccgctgctgaccaccccctgagccgggacaacaagtgggtggtgcagaagtacatcgagacccccctgctgatctgtgacaccaagtttgacatccggcagtggttcctggtgacagactggaaccccctgaccatctggttctacaaggagagctacctgcgcttcagcacccagcgcttcagcctggacaagctggacagcgccatccacctgtgcaacaatgctgtgcagaagtacctgaagaatgatgtgggccgcagccccctgctgcctgcccacaacatgtggaccagcacccgcttccaggagtacctgcagaggcagggcagaggagctgtgtggggcagcgtcatctaccccagcatgaagaaggccatcgcccacgccatgaaggtggcccaggaccacgtggagcccaggaagaacagctttgagctgtatggagctgactttgtgctgggccgggacttccggccctggctgattgagatcaacagcagccccaccatgcaccccagcacccctgtgacagcccagctgtgtgcccaggtgcaggaggacaccatcaaggtggccgtggacaggagctgtgacatcggcaactttgagctgctgtggaggcagcctgtggtggagcccccacccttcagcggcagtgacctgtgtgtggccggcgtgtctgtgcggcgggcccggcggcaggtgctgcctgtgtgcaacctgaaggccagcgccagcctgctggatgcccagcccctgaaggcccggggccccagcgccatgccagaccctgcccagggcccccccagccctgccctgcagagggacctgggcctgaaggaggagaagggcctgcccctggccctgctggcccccctgcggggagctgctgagagcggcggggccgcccagcccaccaggaccaaggccgccggcaaggtggagctgcctgcctgcccctgccgccacgtggacagccaggcccccaacacaggagtgcctgtggcccagcctgccaagtcctgggaccccaaccagctgaatgcccaccccctggagcctgtgctgcggggcctgaagacagctgagggcgccctgcggcccccacctgggggcaagggggagggcaccgtgtgcagccggctgccccaccacggccaccacgtggccgcctgccagaccaccggcaccacctgggatggcggccctggggtgtgcttcctgcggcagctgctggccagcgagctgcccatgggccctggcctgccccgggacccccgggccccaccctgcctggtgtgccggggcctgctgcccccagctggcccctgcaagcgctgccgctccttctgtgccgctgtgctgcagggcgccagctttgtgcggctgggcggccgcagctgcagccccaggaccccctag

SEQ ID NO: 21218 - DNA, 2739 bp, synthetic construct
  source 1..2739: mol_type = other DNA; note = Synthetic coding sequence
atgaagaggggcatccggcgggaccccttcaggaagaggaagctgggcggccgggccaagaaggtgcgggagcccacagctgtgaacagcttctaccgggaggccagcctgcccagcgtgtgggccagcctgcggcggcgggagatggtgcgcagcggggcccggcccggccaggtgctgagcagcggccgccacacaggccctgccaagctgaccaacgggaagaaggccacctacctgaggaagatcccccgcttcaatgctgacagcggctacagcatccacagcgacagcgagagccaggccgagaccgtgcacggcctggatggctgtgccagcctgctgcgggacatcctgagaaatgaagacagcgccagcagtgacaacaagaagcagatccccaatgaggccagcgcccggtctgagcgggacaccagtgacctggagcagaactggagcctgcaggaccactacaggatgtacagccccatcatctaccaggccctgtgtgagcacgtgcagacccagatgagcctgatgaatgacctgaccagcaagaacatccccaacggcatcccagctgtgccctgccacgcccccagccacagcgagagccaggccaccccccacagcagctatggcctgtgcaccagcacccctgtgtggagcctgcagaggcctccctgcccccccaaggtgcacagcgaggtgcagacagatggcaacagccagtttgccagccagggcaagacagtgtctgccacctgcacagatgtgctgagaaattccttcaacaccagccctggggtgccctgcagcctgcccaagacagacatcagcgccatccccaccctgcagcagctgggcctggtgaatggcatcctgccccagcagggcatccacaaggagacagacctgctgaagtgcatccagacctacctgagcctcttccgcagccacggcaaggagacccacctggacagccagacccacaggagccccacccagagccagcctgccttcctggccaccaatgaggagaagtgtgcccgggagcagatccgggaggccaccagcgagaggaaggacctgaacatccacgtgcgggacaccaagacagtgaaggatgtgcagaaggccaagaatgtgaacaagacagctgagaaggtgcgcatcatcaagtacctgctgggggagctgaaggccctggtggccgagcaggaggacagcgagatccagaggctcatcacagagatggaggcctgcatctctgtgctgcccaccgtgtctggcaacacagacatccaggtggagatcgccctggccatgcagcccctgcggagtgaaaatgcccagctgcggcggcagctgcgcatcctgaaccagcagctgcgggagcagcagaagacccagaagcccagcggggctgtggactgcaacctggagctgttcagcctgcagagcctgaacatgagcctgcagaaccagctggaggagagcctgaagagccaggagctgctgcagagcaagaatgaggagctgctgaaggtgattgagaaccagaaggatgagaacaagaagttcagcagcatcttcaaggacaaggaccagaccatcctggagaacaagcagcagtatgacatcgagatcacccgcatcaagattgagctggaggaggccctggtgaatgtgaagagcagccagttcaagctggagacagctgagaaggagaaccagatcctgggcatcaccctgcggcagagagatgctgaggtgacccggctgcgggagctgaccaggaccctgcagacctccatggccaagctgctgagtgacctgtctgtggacagcgcccgctgcaagccaggcaacaacctgaccaagagcctgctgaacatccatgacaagcagctgcagcacgaccctgccccagcccacaccagcatcatgagctacctgaacaagctggagaccaactacagcttcacccacagcgagcccctgagcaccatcaagaatgaggagaccattgaaccagacaagacctatgaaaatgtgctgagcagccggggcccccagaacagcaacacccggggcatggaggaggccagcgcccctggcatcatcagcgccctgagcaagcaggacagtgatgagggcagcgagaccatggccctgattgaagatgagcacaacctggacaacaccatctacatcccctttgcccggagcaccccagagaagaagagccccctgagcaagaggctgagcccccagccccagatccgggccgccaccacccagctggtgagcaacagcggcctggccgtgtctgggaaggagaacaagctgtgcacccctgtgatctgcagcagcagcaccaaggaggccgaggatgcccctgagaagctgagccgggccagtgacatgaaggacacccagctgctgaagaagatcaaggaggccatcggcaagatcccagctgccaccaaggagcctgaggagcagacagcctgccacggccccagcggctgcctgagcaacagcctgcaggtgaagggcaacacagtgtgtgatggctctgtgttcaccagtgacctgatgtctgactggagcatcagcagcttcagcaccttcaccagcagagatgagcaggacttcagaaatggcctggccgccctggatgccaacatcgcccggctgcagaagagcctgaggacaggcctgctggagaagtag

SEQ ID NO: 21219 - DNA, 528 bp, synthetic construct
  source 1..528: mol_type = other DNA; note = Synthetic coding sequence
atggagctgaccatcttcatcctgcggctggccatctacatcctgaccttccccctgtacctgctgaacttcctgggcctgtggagctggatctgcaagaagtggttcccctacttcctggtgcgcttcaccgtcatctacaatgagcagatggccagcaagaagcgggagctgttcagcaacctgcaggagtttgctggccccagcggcaagctgagcctgctggaggtgggctgcggcactggagccaacttcaagttctacccacctggctgccgggtgctgcggcctggaggagccttctacttcatggagcacgtggccgctgagtgcagcacctggaactacttctggcagcaggtgctggaccctgcctggcacctgctgtttgatggctgcaacctgacccgggagagctggaaggccctggagcgggccagcttcagcaagctgaagctgcagcacatccaggcccccctgtcctgggagctggtgcggccccacatctacggctatgctgtgaagtag

SEQ ID NO: 21220 - DNA, 1392 bp, synthetic construct
  source 1..1392: mol_type = other DNA; note = Synthetic coding sequence
atgtctgggggcaccccctacatcggcagcaagatcagcctcatcagcaaggccgagatccgctatgagggcatcctgtacaccatcgacacagagaacagcacagtggccctggccaaggtgcgcagctttggaacagaagatcggcccacagaccggcccatccccccaagagatgaggtgtttgagtacatcatcttccggggcagtgacatcaaggacctgactgtgtgtgagccccccaagccccagtgcagcctgccccaggaccctgccatcgtgcagagcagcctgggcagcagcaccagcagcttccagagcatgggcagctatggccccttcggccgcatgcccacctacagccagttcagccccagcagcctggtgggccagcagtttggagctgtgggcgtggccggcagcagcctgaccagctttggaacagagaccagcaacagcggcaccctgccccagagcagcgctgtgggcagcgccttcacccaggacaccaggagcctgaagacccagctgagccagggccgcagcagcccccagctggaccccctgaggaagagccccaccatggagcaggccgtgcagacagccagcgcccacctgcctgccccagctgctgtgggccgccgcagccctgtgtccacccggcccctgcccagcgccagccagaaggccggggagaaccaggagcacagaagagctgaggtgcacaaggtgtccaggccagaaaatgagcagctgagaaatgacaacaagaggcaggtggcccctggggcccccagcgccccccggcggggccggggcggccacagaggaggccggggccgcttcggcatcagaagagatggccccatgaagtttgagaaggactttgattttgagagcgccaatgcccagttcaacaaggaggagattgaccgggagttccacaacaagctgaagctgaaggaggacaagctggagaagcaggagaagcctgtgaatggagaagataaaggagacagcggcgtggacacccagaacagcgagggcaatgctgatgaggaggaccccctgggccccaactgctactatgacaagaccaagagcttctttgacaacatcagctgtgatgacaaccgggagcggcggcccacctgggccgaggagcggcggctgaatgctgagaccttcggcatccccctgcggcccaacagaggccggggcggctaccggggccggggcggcctgggcttccggggcggccggggccggggcggcggccggggcggcaccttcaccgccccccggggcttccggggcggcttccggggcggccggggcggccgggagtttgctgactttgagtacaggaagaccacagccttcggcccctag

SEQ ID NO: 21221 - DNA, 2790 bp, synthetic construct
  source 1..2790: mol_type = other DNA; note = Synthetic coding sequence
atggccgaggtggaggccgtgcagctgaaggaggagggcaacagacacttccagctgcaggactacaaggccgccaccaacagctacagccaggccctgaagctgaccaaggacaaggccctgctggccaccctgtacagaaacagagctgcctgtggcctgaagacagagagctatgtgcaggccgccagtgatgccagccgggccatcgacatcaacagcagtgacatcaaggccctgtaccgccgctgccaggccctggagcacctgggcaagctggaccaggccttcaaggatgtgcagagatgtgccaccctggagcccaggaaccagaacttccaggagatgctgcggcggctgaacaccagcatccaggagaagctgcgggtgcagttcagcacagacagccgggtgcagaagatgtttgagatcctgctggatgagaacagcgaggccgacaagcgggagaaggccgccaacaacctgattgtgctgggccgggaggaggccggggctgagaagatcttccagaacaatggagtggccctgctgctgcagctgctggacaccaagaagccagagctggtgctggccgctgtgaggaccctgagcggcatgtgcagcggccaccaggcccgggccaccgtcatcctgcatgctgtgagaattgaccgcatctgcagcctgatggctgtggagaatgaggagatgagcctggccgtgtgcaacctgctgcaggccatcatcgacagcctgtctggagaggacaagcgggagcaccggggcaaggaggaggccctggtgctggacaccaagaaggacctgaagcagatcaccagccacctgctggacatgctggtgtccaagaaggtgtctggccagggccgggaccaggccctgaacctgctgaacaagaatgtgcccaggaaggacctggccatccatgacaacagcaggaccatctacgtggtggacaatggcctgaggaagatcctgaaggtggtgggccaggtgcctgacctgcccagctgcctgcccctgacagacaacaccaggatgctggccagcatcctgatcaacaagctgtatgatgacctgcgctgtgaccctgagcgggaccacttcaggaagatctgtgaggagtacatcaccgggaagtttgacccccaggacatggacaagaacctgaatgccatccagacagtgtctggcatcctgcagggcccctttgacctgggcaaccagctgctgggcctgaagggcgtgatggagatgatggtggccctgtgtggcagcgagcgggagacagaccagctggtggccgtggaggccctgattcatgccagcaccaagctgagccgggccaccttcatcatcaccaatggagtgtccctgctgaagcagatctacaagaccaccaagaatgagaagatcaagatccgcaccctggtgggcctgtgcaagctgggcagcgctgggggcacagattatggcctgcggcagtttgctgagggcagcacagagaagctggccaagcagtgcaggaagtggctgtgcaacatgagcattgacaccaggacccggcgctgggccgtggagggcctggcctacctgaccctggatgctgatgtgaaggatgactttgtgcaggatgtgcctgccctgcaggccatgtttgagctggccaagaccagtgacaagaccatcctgtacagcgtggccaccaccctggtgaactgcaccaacagctatgatgtgaaggaggtgattcctgagctggtgcagctggccaagttcagcaagcagcacgtgcctgaggagcaccccaaggacaagaaggacttcatcgacatgagggtgaagaggctgctgaaggccggggtcatcagcgccctggcctgcatggtgaaggctgacagcgccatcctgacagaccagaccaaggagctgctggcccgggtcttcctggccctgtgtgacaaccccaaggaccggggcaccatcgtggcccagggcggcggcaaggccctgatccccctggccctggagggcacagatgtgggcaaggtgaaggccgcccacgccctggccaagattgctgctgtgagcaacccagacatcgccttccctggagagcgggtgtatgaggtggtgcggcccctggtgcggctgctggacacccagagagatggcctgcagaactatgaggccctgctgggcctgaccaacctgagcggccgcagtgacaagctgcggcagaagatcttcaaggagcgggccctgcctgacatcgagaactacatgtttgagaaccacgaccagctgcggcaggccgccacagagtgcatgtgcaacatggtgctgcacaaggaggtgcaggagcgcttcctggctgatggaaatgaccggctgaagctggtggtgctgctgtgtggagaagatgatgacaaggtgcagaatgctgctgctggggccctggccatgctgacagctgcccacaagaagctgtgcctgaagatgacccaggtgaccacccagtggctggagatcctgcagaggctgtgcctgcatgaccagctgtctgtgcagcaccggggcctggtgattgcctacaacctgctggccgcagatgctgagctggccaagaagctggtggagagcgagctgctggagatcctgactgtggtgggcaagcaggagccagatgagaagaaggccgaggtggtgcagacagcccgggagtgcctgatcaagtgcatggactatggcttcatcaagcctgtgtcctag

SEQ ID NO: 21222 - DNA, 246 bp, synthetic construct
  source 1..246: mol_type = other DNA; note = Synthetic coding sequence
atgagccactacggcagctactacggcggcctgggctacagctgtggcggctttggaggcctgggctacggctacggctgcggctgcggcagcttctgccggcggggcagcggctgcggctatggaggctacggctacggcagcggctttggaggctacggctacggcagcggctttggaggctacggctacggctgctgccggcccagctacaacggcggctacggcttcagcggcttctactag

SEQ ID NO: 21223 - DNA, 150 bp, synthetic construct
  source 1..150: mol_type = other DNA; note = Synthetic coding sequence
atggaggtgccccggctggaccacgccctgaacagccccaccagcccctgtgaggaggtgatcaagaacctgagcctggaggccatccagctgtgtgacagagatgtggtgtttgaggagctgaccagcaagcagaccaggaagggctag

SEQ ID NO: 21224 - DNA, 498 bp, synthetic construct
  source 1..498: mol_type = other DNA; note = Synthetic coding sequence
atgagccgctacctgcggccccccaacaccagcctgtttgtgagaaatgtggctgatgacaccaggtctgaggacctgcggcgggagtttggccgctatggccccatcgtggatgtgtatgtgcccctggacttctacacccggcggccccggggctttgcctacgtgcagtttgaagatgtgagagatgctgaagatgccctgcacaacctggacaggaagtggatctgtggccggcagatcgagatccagtttgcccagggcgacaggaagacccccaaccagatgaaggccaaggagggcagaaatgtgtacagcagcagccgctatgatgattatgaccgctacagaagaagccgcagccgctcctatgaaagaagaagaagccgcagccgcagctttgactacaactacagaagaagctacagccccaggaagcccaactgctcctggaacacccagtacagcagcgcctactacaccagcaggaagatctag

SEQ ID NO: 21225 - DNA, 1803 bp, synthetic construct; identical to SEQ ID NO: 20162
  source 1..1803: mol_type = other DNA; note = Synthetic coding sequence

SEQ ID NO: 21226 - DNA, 465 bp, synthetic construct
  source 1..465: mol_type = other DNA; note = Synthetic coding sequence
atggtgagcagcgcccagatgggcttcaacctgcaggccctgctggagcagctgagccaggatgagctgagcaagttcaagtacctgatcaccaccttcagcctggcccacgagctgcagaagatcccccacaaggaggtggacaaggcagatggcaagcagctggtggagatcctgaccacccactgtgacagctactgggtggagatggccagcctgcaggtgtttgagaagatgcacaggatggacctgtctgagcgggccaaggatgaggtgcgggaggccgccctgaagagcttcaacaagaggaagcccctgagcctgggcatcaccaggaaggagcggccccccctggatgtggatgagatgctggagcgcttcaagacagaggcccaggccttcacagagaccaagggaaatgtcatctgcctgggcaaggaggtgttcaagggcaagaagccctag

SEQ ID NO: 21227 - DNA, 474 bp, synthetic construct; identical to SEQ ID NO: 20844
  source 1..474: mol_type = other DNA; note = Synthetic coding sequence

SEQ ID NO: 21228 - DNA, 348 bp, synthetic construct; identical to SEQ ID NO: 20824
  source 1..348: mol_type = other DNA; note = Synthetic coding sequence

SEQ ID NO: 21229 - DNA, 432 bp, synthetic construct
  source 1..432: mol_type = other DNA; note = Synthetic coding sequence
gtgcgggagctggaggccgagctggatgctgagcagaagaagcacgccgaggccctgaagggcgtgaggaagcatgaaagaagagtgaaggagctggcctaccaggtgggggacagagtgtccctgggcagcggccctggggccggccctgcccaggccagccctgagagccccctgcctgcccaggccgaggaggacaggaagaacctggccaggatgcaggacctggtggacaagctgcagagcaaggtgaagagctacaagaggcagtttgaggaggccgagcagcaggccaacaccaacctggccaagtacaggaaggcccagcacgagctggatgatgctgaggagagagctgacatggccgagacccaggccaacaagctgcgggcccggaccagagatgccctgggccccaagcacaaggagtag

SEQ ID NO: 21230 - DNA, 828 bp, synthetic construct; identical to SEQ ID NO: 19333
  source 1..828: mol_type = other DNA; note = Synthetic coding sequence

SEQ ID NO: 21231 - DNA, 339 bp, synthetic construct
  source 1..339: mol_type = other DNA; note = Synthetic coding sequence
tgatgtgccaggacagctgggggctgcctgggctgcctgagcggccagtgctgctgccgcctgtgccccctgaccctgcctgccaccaggagcctgtgccccggccgggtggtgtgggcccggcggcgctggtggcccagctggctggcctggcgctgcctgtggtgcaccacccggcccccagcctgcatggagaacacagatgccttcctgttcctgttctccttcacagaccgggccagctttgaggacctgcccggccagctggccagaattgctggggaggcccctggggtggtgaggatggtgattggcagcaagtttgaccagtacatgtag

SEQ ID NO: 21232 - DNA, 3330 bp, synthetic construct
  source 1..3330: mol_type = other DNA; note = Synthetic coding sequence
atgggcactggagacttcatctgcatctccatgactggaggagccccctggggcttccggctgcagggcggcaaggagcagaagcagcccctgcaggtggccaagatccggaaccagagcaaggccagcggcagcggcctgtgtgaaggagatgaggtggtgtccatcaatggaaacccctgtgccgacctgacctacccagaggtgatcaagctgatggagagcatcacagacagcctgcagatgctgatcaagaggcccagcagcggcatcagcgaggccctgatcagtgaaaatgaaaacaagaacctggagcacctgacccatggaggctacgtggagagcaccaccctgcagatccggcctgccaccaagacccagtgcacagagttcttcctggcccctgtgaagacagaggtgcccctggccgagaaccagaggagcggccctgactgtgccggcagcctgaaggaggagaccggccccagctaccagagggccccccagatgccagacagccagaggggccgggtggccgaggagctgatcctgcgggagaaggtggaggccgtgcagcccggccctgtggtggagctgcagctgagcctgagccaggagcggcacaagggggccagcggccccctggtggccctgcctggagctgagaagagcaagagcccagaccctgaccccaacctgagccatgaccgcatcgtgcacatcaacagcatccccaccaatgagaaggctgaccccttcctgcggagcagcaagatcatccagatcagcagcggccgggagctgcgggtcatccaggagagcgaggccggagatgctggcctgccccgggtggaggtgatcctggactgcagcgaccggcagaagacagagggctgccgcctgcaggccggcaaggaatgtgtggacagccctgtggagggcggccagagcgaggccccacccagcctggtgtcctttgctgtgagcagcgagggcacagagcagggcgaggaccccaggtctgagaaggaccacagccggccccacaagcaccgggcccggcatgcccggctgcggcgctctgagagcctgtctgagaagcaggtgaaggaggccaagagcaagtgcaagagcatcgccctgctgctgacagatgcccccaaccccaacagcaagggcgtgctgatgttcaagaagagaagaagaagagccaggaagtacaccctggtgtcctatggcaccggggagctggagcgggaggctgatgaggaggaggagggggacaaggaggacacctgtgaggtggccttcctgggcgccagcgagagcgaggtggatgaggagctgctgagtgatgtggatgacaacacccaggtggtgaactttgactgggacagcggcctggtggacatcgagaagaagctgaacagaggagacaagatggagatgctgcctgacaccaccgggaagggggccctgatgtttgccaagaggcgggagaggatggaccagatcacagcccagaaggaggaggacaaggtgggcggcacccccagccgggagcaggatgctgcccagacagatggcctgcggaccaccaccagctaccagaggaaggaggaggagagcgtgaggacccagagctctgtgtccaagagctacatcgaggtgagccacggcctgggccacgtgccccagcagaatggcttcagcggcaccagcgagacagccaacatccagaggatggtgcccatgaacagaacagccaagcccttccctggctctgtgaaccagcctgccacccccttcagccccaccaggaacatgaccagccccatcgctgacttccctgcccccccaccctacagcgctgtgaccccacctccagatgccttcagcagaggagtgagcagccccatcgccggccctgcccagcccccaccctggccccagcctgccccctggagccagcctgccttctatgacagcagcgagagaattgccagcagagatgagcgcatctctgtgcctgccaagaggacaggcatcctgcaggaggccaagagaagaagcaccaccaagcccatgttcaccttcaaggagcccaaggtgagccccaaccctgagctgctgagcctgctgcagaacagcgagggcaagaggggcactggagctggaggagacagcggccctgaggaggactacctgagcctgggcgctgaggcctgcaacttcatgcagagcagcagcgccaagcagaagaccccacctcctgtggcccccaagccagctgtgaagagcagcagcagccagcctgtgacccctgtgtcccctgtgtggagccctggggtggcccccacccagcccccagccttccccaccagcaaccccagcaaaggaacagtggtgagcagcatcaagatcgcccagcccagctaccccccagcccggcctgccagcaccctgaatgtggccggccccttcaagggcccccaggccgctgtggccagccagaactacacccccaagcccaccgtgtccacccccaccgtgaatgctgtgcagcccggggctgtgggccccagcaatgagctgcccggcatgagcggccgcggggcccagctgtttgccaagaggcagagcaggatggagaagtatgtggtggacagcgacacagtgcaggcccatgctgcccgggcccagagccccacccccagcctgcctgcctcctggaagtacagcagcaatgtgcgggcccctcctcctgtggcctacaaccccatccacagccccagctaccccctggccgccctgaagagccagcccagcgctgcccagcccagcaagatgggcaagaagaagggcaagaagcccctgaatgccctggatgtgatgaagcaccagccctaccagctgaatgccagcctcttcaccttccagcccccagatgccaaggatggcctgccccagaagagctctgtgaaggtgaacagcgccctggccatgaagcaggccctgccccccaggcctgtgaatgctgccagccccaccaacgtgcaggccagctctgtgtacagcgtgcctgcctacaccagccccccatccttctttgctgaggccagcagccctgtgtctgccagccctgtgcctgtgggcatccccaccagccccaagcaggagagcgccagcagcagctactttgtggccccccggcccaagttcagcgccaagaagtctggagtgaccatccaggtgaagtgcaagagcggcatccacagccaggacatcatccgcacctacttccctgcctacctgagcagcagcacctag

SEQ ID NO: 21233 - DNA, 1554 bp, synthetic construct; identical to SEQ ID NO: 18881
  source 1..1554: mol_type = other DNA; note = Synthetic coding sequence

SEQ ID NO: 21234 - DNA, 348 bp, synthetic construct; identical to SEQ ID NO: 20824
  source 1..348: mol_type = other DNA; note = Synthetic coding sequence

SEQ ID NO: 21235 - DNA, 1014 bp, synthetic construct
  source 1..1014: mol_type = other DNA; note = Synthetic coding sequence
atggagctgaagaccctgtgggagaacaagctgatgcagagcagagctgtggatggcttccacagcgaggagcagcagctgctgctgcaggtgcagcagcagcaccagccccagcagcagcagcaccaccaccaccaccaccaccagcaggcccagccccagcagacagtgccccagcaggcccagacccagcaggtgctgatcccagccagccagcaggccacagccccccaggtgattgtgcctgacagcaagctgatccagcacatgaatgccagcaacatgtctgctgctgccacagctgccaccctggccctgcctgctggggtgacccctgtgcagcagatcctgaccaacagcggccagctgctgcaggtggtgcgggccgccaatggagcccagtacatcttccagccccagcagagcgtggtgctgcagcagcaggtgatcccccagatgcagcctggaggagtgcaggcccctgtgatccagcaggtgctggcccccctgcccggcggcatcagcccccagacaggagtcatcatccagccccagcagatcctcttcaccggcaacaagacccaggtgatccccaccaccgtggccgcccccaccccagcccaggcccagatcacagccaccggccagcagcagccccaggcccagcctgcccagacccaggcccccctggtgctgcaggtggatggcactggagacaccagcagcgaggaggatgaagatgaggaggaggactatgatgatgatgaggaggaggacaaggagaaggatggagcagaagatggccaggtggaggaggagcccctgaacagtgaagatgatgtgtctgatgaggagggccaggagctgtttgacacagaaaatgtggtggtgtgccagtatgacaagatccacaggagcaagaacaagtggaagttccacctgaaggatggcatcatgaacctgaatggccgggactacatcttcagcaaggccatcggagatgctgagtggtag

SEQ ID NO: 21236 - DNA, 3012 bp, synthetic construct
  source 1..3012: mol_type = other DNA; note = Synthetic coding sequence
atgagccagtggaccccagagtacaatgagctgtacaccctgaaggtggacatgaagtctgagatccccagtgatgcccccaagacccaggagagcctgaagggcatcctgctgcaccctgagcccatcggggccgccaagagcttccctgctggggtggagatgatcaacagcaaggtgggcaatgagttcagccacctgtgtgatgacagccagaagcaggagaaggagatgaatggaaaccagcaggagcaggagaagagcctggtggtgaggaagaagaggaagagccagcaggccggccccagctatgtgcagaactgtgtgaaggagaaccagggcatcctgggcctgcggcagcacctgggcacccccagtgatgaggacaatgacagcagcttcagtgactgcctgagcagccccagcagcagcctgcactttggagacagcgacacagtgaccagtgatgaggacaaggaggtgtctgtgcgccacagccagaccatcctgaatgccaagagccgcagccacagcgcccggagccacaagtggcccaggacagaaacagaatctgtgtctggcctgctgatgaagaggccctgcctgcacggcagcagcctgcggcggctgccctgcaggaagagatttgtgaagaacaacagcagccagaggacccagaagcagaaggagcgcatcctgatgcagaggaagaagcgggaggtgctggcccggaggaaatatgccctgctgcccagcagcagcagcagcagtgaaaatgacctgagcagcgagagcagcagcagcagcagcacagaaggagaggaggacctgtttgtgtctgccagcgagaaccaccagaacaacccagctgtgcccagcggcagcattgatgaagatgtggtggtgattgaggccagcagcaccccccaggtgacagccaatgaggagatcaacgtgaccagcacagacagcgaggtggagatcgtgacagtgggggagagctaccgcagccgcagcaccctgggccacagccgcagccactggagccagggcagcagcagccacgccagccggccccaggagcccaggaacagaagccgcatcagcaccgtcatccagcccctgcggcagaatgctgctgaggtggtggacctgactgtggatgaagatgagcccaccgtggtgcccaccaccagcgccaggatggagagccaggccaccagcgccagcatcaacaacagcaaccccagcaccagcgagcaggccagtgacacagccagcgctgtgaccagcagccagcccagcacagtgtctgagaccagcgccaccctgaccagcaacagcaccaccggcaccagcattggagatgacagcaggaggaccaccagcagcgctgtgacagaaacaggccccccagccatgccccggctgcccagctgctgcccccagcacagcccctgtggcggcagcagccagaaccaccacgccctgggccacccccacaccagctgcttccagcagcacggccaccacttccagcaccaccaccaccaccaccacaccccccaccctgctgtgcctgtgagccccagcttcagtgaccctgcctgccctgtggagcggcccccccaggtgcaggccccctgtggggccaacagcagcagcggcaccagctaccacgagcagcaggccctgcctgtggacctgagcaacagcggcatccgcagccacggcagcggcagcttccatggagccagcgcctttgacccctgctgccctgtgagcagcagcagagctgccatcttcggccaccaggccgctgctgctgcccccagccagcccctgagcagcattgatggctacggcagctccatggtggcccagccccagccccagcccccaccccagcccagcctgagcagctgccgccactacatgcccccaccctatgccagcctgacccggcccctgcaccaccaggccagcgcctgcccccacagccacggcaaccccccaccccagacccagcccccaccccaggtggactatgtgatcccccaccctgtgcacgccttccacagccagatcagcagccacgccaccagccaccctgtggcccctcctccacccacccacctggccagcacagctgcccccatcccccagcacctgccccccacccaccagcccatcagccaccacatcccagccacagcccccccagcccagaggctgcacccccatgaggtgatgcagaggatggaggtgcagaggaggaggatgatgcagcaccccaccggcctgtttgtgttctgtgtgtccagaagagcccacgagcggcccccaccccacccccacaggatgcaccccaactacggccacggccaccacatccacgtgccccagaccatgagcagccacccccggcaggcccctgagaggtctgcctgggagctgggcattgaagctggggtgacagctgccacctacacccctggggccctgcacccccacctggcccactaccacgccccaccccggctgcaccacctgcagctgggcgccctgcccctgatggtgcctgacatggccggctacccccacatccgctacatcagcagcggcctggatggcaccagcttccggggccccttccggggcaactttgaggagctgatccacctggaggagcggctgggcaatgtgaacagaggagccagccagggcaccatcgagcgctgcacctacccccacaagtacaagaaggtgaccacagactggttcagccagaggaagctgcactgcaagcaggatggagaggagggcacagaggaggacacagaggagaagtgcaccatctgcctgagcatcctggaggagggggaggatgtgcggcggctgccctgcatgcacctgttccaccaggtgtgtgtggaccagtggctgatcaccaacaagaagtgccccatctgccgggtggacatcgaggcccagctgcccagcgagagctag

SEQ ID NO: 21237 - DNA, 3309 bp, synthetic construct
  source 1..3309: mol_type = other DNA; note = Synthetic coding sequence
atggccgagaaggaggcccggaggaagttcaagcagatcgtgacagctgtgtacttctgccactgcagaaatattgtgcaccgggacctgaaggccgagaacctgctgctggatgccaacctgaacatcaagattgctgactttggcttcagcaacctcttcaccccaggccagctgctgaagacctggtgtggcagccccccctatgctgcccctgagctgtttgagggcaaggagtatgatggccccaaggtggacatctggagcctgggcgtggtgctgtatgtgctggtgtgtggggccctgccctttgatggcagcaccctgcagaacctgcgggcccgggtgctgagcggcaagttccgcatccccttcttcatgagcacagaatgtgagcacctgatccgccacatgctggtgctggaccccaacaagaggctgtccatggagcagatctgcaagcacaagtggatgaagctgggagatgctgaccccaactttgaccggctgattgctgagtgccagcagctgaaggaggagcggcaggtggaccccctgaatgaagatgtgctgctggccatggaggacatgggcctggacaaggagcagaccctgcagagcctgcggagtgatgcctatgaccactacagcgccatctacagcctgctgtgtgacagacacaagaggcacaagaccctgcggctgggcgccctgcccagcatgccccgggccctggccttccaggcccctgtgaacatccaggccgagcaggccggcacagccatgaacatctctgtgccccaggtgcagctgatcaaccctgagaaccagatcgtggagccagatggcaccctgaacctggacagtgatgaaggagaggagcccagccctgaggccctggtgcgctacctgtccatgagaagacacacagtgggcgtggccgaccccaggacagaggtgatggaggacctgcagaagctgctgcccggcttccctggggtgaacccccaggcccccttcctgcaggtggcccccaacgtgaacttcatgcacaacctgctgcccatgcagaacctgcagcccaccggccagctggagtacaaggagcagagcctgctgcagccccccaccctgcagctgctgaatggcatgggccccctgggcagaagagccagtgatggaggagccaacatccagctgcacgcccagcagctgctgaagaggccccggggccccagccccctggtgaccatgaccccagctgtgcctgctgtgacccctgtggatgaggagagcagtgatggagagccagaccaggaggccgtgcagagcagcacctacaaggacagcaacaccctgcacctgcccacagagcgcttcagccctgtgcggcgcttcagtgatggagctgccagcatccaggccttcaaggcccacctggagaagatgggcaacaacagcagcatcaagcagctgcagcaggagtgtgagcagctgcagaagatgtatggaggccagattgatgagaggaccctggagaagacccagcagcagcacatgctgtaccagcaggagcagcaccaccagatcctgcagcagcagatccaggacagcatctgccccccccagcccagcccccccctgcaggccgcctgtgagaaccagcctgccctgctgacccaccagctgcagaggctgcgcatccagcccagcagccccccacccaaccaccccaacaaccacctgttccggcagcccagcaacagccccccacccatgagcagcgccatgatccagccccatggagctgccagcagcagccagttccagggcctgcccagccgcagcgccatcttccagcagcagcctgagaactgcagcagccccccaaatgtggccctgacctgcctgggcatgcagcagcctgcccagagccagcaggtgaccatccaggtgcaggagcctgtggacatgctgagcaacatgcctggaacagctgctggcagcagcggccggggcatcagcatcagccccagcgctggccagatgcagatgcagcacaggaccaacctgatggccaccctgtcctatggccaccggcccctgagcaagcagctgtctgctgacagcgctgaggcccacagcgcccaccagcagcccccccactacaccaccagcgccctgcagcaggccctgctgagccccaccccaccagactacaccaggcaccagcaggtgccccacatcctgcagggcctgctgagccccaggcacagcctgaccggccacagcgacatccggctgcccccaacagaatttgcccagctgatcaagaggcagcagcagcagaggcagcagcagcagcagcagcagcagcagcaggagtaccaggagctgttccgccacatgaaccagggagatgctggcagcctggcccccagcctgggcggccagagcatgacagagcggcaggccctgagctaccagaatgctgacagctaccaccaccacaccagcccccagcacctgctgcagatccgggcccaggagtgtgtgtcccaggccagcagccccaccccaccccacggctacgcccaccagcctgccctgatgcacagcgagagcatggaggaggactgcagctgtgagggcgccaaggatggcttccaggacagcaagagcagcagcaccctgaccaagggctgccacgacagccccctgctgctgagcactggaggccctggggaccctgagagcctgctgggcaccgtgagccacgcccaggagctgggcatccacccctacggccaccagcccacagctgccttcagcaagaacaaggtgcccagccgggagcctgtgattggcaactgcatggacaggagcagccctggccaggccgtggagctgcctgaccacaacggcctgggctacccagcccggcccagcgtgcatgagcaccaccggccccgggccctgcagaggcaccacaccatccagaacagtgatgatgcctacgtgcagctggacaacctgcccggcatgagcctggtggccggcaaggccctgagcagcgccaggatgtctgatgctgtgctgagccagagcagcctgatgggcagccagcagttccaggatggagaaaatgaagaatgtggggccagcctgggcggccacgagcacccagacctgagtgatggcagccagcacctgaacagcagctgctaccccagcacctgcatcacagacatcctgctgagctacaagcaccctgaggtgtccttctccatggagcaggccggcgtgtag

SEQ ID NO: 21238 - DNA, 1461 bp, synthetic construct
  source 1..1461: mol_type = other DNA; note = Synthetic coding sequence
atgaccctgatggtgctgaccttcagcagctacatcctggacttcatcaacgtgctgtcctatgacctgcacggctcctgggagcgcttcaccggccacaacagccccctcttcagcctgcctgaggaccccaagagcagcgcctatgccatgaactactggaggaagctgggcgcccccagcgagaagctgatcatgggcatccccacctacggccgcaccttccggctgctgaaggccagcaagaatggcctgcaggcccgggccatcggccctgccagccctgggaagtacaccaagcaggagggcttcctggcctactttgagatctgcagctttgtgtggggcgccaagaagcactggattgactaccagtatgtgccctatgccaacaagggcaaggagtgggtgggctatgacaatgccatctccttctcctacaaggcctggttcatcagaagagagcactttggaggagccatggtgtggaccctggacatggatgatgtgcggggcaccttctgtggcaccggccccttccccctggtgtatgtgctgaatgacatcctggtgcgggcagagttcagcagcaccagcctgccccagttctggctgagcagcgctgtgaacagcagcagcacagatcctgagcggctggccgtgaccacagcctggaccacagacagcaagatcctgcccccaggaggagaggccggcgtgacagagatccacggcaaatgtgagaacatgaccatcaccccccggggcaccaccgtgacccccaccaaggagaccgtgtccctgggcaagcacacagtggccctgggggagaagacagagatcaccggggccatgaccatgacctctgtgggccaccagagcatgaccccaggagagaaggccctgacccctgtgggccaccagagcgtgaccaccggccagaagaccctgacctctgtgggctaccagagcgtgaccccaggagagaagaccctgacccctgtgggccaccagagcgtgacccctgtgagccaccagagcgtgtcccctgggggcaccaccatgacccctgtgcacttccagacagagaccctgcggcagaacacagtggcccccaggaggaaggctgtggcccgggagaaggtgacagtgcccagcaggaacatctctgtgaccccagagggccagaccatgcccctgcggggggagaacctgaccagcgaggtgggcacccaccccaggatgggcaacctgggcctgcagatggaggctgaaaataggatgatgctgagcagcagccctgtgatccagctgcctgagcagacccccctggcctttgacaacagatttgtgcccatctacggcaaccacagctctgtgaacagcgtgaccccccagaccagccccctgagcctgaagaaggagatccctgagaacagcgctgtggatgaggaggcctag

SEQ ID NO: 21239 - DNA, 1017 bp, synthetic construct
  source 1..1017: mol_type = other DNA; note = Synthetic coding sequence
atggagctgtggggccgcatgctgtgggccctgctgagcggccctggaagaagaggcagcacccggggctgggccttcagctcctggcagccccagccccccctggccggcctgagcagcgccatcgagctggtgagccactggacaggagtgtttgagaagaggggcatccctgaggcccgggagagcagcgagtacatcgtggcccacgtgctgggcgccaagaccttccagagcctgcggcctgccctgtggacccagcccctgaccagccagcagctgcagtgcatccgggagctgagcagccggcggctgcagaggatgcctgtgcagtacatcctgggggagtgggacttccagggcctgagcctgaggatggtgccccctgtgttcatccccaggcctgagacagaggagctggtggagtgggtgctggaggaggtggcccagaggagccatgctgtgggcagccctggcagccccctcatcctggaggtgggctgcggcagcggggccatcagcctgagcctgctgagccagctgccccagagccgggtgattgctgtggacaagcgggaggccgccatcagcctgacccatgaaaatgcccagaggctgcggctgcaggaccgcatctggatcatccacctggacatgaccagcgagaggtcctggacccacctgccctggggccccatggacctgattgtgagcaaccccccctacgtgttccaccaggacatggagcagctggcccctgagatccgctcctatgaagatcctgctgccctggatggaggagaggagggcatggacatcatcacccacatcctggccctggccccccggctgctgaaggacagcggcagcatcttcctggaggtggaccccaggcaccctgagctggtgtcctcctggctgcagagcaggccagacctgtacctgaacctggtggccgtgagaagagacttctgtggccggccccgcttcctgcacatccgccgcagcggcccctag

SEQ ID NO: 21240 - DNA, 1899 bp, synthetic construct; identical to SEQ ID NO: 18887
  source 1..1899: mol_type = other DNA; note = Synthetic coding sequence

SEQ ID NO: 21241 - DNA, 1791 bp, synthetic construct
  source 1..1791: mol_type = other DNA; note = Synthetic coding sequence
atgagcaaccagcaggagaagtatgaggcccagaacatcgtgaacagcacagaggagagtgatgatgcctttgacacagtgaccatccctgtgcccagcgaggagccccaggagagtgaccagacagaggagcatgaaagtggcatcgagcagttcagcgagagccacgccatccacgtggaggagcagagcgaccagagcttcagcagcctggagccagacaatgagcagctgatggaggaggtgatcagcccccggcaggtgtcctacaccccccagcaccacgagaagcagtatgccatgcagaggcccaatgatgacagcctggccttcctggacaagatcaagtctgtgaaggagagcctgcaggagagcgtggaggacagcctggccaccgtgaaggtggtgctgatccctgtgggccaggagatcgtcatccccttcaaggtggacaccatcctgaagtacctgaaggaccacttcagccacctgctgggcatcccccacagcgtgctgcagatccgctacagcggcaagatcctgaagaacaatgagaccctggtgcagcacggcgtgaagccccaggagatcgtgcaggtggagatcttcagcaccaacccagacctgtaccctgtgagaagaattgatggcctgacagatgtgtcccagatcatcaccgtgacagtgcagacaggcctggaccagtaccagcaggtgcctgtggagatcgtgaagagtgacttccacaagcccttcctgggcggcttccgccacaaggtgactggagtggagtaccacaatgccggcacccagacagtgcccaagagaattcctgagcggctgagcatcttctgccgggacacccagaccgtcttccagaagaagaacctgcagcagaccaccaacaccaccagcacccagatgaccaacattggagtgtatgtgagcaacatgacagacaagctggtgaccccaggcaagtacttctctgctgctgagtaccacgcccagaggctgaaggctgtgattgtcatccagacctactaccggcagtggcacgccaagatctttgtggagaacctgcggcggcagaagagcctgcggctggagtgggagacccagcaggagctgaggaagatccgggagaaggaggagtggatcaagctggactaccacagaagacacaaccccaagaccaatgaagattttgagttcctgtacaatgccctggagttctggaggcaggaggagctgacccgcatcaaccagagcttcaccggggctgagaggaaggccgccctgtgtgagctgctggagaaggagacccagatcatcgccagcatcggccgccaccgctacatcgcctacatggccaaccaggaggccgccatccaggccttcctggacaagtgcagcgcccccaagatctggaggaccccaaatggcaagaccatcgagatggacacccagttcaccatccgggcccgggagctgcagaacatctacaagtgcatcatgctgaagaacatcagccaggatgagcggctggatgtgctgctgaccctgaagcacacagtgaaggagcacgagtgcaagctgacccaggagatcctggagctgattgaccgggaggtggacctgatgatgagaggagtgaagcaccacaacctggagggcctgaggaagagaattgccaccctcttcttccactacatcaagacccccctcttcaaccctgaggtggccaagtacctgaagatgggcggggagtacctgtccatggccctgtag

SEQ ID NO: 21242 - DNA, 1305 bp, synthetic construct
  source 1..1305: mol_type = other DNA; note = Synthetic coding sequence
atggtgcaggacggcaccttcaagacccgggacagcacctggacctgtgagagcaccaggatggctgctgcccctccttcctactgctttgtggccttccccccccgggccaaggatggcctggtggtgtttgggaagaacagcgcccggcccagagatgaggtgcaggaggtggtgtacttctctgctgctgaccacgagcctgagagcaaggtggagtgcacctacatcagcattgaccaggtgcccaggacctacgccatcatgatcagcaggcctgcctggctgtggggcgctgagatgggcgccaatgagcacggcgtgtgcatcgccaatgaggccatcaacacccgggagcctgctgctgagattgaggccctgctgggcatggacctggtgcggctgggcctggagcggggggagacagccaaggaggccctggatgtgattgtgtccctgctggaggagcacggccagggcggcaactactttgaagatgccaacagctgccacagcttccagagcgcctacctgattgtggacagagatgaggcctgggtgctggagaccatcggcaagtactgggccgctgagaaggtgacagaaggagtgcgctgcatctgcagccagctgagcctgaccaccaagatggatgctgagcaccctgagctgcggagctatgcccagagccagggctggtggacaggagagggggagttcaacttcagcgaggtgttcagccctgtggaggaccacctggactgtggggccggcaaggacagcctggagaagcaggaggagagcatcaccgtgcagaccatgatgaacaccctgcgggacaaggccagcggcgtgtgcattgattctgagttcttcctgaccacagccagcggcgtgtctgtgctgccccagaacagaagcagcccctgcatccactacttcaccggcaccccagaccccagccgcagcatcttcaagcccttcatctttgtggatgatgtgaagctggtgcccaagacccagagcccctgctttggagatgatgatcctgccaagaaggagccccgcttccaggagaagccagacagaagacatgagctgtacaaggcccacgagtgggcccgggccatcatcgagagtgaccaggagcagggcaggaagctgcggagcaccatgctggagctggagaagcagggcctggaggccatggaggagatcctgaccagcagcgagcccctggaccctgctgaggtgggggacctcttctatgactgtgtggacacagagatcaagttcttcaagtag

SEQ ID NO: 21243 - DNA, 1320 bp, synthetic construct
  source 1..1320: mol_type = other DNA; note = Synthetic coding sequence
atggcctggccctgcatcacccgggcctgctgcatcgcccgcttctggaaccagctggacaaggctgacattgctgtgcccctggtgttcaccaagtacagcgaggccacagagcaccctggggccccaccccagcccccaccaccccagcagcaggcccagcctgccctggcccctccttctgcccgggctgtggccatcgagacccagcctgcccagggcgagctggatgctgtggcccgggccactggacctgcccctggccccaccggggagcgggagcctgctgctggccctggccgcagcggccctggccctggcctgggcagcggcagcaccagcggccctgctgacagcgtgatgaggcaggactaccgggcctggaaggtgcagaggcctgagcccagctgccggcccaggtctgagtaccagcccagtgatgccccctttgagcgggagacccagtaccagaaggacttccgggcctggcccctgcccaggagaggagaccacccctggatccccaagcctgtgcagatctctgctgccagccaggccagcgcccccatcctgggcgcccccaagaggcggccccagagccaggagcgctggcctgtgcaggccgctgctgaggcccgggagcaggaggccgcccctggaggagctgggggcctggccgccggcaaggccagcggggctgatgagcgggacaccaggaggaaggccggccctgcctggatcgtgagaagagctgagggcctgggccacgagcagacccccctgcctgctgcccaggcccaggtgcaggccactggacctgaggccggccggggccgggctgctgctgatgccctgaaccggcagatccgggaggaggtggccagcgctgtgagcagcagctacagaaatgagttccgggcctggacagacatcaagcctgtgaagcccatcaaggccaagccccagtacaagcccccagatgacaagatggtgcatgagaccagctacagcgcccagttcaagggggaggccagcaagcccaccacagctgacaacaaggtgattgacagaagacgcatccgcagcctgtacagcgagcccttcaaggagccccccaaggtggagaagcccagcgtgcagagcagcaagcccaagaagaccagcgccagccacaagcccaccaggaaggccaaggacaagcaggccgtgtctggccaggccgccaagaagaagtctgctgagggccccagcaccaccaagccagatgacaaggagcagagcaaggagatgaacaacaagctggccgaggccaaggagtag

SEQ ID NO: 21244 - DNA, 813 bp, synthetic construct
  source 1..813: mol_type = other DNA; note = Synthetic coding sequence
atgggcggctgcttcagcaagcccaagcctgtggagctgaagattgaggtggtgctgcctgagaaggagcggggcaaggaggagctgagcgccagcggcaagggcagcccccgggcctaccagggcaatggaacagcccggcacttccacacagaggagcggctgagcaccccccacccctaccccagcccccaggactgtgtggaggccgctgtgtgccacgtgaaggacctggagaatggccagatgagggaggtggagctgggctggggcaaggtgctgctggtgaaggacaatggagagttccacgccctgggccacaagtgcccccactacggggcccccctggtgaagggcgtgctgagccggggccgggtgcgctgcccctggcatggagcctgcttcaacatcagcactggagacctggaggacttccctggcctggacagcctgcacaagttccaggtgaagattgagaaggagaaggtgtatgtgcgggccagcaagcaggccctgcagctgcagaggaggaccaaggtgatggccaagtgcatcagccccagcgctggctacagcagcagcaccaacgtgctgattgtgggcgctggagctgctggcctggtgtgtgccgagaccctgcggcaggagggcttcagtgaccgcatcgtgctgtgcaccctggacagacacctgccctatgaccggcccaagctgagcaagagcctggacacccagcctgagcagctggccctgcggcccaaggagttcttccgggcctacggcatcgaggtgctgacagaggcccaggtgtag

SEQ ID NO: 21245 - DNA, 369 bp, synthetic construct; identical to SEQ ID NO: 21112
  source 1..369: mol_type = other DNA; note = Synthetic coding sequence

SEQ ID NO: 21246 - DNA, 1269 bp, synthetic construct
  source 1..1269: mol_type = other DNA; note = Synthetic coding sequence
atgacccccagcatccccagcatccggcggctgggcagcggctacttcagcagcaatggcaagctggaggaggtgaagacccccaagaaccctgtgaagaggaaggacctgctgcggcatgaccctgacctgcacatgcaccagggctatgacaagtatgatgtgtctgagttctgcagctacatcaagagcagcagcagcctgggcaatgccaccagtgatgaggaccccaacaccaacatcatgaacatcaatgaaaacaagaacatccccaaggccaagaacaagtctgagagtgaaaatgagcccaaggccggcacagacagccctgtgtcctgtgcctctgtgacagaggagcgggtggccagtgacagccccaagccagccctgaccctgcagcagggccaggagttctctgctgggggccagaatgctgagaacctgtgccagttcttcaagatcagcccagacctgaacatcaagtgtgagaggaaggatgacttcctgggcgctgctgagggcaagctgcagtgcaaccggctgatgcccaacagccagaaggactgccactgcctgggagatgtgctgattgagaacaccaaggagagcaagagccagagcgaggacctgggcaggaagcccatggagagcagctctgtggtgtcctgccgggacaggaaggacagaagaagatccatgtgctacagtgatggccgcagcctgcacctggagaagaatggaaaccacacccccagcagctctgtgggcagctctgtggagatcagcctggagaacagcgagctgttcaaggacctgagtgatgccatcgagcagaccttccagaggagaaattctgagaccaaggtgcggcgcagcacccggctgcagaaggacctggagaatgaaggcctggtgtggatcagcctgcccctgcccagcaccagccagaaggccaagaggaggaccatctgcacctttgacagcagcggctttgagagcatgagccccatcaaggagaccgtgagcagccggcagaagccccagatggcccctcctgtgtctgaccctgagaacagccagggccctgctgctggcagcagtgatgagcccgggaagaggaggaagagcttctgcatcagcaccctggccaacaccaaggccaccagccagttcaagggctacagaagaagaagcagcctgaatggaaaaggagagagcagcctgacagccctggagcgcatcgagcacaatggagagaggaagcagtag

SEQ ID NO: 21247 - DNA, 3336 bp, synthetic construct
  source 1..3336: mol_type = other DNA; note = Synthetic coding sequence
atggtgcgggagaggaagtgcatcctgtgccacatcgtgtacagcagcaagaaggagatggatgagcacatgaggtccatgctgcaccaccgggagctggagaacctgaagggccgcttcggcatcgagatggtgcccctggtgcagaatgagcaggaggccctggacctggatggagagccagacctgagcagcctggagggcttccagtgggagggcgtgtccatcagcagcagccctggcctggccaggaagaggagcctgtctgagagcagcgtcatcatggaccgggcccccagcgtgtacagcttcttcagcgaggagggcaccgggaaggaaaatgagccccagcagatggtgagccccagcaacagcctgcgggccggccagagccagaaggccaccatgcacctgaagcaggaggtgaccccccgggccgccagcctgaggactggagagcgggcagaaaatgtggccacccagaggaggcacagcgcccagctgagcagtgaccacatcatccccctgatgcacctggccaaggacctgaacagccaggagaggagcatccccccatctgagaaccagaacagccaggagagcaatggagagggcaactgcctgagcagcagcgccagcagcgccctggccatcagcagcctggctgatgctgccacagacagcagctgcaccagcggggctgagcagaatgatggccagagcatcaggaagaagaggcgggccactggagatggcagcagccctgagctgcccagcctggagaggaagaacaagaggaggaagatcaagggcaagaaggagaggagccaggtggaccagctgctgaacatcagcctgcgggaggaggagctgagcaagagcctgcagtgcatggacaacaacctgctgcaggcccgggccgccctgcagacagcctacgtggaggtgcagaggctgctgatgctgaagcagcagatcaccatggagatgtctgccctgcggacccaccgcatccagatcctgcagggcctgcaggagacctatgagcccagcgagcacccagaccaggtgccctgcagcctgacccgggagaggaggaacagccgcagccagaccagcattgatgctgccctgctgcccacccccttcttccccctcttcctggagccccccagcagccacgtgagccccagccccaccggggccagcctgcagatcaccaccagccccaccttccagacccacggctctgtgcctgccccagacagctctgtgcagatcaagcaggagcccatgagccctgagcaggatgaaaatgtgaatgctgtgccccccagcagcgcctgcaatgtgtccaaggagctgctggaggccaaccgggagatcagtgacagctgccctgtgtaccctgtgatcacagcccggctgagcctgcctgagagcacagagagcttccacgagcccagccaggagctgaagttctctgtggagcagaggaacaccaggaaccgggagaacagccccagcagccagagcgctggcctgagcagcatcaacaaggagggggaggagcccaccaagggcaacagcggcagcgaggcctgcaccagcagcttcctgcggctgagctttgccagcgagacccccctggagaaggagccccacagccctgctgaccagcctgagcagcaggccgagagcaccctgaccagcgctgagacccggggcagcaagaagaagaagaagctgaggaagaagaagagcctgcgggccgcccacgtgcctgagaacagcgacacagagcaggatgtgctgactgtgaagcctgtgaggaaggtgaaggccggcaagctgatcaagggcggcaaggtgaccaccagcacctgggaggacagcaggacaggccgggagcaggagagcgtgagagatgagccagacagcgacagcagcctggaggtgctggagatccccaacccccagctggaggtggtggccatcgacagcagcgagagcggggaggagaagccagacagccccagcaagaaggacatctggaacagcacagagcagaaccccctggagaccagccgcagcggctgtgatgaggtgagcagcaccagcgagatcggcacccgctacaaggatggcatccctgtgtctgtggccgagacccagaccgtcatcagcagcatcaagggcagcaagaacagcagcgagatcagcagcgagcctggagatgatgatgagcccacagagggcagctttgagggccaccaggccgctgtgaatgccatccagatcttcggcaacctgctgtacacctgcagcgctgacaagacagtgcgggtgtacaacctggtgtccaggaagtgcatcggcgtgtttgagggccacaccagcaaggtgaactgcctgctggtgacccagaccagcggcaagaatgctgccctgtacacaggcagcagtgaccacaccatccgctgctacaacgtgaagagcagagaatgtgtggagcagctgcagctggaggacagagtgctgtgcctgcacagccgctggaggatcctgtatgccggcctggccaacggcaccgtggtgaccttcaacatcaagaacaacaagaggctggagatctttgagtgccacggccccagggctgtgtcctgcctggccacagcccaggagggcgccaggaagctgctggtggtgggcagctatgactgcaccatctctgtgagagatgccagaaatggcctgctgctgcggaccctggagggccacagcaagaccatcctgtgcatgaaggtggtgaatgacctggtgttttctggcagcagtgaccagagcgtgcacgcccacaacatccacactggagagctggtgcgcatctacaagggccacaaccacgctgtgacagtggtgaacatcctgggcaaggtgatggtgacagcctgcctggacaagtttgtgcgggtgtatgagctgcagagccatgaccggctgcaggtgtatggaggccacaaggacatgatcatgtgcatgaccatccacaagtccatgatctacacaggctgctatgatggcagcatccaggccgtgcggctgaacctgatgcagaactaccgctgctggtggcacggctgcagcctcatcttcggcgtggtggaccacctgaagcagcacctgctgacagaccacaccaaccccaacttccagaccctgaagtgccgctggaagaactgtgatgccttcttcaccgccaggaagggcagcaagcaggatgctgctggccacatcgagagacatgctgaagatgacagcaagattgacagctag

SEQ ID NO: 21248 - DNA, 354 bp, synthetic construct
  source 1..354: mol_type = other DNA; note = Synthetic coding sequence
atgtacagccccatcatctaccaggccctgtgtgaacatgtgcagacccagatgagcctgatgaatgacctgaccagcaagaacatccccaacggcatcccagctgtgccctgccacgcccccagccacagcgagagccaggccaccccccacagcagctatggcctgtgcaccagcacccctgtgtggagcctgcagaggcctccctgcccccccaaggtgcacagcgaggtgcagacagatggcaacagccagtttgccagccagggcaagacagtgtctgccacctgcacagatgtgctgaggaacagcttcaacaccagccctggggtgccctgcagcctgcccaagtag

SEQ ID NO: 21249 - DNA, 189 bp, synthetic construct
  source 1..189: mol_type = other DNA; note = Synthetic coding sequence
atggccgccctgcggcccctggtgaagcccaagatcgtgaagaagaggaccaagaagttcatccgccaccagagcgaccgctacgtgaagatcaagaggaactggaggaagccccggggcatcgacaacagagtgagaagacgcttcaagggccagatcctgatgcccaacatcggctacggcagctag

SEQ ID NO: 21250 - DNA, 411 bp, synthetic construct
  source 1..411: mol_type = other DNA; note = Synthetic coding sequence
atgtctgccagctgtgatggctgtgtgggcagcaggcctcctgtgcacctggccagcggctacagcctggccgacctgctggtgctggagatgggcatgggcacccagtgctggacagaggaccagaggcgctggagcagcctgtggccctggagccacctgagctctgtgctgctggccgacaaggagggcggccccccagctgtggatgaggtgctggatgaggccgtgcctgagtaccgggcccctggcaggaagagcctgctggagatccggcagctggaccctgatgacaggagcctggccaagtacaagagggtgctgctgggccccctgcccccagctgtggaccccagcctgcccaacgtgcaggtgacccggctgaccctgctgtctgagcaggccccctag

SEQ ID NO: 21251 - DNA, 1803 bp, synthetic construct
  source 1..1803: mol_type = other DNA; note = Synthetic coding sequence
atgcctgagatccgggtgacccccctgggcgccggccaggatgtgggccgcagctgcatcctggtgtccattgctgggaagaatgtgatgctggactgtggcatgcacatgggcttcaatgatgaccggcgcttcccagacttctcctacatcacccagaatggccgcctgacagacttcctggactgtgtgatcatcagccacttccacctggaccactgtggggccctgccctacttcagcgagatggtgggctatgatggccccatctacatgacccaccccacccaggccatctgccccatcctgctggaggactacaggaagattgctgtggacaagaagggggaggccaacttcttcaccagccagatgatcaaggactgcatgaagaaggtggtggccgtgcacctgcaccagacagtgcaggtggatgatgagctggagatcaaggcctactatgccggccacgtgctgggcgccgccatgttccagatcaaggtgggcagcgagagcgtggtgtacaccggggactacaacatgaccccagacagacacctgggcgccgcctggattgacaagtgccggcccaacctgctgatcacagagagcacctacgccaccaccatccgggacagcaagcgctgccgggagcgggacttcctgaagaaggtgcatgagaccgtggagcggggcggcaaggtgctgatccctgtgtttgccctgggccgggcccaggagctgtgcatcctgctggagaccttctgggagaggatgaacctgaaggtgcccatctacttcagcacaggcctgacagagaaggccaaccactactacaagctgttcatcccctggaccaaccagaagatcaggaagacctttgtgcagaggaacatgtttgagttcaagcacatcaaggcctttgaccgggcctttgctgacaaccctggccccatggtggtgtttgccaccccaggcatgctgcacgccggccagagcctgcagatcttcaggaagtgggccggaaatgagaagaacatggtgatcatgcctggctactgtgtgcagggcaccgtgggccacaagatcctgagcggccagaggaagctggagatggagggccggcaggtgctggaggtgaagatgcaggtggagtacatgtccttcagcgcccatgctgatgccaagggcatcatgcagctggtgggccaggccgagcctgagagcgtgctgctggtgcacggggaggccaagaagatggagttcctgaagcagaagattgagcaggagctgcgggtgaactgctacatgcctgccaacggggagaccgtgaccctgcccaccagccccagcatccctgtgggcatcagcctgggcctgctgaagcgggagatggcccagggcctgctgcctgaggccaagaagccccggctgctgcacggcaccctcatcatgaaggacagcaacttccggctggtgtcctctgagcaggccctgaaggagctgggcctggccgagcaccagctgcgcttcacctgccgggtgcacctgcatgacaccaggaaggagcaggagacagccctgcgggtgtacagccacctgaagtctgtgctgaaggaccactgtgtgcagcacctgcctgatggctctgtgacagtggagagcgtgctgctgcaggccgccgcccccagtgaagatcctggcaccaaggtgctgctggtgtcctggacctaccaggatgaggagctgggcagcttcctgaccagcctgctgaagaagggcctgccccaggcccccagctag

SEQ ID NO: 21252 - DNA, 774 bp, synthetic construct
  source 1..774: mol_type = other DNA; note = Synthetic coding sequence
atgctggagtatgccctgaagcaggagcgggccaagtaccacaagctgaagtttggaacagacctgaaccagggcgagaagaaggcagatgtgtctgagcaggtgtccaatggacctgtggagagcgtgaccctggagaacagccccctggtgtggaaggagggccggcagctgctgcggcagtacctggaggaggtgggctacacagacaccatcctggacatgaggagcaagagggtgcgcagcctgctgggccgcagcctggagctgaatggagctgtggagcccagcgagggcgccccccgggcccctcctggccctgctggcctgtctggaggagagagcctgctggtgaagcagatcgaggagcagatcaagagaaatgctgctgggaaggatggcaaggagcggctgggcggctctgtgctgggccagatccccttcctgcagaactgtgaagatgaagattctgatgaagatgatgagctggacagcgtgcagcacaagaagcagagggtgaagctgcccagcaaggccctggtgcctgagatggaggatgaagatgaggaggatgattctgaagatgccatcaatgaatttgacttcctgggcagcggagaagatggagagggcgccccagacccccggcgctgcaccgtggatggcagcccccatgagctgggccctgagctgcacagccccacagagtggcagggcgccctgtctgtgggcaaggccagccccatgccagactgggtgggcacagctggatag

SEQ ID NO: 21253 - DNA, 381 bp, synthetic construct
  source 1..381: mol_type = other DNA; note = Synthetic coding sequence
atgcctggggtgaagctgaccacccaggcctactgcaagatggtgctgcatggagccaagtacccccactgtgctgtgaatggcctgctggtggccgagaagcagaagcccaggaaggagcacctgcccctgggcggccctggggcccaccacaccctgtttgtggactgcatccccctcttccacggcaccctggccctggcccccatgctggaggtggccctgaccctgattgacagctggtgcaaggaccacagctatgtgattgctggctactaccaggccaatgaaagagtgaaggatgccagccccaaccaggtggccgagaaggtggccagcagaattgctgagggcttcagtgacacagccctgatcatgtag

SEQ ID NO: 21254 - DNA, 450 bp, synthetic construct
  source 1..450: mol_type = other DNA; note = Synthetic coding sequence
gtgcgggagctggaggccgagctggatgctgagcagaagaagcacgccgaggccctgaagggcgtgaggaagcatgaaagaagagtgaaggagctggcctaccaggtgggggacagagtgtccctgggcagcggccctggggccggccctgcccaggccagccctgagagccccctgcctgcccaggccgaggaggacaggaagaacctggccaggatgcaggacctggtggacaagctgcagagcaaggtgaagagctacaagaggcagtttgaggaggccgagcagcaggccaacaccaacctggccaagtacaggaaggcccagcacgagctggatgatgctgaggagagagctgacatggccgagacccaggccaacaagctgcgggcccggaccagagatgccctgggccccaagctgagcctgagcccccagcacaaggagtag

SEQ ID NO: 21255 - DNA, 2349 bp, synthetic construct; identical to SEQ ID NO: 18602
  source 1..2349: mol_type = other DNA; note = Synthetic coding sequence

SEQ ID NO: 21256 - DNA, 495 bp, synthetic construct
  source 1..495: mol_type = other DNA; note = Synthetic coding sequence
atgatgtctgaggtggaggaggccatgcagtgtgtggaggagctgaatgcccagggcctgctgcacgtgtttgtgcgggtgggcgtggagagcaccctggagaggagccagatcacccgggaccacatgggccagctgctgtaccagctggtgcagagcgagaagctgagcaagcaggacttcttcaagggcttcagcgagaccctggagctggctgatgacatggccatcgacatcccccacatctggctgtacctggccgagctggtgacccccatgctgaaggagggcggcatctccatgagggagctgaccatcgagttcagcaagcccctgctgcctgtgggccgggccggcgtgctgctgtctgagatcctgcacctgctgtgcaagcagatgagccacaagaaggtgggcgccctgtggagggaggccgacctgtcctggaaggacttcctgcctgaaggagaagatgtgcacaacttcctgctgtag

SEQ ID NO: 21257 - DNA, 369 bp, synthetic construct; identical to SEQ ID NO: 21112
  source 1..369: mol_type = other DNA; note = Synthetic coding sequence

SEQ ID NO: 21258 - DNA, 3345 bp, synthetic construct
  source 1..3345: mol_type = other DNA; note = Synthetic coding sequence
atggcctgcagaagacgctactttgtggagggggaggcccccagcagcgagaccggcaccagcctggacagccccagcgcctacccccagggccccctggtgcccggcagcagcctgagcccagaccactatgagcacacctctgtgggcgcctacggcctgtacagcggccccccaggccagcagcagaggacccggcggcccaagctgcagcacagcaccagcatcctgaggaagcaggccgaggaggaggccatcaagaggagccgcagcctgtctgagagctatgagctgagcagtgacctgcaggacaagcaggtggagatgctggagaggaaatatggaggccgcctggtgaccaggcatgctgcccggaccatccagacagccttccggcagtaccagatgaacaagaactttgagcggctgcggagctccatgtctgaaaataggatgagccgccgcatcgtgctgagcaacatgaggatgcagttctcctttgagggccctgagaaggtgcacagcagctactttgagggcaagcaggtgtctgtgaccaatgatggcagccagctgggcgccctggtgtccccagaatgtggggacctgtctgagcccaccaccctgaagagccctgcccccagcagtgactttgctgatgccatcacagagctggaggatgccttcagccggcaggtgaagagcctggccgagagcattgatgatgccctgaactgccgcagcctgcacacagaggaggccccagccctggatgctgcccgggcccgggacacagagccccagacagccctgcacggcatggaccacaggaagctggatgagatgacagccagctacagtgatgtgaccctgtacattgatgaggaggagctgagcccccccctgcccctgagccaggccggggaccggcccagcagcacagaaagtgacctgcggctgcgggccggcggggccgccccagactactgggccctggcccacaaggaggacaaggctgacacagacaccagctgccgcagcacccccagcctggagcggcaggagcagaggctgcgggtggagcacctgcccctgctgaccatcgagccccccagcgacagctctgtggacctgagtgacagaagtgagcggggcagcctgaagaggcagagcgcctatgaaagaagcctgggcggccagcagggcagccccaagcacggcccccacagcggggcccccaagagcctgccccgggaggagcctgagctgcggcccaggcctccccggcccctggacagccacctggccatcaatggcagcgccaaccggcagagcaagtctgagagtgactacagtgatggagacaatgacagcatcaacagcaccagcaacagcaatgacaccatcaactgcagcagcgagagcagcagccgggacagcctgcgggagcagaccctgagcaagcagacctaccacaaggaggccaggaacagctgggacagccctgccttcagcaatgatgtgatcaggaagaggcactaccgcatcggcctgaacctcttcaacaagaagccagagaagggcgtgcagtacctgattgagcggggctttgtgcctgacacccctgtgggcgtggcccacttcctgctgcagaggaagggcctgagccggcagatgattggagagttcctgggcaaccggcagaagcagttcaacagagatgtgctggactgtgtggtggatgagatggacttcagcaccatggagctggatgaggccctgaggaagttccaggcccacatccgggtgcagggcgaggcccagaaggtggagcggctcatcgaggccttcagccagcgctactgcatctgcaaccctggggtggtgcggcagttcagaaatccagacaccatcttcatcctggcctttgccatcatcctgctgaacacagacatgtacagccccaacgtgaagccagagaggaagatgaagctggaggacttcatcaagaacctgcggggcgtggatgatggagaggacatcccccgggagatgctgatgggcatctatgaaagaatcaggaagcgggagctgaagaccaatgaagaccacgtgtcccaggtgcagaaggtggagaagctgattgtgggcaagaagcccatcggcagcctgcaccctggcctgggctgtgtgctgagcctgccccaccggcggctggtgtgctactgccgcctgtttgaggtgcctgaccccaacaagccccagaagctgggcctgcaccagcgggagatcttcctgttcaatgacctgctggtggtgaccaagatcttccagaagaagaagaacagcgtgacctacagcttccggcagagcttcagcctgtatggcatgcaggtgctgctgtttgagaaccagtactacccaaatggcatccggctgaccagctctgtgcctggagctgacatcaaggtgctgatcaacttcaatgcccccaacccccaggacaggaagaagttcacagatgacctgcgggagagcattgctgaggtgcaggagatggagaagcaccgcatcgagagcgagctggagaagcagaagggcgtggtgcggcccagcatgagccagtgcagcagcctgaagaaggagagcggaaatggcaccctgagccgggcctgcctggatgacagctatgccagcggggagggcctgaagaggtctgccctgagcagcagcctgcgggacctgtctgaggccggcaagagaggaagaagaagcagcgctggcagcctggagagcaatgtggagggcagcatcatcagcagcccccacatgagaagaagagccaccagcaccagagaatgtcccagccggccccaccagaccatgcccaacagcagcagcctgctgggcagcctgtttggcagcaagaggggcaagcccccaccccaggcccacctgcccagcgccccagccctgcccccaccccacccccctgtggtgctgccccacctgcagcacagcgtggccggccaccacctgggccccccagagggcctgccccaggccgccatgcacggccaccacacccagtactgccacatgcagaaccccccaccctaccaccaccaccaccaccaccaccccccccagcacatccagcacgcccaccagtaccaccacggcccccatggaggccacccagcctatggagcccacgcccacggccacccccccctgcccagcgcccacgtgggccacacagtgcaccaccacggccagcccccagcccctcctccacccaccagcagcaaggccaagcccagcggcatcagcaccatcgtgtag

SEQ ID NO: 21259 - DNA, 903 bp, synthetic construct
  source 1..903: mol_type = other DNA; note = Synthetic coding sequence
atggccgaggaggtgtccaccctgatgaaggccaccgtgctgatgaggcagcccggccgggtgcaggagatcgtgggcgccctgaggaagggcggcggggaccggctgcaggtgatcagtgactttgacatgaccctgagcagatttgcctacaacgggaagcgctgccccagcagctacaacatcctggacaacagcaagatcatcagcgaggagtgcaggaaggagctgacagccctgctgcaccactactaccccattgaaattgacccccacaggacagtgaaggagaagctgccccacatggtggagtggtggaccaaggcccacaacctgctgtgccagcagaagatccagaagttccagatcgcccaggtggtgcgggagagcaatgccatgctgcgggagggctacaagaccttcttcaacaccctgtaccacaacaacatccccctcttcatcttctctgctggcattggagacatcctggaggagatcatccggcagatgaaggtgttccaccccaacatccacatcgtgagcaactacatggacttcaatgaagatggcttcctgcagggcttcaagggccagctgatccacacctacaacaagaacagcagcgcctgtgaaaattctggctacttccagcagctggagggcaagaccaacgtcatcctgctgggggacagcatcggggacctgaccatggctgatggagtgcctggggtgcagaacatcctgaagattggcttcctgaatgacaaggtggaggagcggcgggagcgctacatggacagctatgacatcgtgctggagaaggatgagaccctggatgtggtgaatggcctgctgcagcacatcctgtgccagggcgtgcagctggagatgcagggcccctag

SEQ ID NO: 21260 - DNA, 834 bp, synthetic construct
  source 1..834: mol_type = other DNA; note = Synthetic coding sequence
atgtttcctggggccaccacccccctgcccaaggctgctgcctacccaggagtgtatggcagcaatggccgcaccccccagcctgcctacctgtctgaggccatgaagctgacccagagcgagcaggcccacctgagcctggagctgcagagggacagccacatgaagcagctgctgctgatccaggagcgctggaagagggcccagcgggaggagcggctgaaggcccagcagaacacagacaaggatgctgctgcccacctgcagaccagccacaagcccagcgcagaagatgctgagggccagagccccctgagccagaagtacagccccagcacagagaagtgcctgcctgagatccagggcatctttgaccgggaccctgacaccctgctgtacctgctgcagcagaagtctgagcctgctgagccctgcatcggcagcaaggcccccaaggatgacaagaccatcatcgaggagcaggccaccaagattgctgacctgaagagacatgtggagttcctggtggccgagaatgaaaggctgaggaaagaaaacaagcagctgaaggccgagaaggcccggctgctgaagggccccatcgagaaggagctggatgtggatgctgactttgtggagaccagcgagctgtggagcctgccccctcatgctgagacagccacagccagcagcacctggcagaagtttgctgccaacacaggcaaggccaaggacatccccatccccaacctgccccccctggacttccccagccctgagctgcccctgatggagctgtctgaggacatcctgaagggcttcatgaacaactag

SEQ ID NO: 21261 - DNA, 138 bp, synthetic construct
  source 1..138: mol_type = other DNA; note = Synthetic coding sequence
atgagcccccagaagagggtgaagaatgtgcaggcccagaacagaaccagccagggcagcagcagcttccagaccaccctgagcgcctggaaggtgaagcaggaccccagcaacagcaagaacatcagcaagcactag

SEQ ID NO: 21262 - DNA, 819 bp, synthetic construct
  source 1..819: mol_type = other DNA; note = Synthetic coding sequence
atgcctggggaccaccggcgcatccggggccctgaggagagccagcccccccagctgtatgctgctgatgaggaggaggcccctggcacccgggaccccacccggctgcggcctgtgtatgcccgggccggcctgctgagccaggccaagggcagcgcctacctggaggccggcggcaccaaggtgctgtgtgctgtgtctggcccccggcaggccgagggcggggagcggggcggcggccctgctggggccggcggggaggccccagctgccctgcggggccgcctgctgtgtgacttcagaagagccccctttgctggaagaagaagaagagcccctcctgggggctgtgaggagcgggagctggccctggccctgcaggaggccctggagcctgctgtgcggctgggccgctacccccgggcccagctggaggtgtctgccctgctgctggaggatggcggcagcgccctggccgccgccctgacagctgctgccctggccctggctgatgctggggtggagatgtatgacctggtggtgggctgcggcctgagcctggcccctggccctgcccccacctggctgctggaccccacccggctggaggaggagagagctgctgctggcctgactgtggccctgatgcctgtgctgaaccaggtggccggcctgctgggcagcggggagggcggcctgacagagagctgggccgaggccgtgcggctgggcctggagggctgccagaggctgtaccctgtgctgcagcagagcctggtgcgggccgccaggagaagaggagctgctgcccagccctag

SEQ ID NO: 21263 - DNA, 429 bp, synthetic construct
  source 1..429: mol_type = other DNA; note = Synthetic coding sequence
atggccagcggaaatgcccgcatcggcaagccagccccagacttcaaggccacagctgtggtggatggagccttcaaggaggtgaagctgagtgactacaagggcaagtatgtggtgctcttcttctaccccctggacttcacctttgtgtgccccacagagatcatcgccttcagcaacagagctgaggacttcaggaagctgggctgtgaggtgctgggcgtgtctgtggacagccagttcacccacctggcctggtatgagcagggccccaagcgggaggtggccgccaagctgacccccagcggccccagctctgtggcctcctggcccctgctgaacctgtggaacctgcgcttccccatcgtgaagatcatggagaccctgccccccaagagcctgaggatgatgaccgtcatcagcatctag

SEQ ID NO: 21264 - DNA, 1137 bp, synthetic construct; identical to SEQ ID NO: 20335
  source 1..1137: mol_type = other DNA; note = Synthetic coding sequence

SEQ ID NO: 21265 - DNA, 324 bp, synthetic construct
  source 1..324: mol_type = other DNA; note = Synthetic coding sequence
tgaattcatgagcagtgggagaaggccaacgtgagcagcccccaccgggagttccccccagccacagcccgggaggtggaccccctgcgcatccccccccaccacccccacaccagccggcagcccccctggccccggcggggcggcatgattgtggaccccctgcggagcggcttcccccgggccctgattgaccccagcagcggcctgcccaaccggctgcccccaggagctgtgcccccaggggccaggtttgaccccttcggccccatcggcaccagccccccaggccccaacccagaccacctgcccccacctggatag

SEQ ID NO: 21266 - DNA, 201 bp, synthetic construct
  source 1..201: mol_type = other DNA; note = Synthetic coding sequence
atggctgctgccactggagaccccggcctgagcaagctgcagtttgcccccttcagcagcgccctggatgtgggcttctggcatgagctgacccagaagaagctgaatgagtaccgcctggatgaggcccccaaggacatcaagggctactactacaatggagacagcgctggcctgcctgcccggctgaccctggagtag

SEQ ID NO: 21267 - DNA, 2115 bp, synthetic construct
  source 1..2115: mol_type = other DNA; note = Synthetic coding sequence
atgctgcccacagccagcagcaagaggaggacctttgctgcccgctacttcaccaggagcaagagcctggtgatgggagagcagagccgcagccctggccgcatgccctgcccccaccggctgggccctgtgctgaaggccggctggctgaagaagcagaggagcatcatgaagaactggcagcagcgctggtttgtgctgcggggggaccagctgttctactacaaggacaaggatgagatcaagccccagggcttcatcagcctgcagggcacccaggtgacagagctgcccccaggccctgaggaccccgggaagcacctgtttgagatcagccctggaggagctggggagcgggagaaggtgcctgccaaccctgaggccctgctgctgatggccagcagccagagggacatggaggactgggtgcaggccatcagaagagtcatctgggcccccctgggcggcggcatcttcggccagaggctggaggagaccgtgcaccacgagaggaaatatggcccccggctggcccccctgctggtggagcagtgtgtggacttcatccgggagcggggcctgacagaggagggcctcttcaggatgcctggccaggccaacctggtgcgggacctgcaggacagctttgactgtggggagaagcccctgtttgacagcaccacagatgtgcacacagtggccagcctgctgaagctgtacctgcgggagctgcctgagcctgtggtgccctttgcccgctatgaggacttcctgagctgtgcccagctgctgaccaaggatgaaggagagggcaccctggagctggccaagcaggtgagcaacctgccccaggccaactacaacctgctgcgctacatctgcaagttcctggatgaggtgcaggcctacagcaatgtgaacaagatgtctgtgcagaacctggccaccgtgtttggccccaacatcctgcggccccaggtggaggaccctgtgaccatcatggagggcaccagcctggtgcagcacctgatgacagtgctgatcaggaagcacagccagctgttcaccgcccctgtgcctgagggccccaccagcccccggggcggcctgcagtgtgctgtgggctggggcagcgaggaggtgacccgggacagccagggcgagcccggcggccctggcctgcctgcccacaggaccagcagcctggatggagctgctgtggccgtgctgagcaggacagcccccaccggccctggcagccgctgcagccctgggaagaaggtgcagaccctgcccagctggaagagcagcttccggcagcccaggagcctgagcggcagccccaagggcggcggcagcagcctggaggtgcccatcatcagcagcggcggcaactggctgatgaatggcctgagcagcctgcggggccaccggcgggccagcagcggggaccggctgaaggacagcggctctgtgcagaggctgagcacctatgacaacgtgcctgcccctggcctggtgcccggcatccccagcgtggcctccatggcctggagcggggccagcagcagcgagagctctgtgggcggcagcctgagcagctgcacagcctgccgggccagtgacagcagcgcccggagcagcctgcacacagactgggccctggagcccagccccctgcccagcagcagcgaggaccccaagagcctggacctggaccacagcatggatgaagctggagctggggccagcaacagcgagcccagcgagccagacagccccacccgggagcacgcccggcgctctgaggccctgcagggcctggtgacagagctgcgggcagagctgtgccggcagaggacagaatatgaaagatctgtgaagagaattgaggagggcagcgctgacctgaggaagaggatgagccggctggaggaggagctggaccaggagaagaagaagtacatcatgctggagatcaagctgagaaattctgagcgggcccgggaggatgctgagaggaggaaccagctgctgcagcgggagatggaggagttcttcagcaccctgggcagcctgactgtgggcgccaagggggcccgggcccccaagtag

SEQ ID NO: 21268 - DNA, 630 bp, synthetic construct
  source 1..630: mol_type = other DNA; note = Synthetic coding sequence
atgatcagcaactacagaaatggaagtgagctggtgtgcttcaacagcggcgtgggctgcttcctgattggctgtgactgggccttcaccgtgctggtgaacaccttcttctccttcctgcggaggaagacagacttcttcatcggcggggaggagggcatggccgagaagctgatcacccagaccttcagccaccacaaccagctggcccagaagacccggcgggagaagagggcccggcaggaggccgagcggcgggagaaggccgagcgggccgcccggctggccaaggaggccaagtctgagaccagcggcccccagatcaaggagctgacagatgaggaggccgagcggctgcagctggagattgaccagaagaaggatgctgagaaccacgaggcccagctgaagaatggcagcctggacagccctgggaagcaggacacagaagaagatgaggaggaggatgagaaggacaagggcaagctgaagcccaacctgggcaatggagctgacctgcccaactaccgctggacccagaccctgtctgagctggacctggccgtgcccttctgtgtgaacttccggctgaagggcaaggacatggtggtggacatccagaggaggtag

SEQ ID NO: 21269 - DNA, 309 bp, synthetic construct; identical to SEQ ID NO: 21031
  source 1..309: mol_type = other DNA; note = Synthetic coding sequence

SEQ ID NO: 21270 - DNA, 273 bp, synthetic construct
  source 1..273: mol_type = other DNA; note = Synthetic coding sequence
atggccatggcccccagccccagcctggtgcaggtgtacaccagccctgctgctgtggccgtgtgggagtggcaggacggcctgggcacctggcacccctacagcgccaccgtgtgcagcttcatcgagcagcagtttgtgcagcagaagggccagcgcttcggcctgggcagcctggcccacagcatccccctgggccaggccgaccccagcctggccccctacatcatcgacctgcccagctggacccagttccggcaggacacaggatag

SEQ ID NO: 21271 - DNA, 207 bp, synthetic construct
  source 1..207: mol_type = other DNA; note = Synthetic coding sequence
atggatgccaacagcaaggacaagcccccagagaccaaggagagcgccatgaacaatgctggaaatgccagcttcatcctgggcaccgggaagatcgtgaccccccagaagcatgctgagctgccccccaacccctgcaccccagacaccttcaagagccccctgaacttcagcacagtgacagtggagcagctgggcatcaactag

SEQ ID NO: 21272 - DNA, 879 bp, synthetic construct
  source 1..879: mol_type = other DNA; note = Synthetic coding sequence
atggatggcagctttgtgcagcacagcgtgcgggtgctgcaggagctgaacaagcagcgggagaagggccagtactgtgatgccaccctggatgtgggcggcctggtgttcaaggcccactggagcgtgctggcctgctgcagccacttcttccagagcctgtatggagatggcagcggcggctctgtggtgctgcctgctggctttgctgagatcttcggcctgctgctggacttcttctacacaggccacctggccctgaccagcggcaacagagaccaggtgctgctggccgcccgggagctgcgggtgcctgaggccgtggagctgtgccagagcttcaagcccaagacctctgtgggccaggccgccggcggccagagcggcctgggccccccagccagccagaatgtgaacagccacgtgaaggagcccgccggcctggaggaggaggaggtgtccaggaccctgggcctggtgccccgggaccaggagccccggggcagccacagcccccagaggccccagctgcacagccctgcccagagcgagggccccagcagcctgtgtgggaagctgaagcaggccctgaagccctgccccctggaggacaagaagccagaggactgcaaggtgcccccccggcccctggaggccgagggcgcccagctgcagggcggcagcaatgagtgggaggtggtggtgcaggtggaggatgatggagatggagactacatgtctgagcctgaggccgtgctgaccaggaggaagagcaatgtcatcaggaagccctgtgccgctgagcccgccctgtctgctggcagcctggccgctgagcctgctgagaacagaaaaggaacagctgtgcctgtggagtag

SEQ ID NO: 21273 - DNA, 408 bp, synthetic construct; identical to SEQ ID NO: 20517
  source 1..408: mol_type = other DNA; note = Synthetic coding sequence

SEQ ID NO: 21274 - DNA, 810 bp, synthetic construct
  source 1..810: mol_type = other DNA; note = Synthetic coding sequence
atgaagacccctgtggagctggccgtgtctggcatgcagaccctgggcctgcagcaccgctgccggggcggctacagagtgaaggcccggaccagctatgtggatgagaccctgtttggcagccctgctggcacccggcccaccccaccagactttgaccccccctgggtggagaaggccaacagaacccggggcgtgggcaaggaggccagcaaggccctgggcgccaagggcagctgtgagaccacccccagccggggcagcacccccaccctgacccccaggaagaagaacaagtaccggcccatcagccacacccccagctactgtgatgagagcctgtttggcagccgctctgagggcgccagctttggagcccccaggatggccaagggagatgctgccaagctgcgggccctgctgtggaccccaccacccaccccccggggcagccacagcccccggccccgggaggcccccctgcgggccatccaccctgctggccccagcaagacagagcccggccctgctgctgacagccagaagctgtccatgggcggcctgcacagcagccggcccctgaagaggggcctgagccacagcctgacccacctgaatgtgcccagcacaggccacccagccaccagcgccccccacaccaacggcccccaggacctgcggcccagcaccagcggcgtgaccttccgcagccccctggtgaccagccgggcccggtctgtgtccatctctgtgcccagcaccccccggcggggcggggccacccagaagcccaagccaccctggaagtag

SEQ ID NO: 21275 - DNA, 840 bp, synthetic construct
  source 1..840: mol_type = other DNA; note = Synthetic coding sequence
atggtggaccacctggccaacacagagatcaacagccagagaattgctgctgtggagagctgcttcggggccagcggccagcccctggccctgcccggccgggtgctgctgggggagggcgtgctgaccaaggaatgtaggaagaaggccaagccccgcatcttcttcctgttcaatgacatcctggtgtatggcagcatcgtgctgaacaagaggaagtaccgcagccagcacatcatccccctggaggaggtgaccctggagctgctgcctgagaccctgcaggccaagaaccgctggatgatcaagacagccaagaagagctttgtggtgtctgctgccagcgccacagagcggcaggagtggatcagccacatcgaggagtgtgtgcggcggcagctgcgggccaccggccggccccccagcacagaacatgctgccccctggatcccagacaaggccacagacatctgcatgcgctgcacccagacccgcttcagcgccctgaccaggaggcaccactgcaggaaatgtggctttgtggtgtgtgctgaatgttcccggcagcgcttcctgctgccccggctgagccccaagcctgtgcgggtgtgcagcctgtgctaccgggagctggccgcccagcagaggcaggaggaggccgaggagcagggcgccggcagccctggccagcctgcccacctggcccggcccatctgtggggccagcagtggagatgatgatgacagtgatgaggacaaggagggcagcagagatggagactggcccagctctgtggagttctacgccagcggcgtggcctggagcgccttccacagctag

SEQ ID NO: 21276 - DNA, 279 bp, synthetic construct
  source 1..279: mol_type = other DNA; note = Synthetic coding sequence
tgaagaagcagcaccagcccctgtggcaccagcaagagccccaaccgggagtgggagggcaagtctgtggcctacatgccctatgcagaggtgaagagggccctggagcaggaggcccagatgcacaacacagctgcccggagcgccagcccctgccgcctgagcccccgggaggtgtccaaggccgccccccagcctgacatgtctgctgcccgctacagcgtgccccctgtgctgcagcctgccccccaccaggtgatcaccaacctgcctgagtag

SEQ ID NO: 21277 - DNA, 771 bp, synthetic construct
  source 1..771: mol_type = other DNA; note = Synthetic coding sequence
atgagcaacaacctgtctgagctggacaccaagatccaggagaaggccatgaaggtggacatggacatctgcagaagaattgacatcacagccaagctgtgtgatgtggcccagcagaggaactgtgaggacatgatccagatgttccagaagaagctggtgcccagcatgggcggcaggaagcgggagaggaaggctgctgtggaggaggacaccagcctgtctgagagcgagggcccccggcagccagatggagatgaggaggagagcacagccctgagcatcaatgaggagatgcagaggatgctgaaccagctgcgggagtatgactttgaagatgactgtgacagcctgacctgggaggagacagaggagaccctgctgctgtgggaggacttcagcggctacgccatggctgctgctgaggcccagggcgagcagcaggaggacagcctggagaaggtgatcaaggacacagagagcctcttcaagacccgggagaaggagtaccaggagaccatcgaccagatcgagctggagctggccacagccaagaatgacatgaacagacacctgcacgagtacatggagatgtgcagcatgaagaggggcctggatgtgcagatggagacctgcagaagactcatcacccagagcggggacaggaagagccctgccttcaccgctgtgcccctgagtgaccccccacctccacccagcgaggctgaagattctgacagagatgtgtccagtgacagctccatgaggtag

SEQ ID NO: 21278 - DNA, 1620 bp, synthetic construct; identical to SEQ ID NO: 19050
  source 1..1620: mol_type = other DNA; note = Synthetic coding sequence

SEQ ID NO: 21279 - DNA, 750 bp, synthetic construct
  source 1..750: mol_type = other DNA; note = Synthetic coding sequence
atggccttcatgaccaggaagctgtgggacctggagcagcaggtgaaggcccagacagatgagatcctgagcaaggaccagaagattgctgccctggaggacctggtgcagaccctgcggccccaccctgctgaggccaccctgcagaggcaggaggagctggagaccatgtgtgtgcagctgcagaggcaggtgcgggagatggagcgcttcctgagtgactatggcctgcagtgggtgggggagcccatggaccaggaggacagcgagagcaagacagtgtctgaacatggagagcgggactggatgacagccaagaagttctggaagccaggggacagcctggcccctcctgaggtggactttgaccggctgctggccagcctgcaggacctgtctgagctggtggtggagggggacacccaggtgacccctgtgcctggaggagcccggctgcggaccctggagcccatccccctgaagctgtacagaaatggcatcatgatgtttgatggccccttccagcccttctatgaccccagcacccagcgctgcctgcgggacatcctggatggcttcttccccagcgagctgcagaggctgtaccccaacggggtgcccttcaaggtgatcagctgcagcagcaaccacacctttggagactttgagggcagcggggacacccagcccccccagaccccacccatcctgcggggcagccgctgcaccccctggggcacccctgtgtag

SEQ ID NO: 21280 - DNA, 2763 bp, synthetic construct
  source 1..2763: mol_type = other DNA; note = Synthetic coding sequence
atgtctgaagattctgagaaggaggactacagcgacaggaccatcagtgatgaagatgaaagtgatgaggacatgttcatgaagtttgtgtctgaggacctgcaccgctgtgccctgctgacagctgacagctttggagaccccttcttccccaggaccacccagatcctgctggagtaccagctgggccgctgggtgccccggctgcgggagccccgggacctgtatggagtgagcagcagcggccccctgagccccacccgctggccctaccactgtgaggtgattgatgagaaggtgcagcacatcgactggacccccagctgcccagagcctgtgtacatccccaccggcctggagacagagcccctgtacccagacagcaaggaggccaccgtggtgtacctggccgaggatgcctacaaggagccctgctttgtgtacagccgggtgggcggcaacagaacacccctgaagcagcctgtggactacagagacaacaccctgatgtttgaggccaggtttgaaagtggcaacctgcagaaggtggtgaaggtggccgagtatgagtaccagctgactgtgcggccagacctcttcaccaacaagcacacccagtggtactacttccaggtgaccaacatgagagctggcatcgtgtaccgcttcaccatcgtgaacttcaccaagccagccagcctgtacagccggggcatgaggcccctcttctacagcgagaaggaggccaaggcccaccacatcggctggcagagaattggagaccagatcaagtactacagaaacaaccctggccaggacggccgccactacttcagcctgacctggaccttccagttcccccacaacaaggacacctgctactttgcccactgctacccctacacctacaccaacctgcaggagtacctgagcggcatcaacaatgaccctgtgcgcagcaagttctgcaagatccgggtgctgtgccacaccctggccaggaacatggtgtacatcctgaccatcaccacccccctgaagaacagcgacagcaggaagaggaaggccgtcatcctgacagcccgggtgcaccctggagagaccaacagctcctggatcatgaagggcttcctggactacatcctgggcaacagcagtgatgcccagctgctgcgggacacctttgtgttcaaggtggtgcccatgctgaacccagatggagtgattgtgggcaactaccgctgcagcctggccggccgggacctgaacagaaactacaccagcctgctgaaggagagcttccccagcgtgtggtacaccaggaacatggtgcaccggctgatggagaagcgggaggtgatcctgtactgtgacctgcacggccacagcaggaaggagaacatcttcatgtatggctgtgatggcagtgacaggagcaagaccctgtacctgcagcagaggatcttccccctgatgctgagcaagaactgcccagacaagttctccttcagcgcctgcaagttcaacgtgcagaagagcaaggagggcaccggccgggtggtgatgtggaagatgggcatccggaacagcttcaccatggaggccaccttctgtggcagcaccctgggcaacaagaggggcacccacttcagcaccaaggacctggagagcatgggctaccacttctgtgacagcctgctggactactgtgaccctgacaggaccaagtactaccgctgcctgaaggagctggaggagatggagcggcacatcaccctggagaaggtgtttgaggacagcgacacccctgtgattgacatcaccctggatgtggagagcagcagccggggcagtgacagcagcgagagcattgacagcctgacctacctgctgaagctgaccagccagaagaagcacctgaagaccaagaaggagaggaacagcaccatcgccagccaccagaatgcccggggccaggaggtgtatgaccggggccacctgctgcagaggcacacccagagcaacagtgatgtgaaggacacccggcccaatgaaccagatgactacatggtggactacttccggcggcagctgcccaaccagggcctggacctgcaccacaacctgaagagcaagatcaaggagtgcatctccttccagagcaagaagacaggcatcaactggacagatgatgagaagaggagctacaaggacaagggcatcgtgcagacccaggagatcctgcagtacctgctgcccatcgtgcacagcaccaagaacatgcagaccacccagatcaagcagctgttcaaccccaggaccaacttccagatccagcaccagctgaacccagccacctgcaggaacatcaagaagtacagcacctcctggacagcccccaggaaccacccctttgtgatccagggagatgtgatggccaacagcagcgagtgggtgcagagcaagccccacaggagcctggagagcctgagccccctgaagggccccaagaagaacaagcacagccagatctgggccatcaagaatgaagacatcaagcccctgagcagcaagtgggagacagccagcagcagctttggcatggatgccaacgtgctgaagtacaagagcctgcaggccgaggagaccaaccagcagagcagcaagcacacagccctgcacctgaccaagaacaaggatgagcaggccaacaagaatgatggccagcccaccctgtacctgaagttccagcgggagagctag

SEQ ID NO: 21281 - DNA, 858 bp, synthetic construct
  source 1..858: mol_type = other DNA; note = Synthetic coding sequence
atgaccaatgcccagatcatcctgctgattgacaatgccaggatggctgtggatgacttcaacctgaagtatgaaaatgagcacagcttcaagaaggacctggagattgaggtggagggcctgcggaggaccctggacaacctgaccatcgtgaccacagacctggagcaggaggtggagggcatgaggaaggagctgatcctgatgaagaagcaccacgagcaggagatggagaagcaccacgtgcccagcgacttcaacgtgaatgtgaaggtggacaccggcccccgggaggacctgatcaaggtgctggaggacatgaggcaggagtatgagctgatcatcaagaagaagcaccgggacctggacacctggtacaaggagcagagcgctgccatgagccaggaggccgccagccctgccaccgtgcagagccggcagggcgacatccacgagctgaagaggaccttccaggccctggagattgacctgcagacccagtacagcaccaagagcgccctggagaacatgctgtctgagacccagagccgctacagctgcaagctgcaggacatgcaggagatcatcagccactatgaggaggagctgacccagctgcggcatgagctggagcggcagaacaatgagtaccaggtgctgctgggcatcaagacccacctggagaaggagatcaccacctacagaaggctgctggagggggagagcgagggcacccgggaggagagcaagagctccatgaaggtgtctgccacccccaagatcaaggccatcacccaggagaccatcaatggccgcctggtgctgtgccaggtgaatgagatccagaagcacgcctag

SEQ ID NO: 21282 - DNA, 2013 bp, synthetic construct
  source 1..2013: mol_type = other DNA; note = Synthetic coding sequence
atgagcccctgcagcggcggccgcggggagctgcgggccgcctgcctgcagcctgaggtgcctggggcccctggcctgtcctggtggcccagcacagctggcctgcggcagagccagacagacctgcagctgagcctgagcatctggtgtgggaagaagatgggcagctacctgtctgtgcctgcctacttcaccagccgggacctcttccgctgcagcgagtgccaggacagcctgaccaactggtactatgagaaggatggcaagctgtactgccccaaggactactggggcaagtttggagagttctgccacggctgcagcctgctgatgacaggccccttcatggtggccggggagttcaagtaccaccctgagtgctttgcctgcatgagctgcaaggtgatcattgaagatggagatgcctatgccctggtgcagcacgccaccctgtactgtgggaagtgccacaatgaggtggtgctggcccccatgtttgagcggctgagcacagaatctgtgcaggagcagctgccctacagcgtgaccctcatctccatgcctgccaccacagagggccggcggggcttctctgtgtctgtggagagcgcctgcagcaactatgccaccaccgtgcaggtgaaggaggtgaacaggatgcacatcagccccaacaacagaaatgccatccaccctggggaccgcatcctggagatcaatggcacccctgtgaggaccctgcgggtggaggaggtggaggatgccatcagccagaccagccagaccctgcagctgctgattgaacatgaccctgtgtcccagaggctggaccagctgcggctggaggcccggctggccccccacatgcagaatgccggccacccccacgccctgagcaccctggacaccaaggagaacctggagggcaccctgcggcggcgcagcctgcggcgcagcaacagcatcagcaagagccctggccccagcagccccaaggagcccctgctcttcagccgggacatcagccgctctgagagcctgcgctgcagcagcagctacagccagcagatcttccggccctgtgacctgattcatggagaggtgctgggcaagggcttcttcggccaggccatcaaggtgacccacaaggccaccgggaaggtgatggtgatgaaggagctgatccgctgtgatgaggagacccagaagaccttcctgacagaggtgaaggtgatgaggagcctggaccaccccaacgtgctgaagttcatcggcgtgctgtacaaggacaagaagctgaacctgctgacagagtacatcgagggcggcaccctgaaggacttcctgcgctccatggaccccttcccctggcagcagaaggtgcgctttgccaagggcatcgccagcggcatggcctacctgcacagcatgtgcatcatccaccgggacctgaacagccacaactgcctgatcaagctggacaagacagtggtggtggccgactttggcctgagccgcctcatcgtggaggagaggaagagggcccccatggagaaggccaccaccaagaagaggaccctgaggaagaatgacaggaagaagcgctacacagtggtgggcaacccctactggatggcccctgagatgctgaatggcaagagctatgatgagaccgtggacatcttctcctttggcatcgtgctgtgtgagatcatcggccaggtgtatgctgaccctgactgcctgcccaggaccctggactttggcctgaatgtgaagctgttctgggagaagtttgtgcccacagactgccccccagccttcttccccctggccgccatctgctgccgcctggagcctgagagcaggcctgccttcagcaagctggaggacagctttgaggccctgagcctgtacctgggggagctgggcatccccctgcctgctgagctggaggagctggaccacacagtgtccatgcagtatggcctgacccgggacagccccccatag

SEQ ID NO: 21283 - DNA, 459 bp, synthetic construct
  source 1..459: mol_type = other DNA; note = Synthetic coding sequence
atggcccacctgcggggctttgccaaccagcacagccgggtggaccctgaggagctgttcaccaagctggaccgcatcggcaagggcagctttggagaggtgtacaagggcatcgacaaccacaccaaggaggtggtggccatcaagatcatcgacctggaggaggctgaagatgaaattgaggacatccagcaggagatcaccgtgctgagccagtgtgacagcccctacatcacccgctacttcggcagctacctgaagagcaccaagctgtggatcatcatggagtacctgggcggcggcagcgccctggacctgctgaagccaggccccctggaggagacctacatcgccaccatcctgcgggagatcctgaagggcctggactacctgcacagcgagaggaagatccaccgggacatcaaggccgccaacgtgctgctgtctgagcagggctag

SEQ ID NO: 21284 - DNA, 1365 bp, synthetic construct
  source 1..1365: mol_type = other DNA; note = Synthetic coding sequence
atggccccctgccgggccaggacaggccccagcacctggaggtctgccaccagcagcaccaggaggaggaagggggcccggcggcacctgagcgccctgcaggtgctggagacctgtgtgaagaactgtggccaccgcttccacgtgctggtggccagccaggactttgtggagagcgtgctggtgaggaccatcctgcccaagaacaacccccccaccatcgtgcatgacaaggtgctgaacctgatccagagctgggcagatgccttccgcagcagcccagacctgactggagtggtgaccatctatgaggacctgcggaggaagggcctggagttccccatgacagacctggacatgctgagccccatccacaccccccagaggacagtgttcaacagcgagacccagagcggccaggacagcgtgggcacagacagcagccagcaggaggacagcggccagcacgccgcccccctgcctgccccacccatcctgagcggggacacccccatcgcccccaccccagagcagatcggcaagctgcggtctgagctggagatggtgtctggaaatgtgcgggtgatgtctgagatgctgacagagctggtgcccacccaggccgagcctgctgacctggagctgctgcaggagctgaacagaacctgccgggccatgcagcagagggtgctggagctgatcccccagatcgccaatgagcagctgacagaggagctgctgattgtgaatgacaacctgaacaacgtgttcctgcggcatgaaagatttgagcgcttcagaacaggccagaccaccaaggcccccagcgaggccgagcctgctgctgacctgattgacatgggccctgaccctgctgccaccggcaacctgagcagccagctggccggcatgaacctgggcagcagctctgtgcgggccggcctgcagagcctggaggccagcggccgcctggaggatgaatttgacatgtttgccctgacccggggcagcagcctggccgaccagaggaaggaggtgaagtatgaggccccccaggccacagatggcctggccggggccctggatgcccggcagcagagcactggagccatccctgtgacccaggcctgcctgatggaggacatcgagcagtggctgagcacagatgtgggcaatgatgctgaggagcccaagggcgtgaccagcgaggagtttgacaagttcctggaggagcgggccaaggctgctgaccggctgcccaacctgagcagccccagcgctgagggccccccaggccccccatctggccctgcccccaggaagaagacccaggagaaggatgatgacatgctgtttgccctgtag

SEQ ID NO: 21285 - DNA, 378 bp, synthetic construct
  source 1..378: mol_type = other DNA; note = Synthetic coding sequence
atgcagaccagcagcagccgctctgtgcacctgtctgagtggcagaagaactactttgccatcaccagcggcatctgcaccggccccaaggcagatgcctaccgggcccagatcctgcgcatccagtatgcctgggccaacagcgagatcagccaggtgtgtgccaccaagctgttcaagaagtatgcagagaagtacagcgccatcatcgacagcgacaacgtggagagcggcctgaacaactatgcagagaacatcctgaccctggccggcagccagcagacagacagcgacaagtggcagagcggcctgagcatcaacaacgtgttcaagatgagctctgtgcagaagatgatgcaggccggcaagaagttctag

SEQ ID NO: 21286 - DNA, 30 bp, synthetic construct; identical to SEQ ID NO: 12254
  source 1..30: mol_type = other DNA; note = Synthetic coding sequence

SEQ ID NO: 21287 - DNA, 270 bp, synthetic construct; identical to SEQ ID NO: 20498
  source 1..270: mol_type = other DNA; note = Synthetic coding sequence

SEQ ID NO: 21288 - DNA, 3732 bp, synthetic construct
  source 1..3732: mol_type = other DNA; note = Synthetic coding sequence
atgctgatcaaggagtaccacatcctgctgcccatgagcctggatgagtaccaggtggcccagctgtacatgatccagaagaagagccgggaggagagcagcggggagggcagcggcgtggagatcctggccaaccggccctacacagatggccctgggggcagcggccagtacacccacaaggtgtaccacgtgggcagccacatccctggctggttccgggccctgctgcccaaggccgccctgcaggtggaggaggagagctggaatgcctacccctacaccaggacccgctacacctgcccctttgtggagaagttcagcattgaaattgagacctactacctgcctgatggcggccagcagcccaacgtgttcaacctgtctggagctgagcggcggcagaggatcctggacaccattgatattgtgagagatgctgtggcccctggagagtacaaggccgaggaggacccccggctgtaccacagcgtgaagacaggccggggccccctgagtgatgactgggccaggacagctgcccagacaggccccctgatgtgtgcctacaagctgtgcaaggtggagttccgctactggggcatgcaggccaagattgagcagttcatccatgatgtgggcctgcggcgggtgatgctgcgggcccaccggcaggcctggtgctggcaggatgagtggacagagctgtccatggctgacatccgggccctggaggaggagacagccaggatgctggcccagaggatggccaagtgcaacacaggcagcgagggcagcgaggcccagcccccaggcaagcccagcacagaggcccggtctgctgccagcaacacaggcaccccagatggccctgaggcccctcctggcccagatgccagcccagatgccagctttgggaagcagtggagcagcagcagccgcagcagctacagcagccagcacggcggcgctgtgagcccccagagcctgtctgagtggaggatgcagaacatcgcccgggacagcgagaacagcagcgaggaggagttctttgatgcccacgagggcttcagtgacagcgaggaggtgttccccaaggagatgaccaagtggaacagcaatgacttcattgatgcctttgccagccctgtggaggccgagggcaccccagagcccggggctgaggccgccaagggcattgaagatggagcccaggccccccgggacagcgagggcctggatggagctggggagctgggcgctgaggcctgtgctgtgcacgccctcttcctgatcctgcacagcggcaacatcctggacagcggccctggagatgccaacagcaagcaggctgatgtgcagaccctgagcagcgcctttgaggccgtgacccgcatccacttccctgaggccctgggccacgtggccctgcggctggtgccctgcccccccatctgtgccgccgcctatgccctggtgagcaacctgagcccctacagccatgatggagacagcctgagccgcagccaggaccacatccccctggccgccctgcccctgctggccaccagcagcagccgctaccagggcgctgtggccaccgtcatcgcccggaccaaccaggcctacagcgccttcctgcggagccctgagggcgccggcttctgtggccaggtggccctgattggagatggagtgggcggcatcctgggctttgatgccctgtgccacagcgccaatgccggcaccggcagccggggcagcagccggcggggctccatgaacaatgagctgctgagccctgagtttggacctgtgcgggaccccctggctgatggagtggagggcctgggccggggcagccctgagcccagcgccctgcccccccagaggatccccagcgacatggccagccctgagcctgagggcagccagaacagcctgcaggccgccccagccaccaccagctcctgggagccccggcgggccagcacagccttctgccccccagctgccagcagcgaggccccagatggccccagcagcacagcccggctggacttcaaggtgtctggcttcttcctgtttggcagccccctgggcctggtgctggccctgaggaagacagtgatgcctgccctggaggcccagatgaggcctgcctgtgagcagatctacaacctcttccacgccgctgacccctgtgccagccggctggagcccctgctggcccccaagttccaggccatcgcccccctgactgtgccccgctaccagaagttccccctgggagatggcagcagcctgctgctggccgacaccctgcagacccacagcagcctcttcctggaggagctggagatgctggtgcccagcacccccaccagcaccagcggggccttctggaagggcagcgagctggccacagatcctccagcccagcctgctgcccccagcaccaccagcgaggtggtgaagatcctggagcgctggtggggcaccaagagaattgactacagcctgtactgcccagaggccctgacagccttccccaccgtgaccctgccccacctgttccacgccagctactgggagagcgcagatgtggtggccttcatcctgcggcaggtgattgagaaggagcggccccagctggctgaatgtgaggagcccagcatctacagccctgccttcccccgggagaagtggcagaggaagaggacccaggtgaagatcagaaatgtgaccagcaaccaccgggccagtgacacagtggtgtgtgagggccggccccaggtgctgagcggccgcttcatgtatggccccctggatgtggtgaccctgactggagagaaggtggatgtgtacatcatgacccagcccctgagcggcaagtggatccactttggaacagaggtgaccaacagcagcggccgcctgaccttccctgtgcccccagagcgggccctgggcatcggcgtgtaccctgtgaggatggtggtgcggggggaccacacctatgcagagtgctgcctgactgtggtggcccggggcacagaagctgtggtgttcagcattgatggcagcttcaccgcctctgtgtccatcatgggcagtgaccccaaggtgcgggccggggctgtggatgtggtgcgccactggcaggacagcggctacctgattgtgtatgtgacaggccgcccagacatgcagaagcaccgggtggtggcctggctgagccagcacaacttcccccacggcgtggtgtccttctgtgatggcctgacccatgaccccctgcggcagaaggccatgttcctgcagagcctggtgcaggaggtggagctgaacatcgtggccggctacggcagccccaaggatgtggccgtgtatgctgccctgggcctgagccccagccagacctacatcgtgggccgggctgtgaggaagctgcaggcccagtgccagttcctgagtgatggctacgtggcccacctgggccagctggaggccggcagccacagccacgccagcagcggccccccccgggccgccctgggcaagagcagctatggagtggccgcccctgtggacttcctgaggaagcagagccagctgctgcggagccggggccccagccaggccgagcgggagggccctggcaccccacccaccaccctggcccggggcaaggcccggagcatcagcctgaagctggacagcgaggagtag

SEQ ID NO: 21289 - DNA, 1614 bp, synthetic construct
  source 1..1614: mol_type = other DNA; note = Synthetic coding sequence
atgagcagcagcggctacccacccaaccagggcgccttcagcacagagcagagccgctacccaccccacagcgtgcagtacaccttccccaacaccaggcaccagcaggagtttgctgtgcctgactaccgcagcagccacctggaggtgtcccaggccagccagctgctgcagcagcagcagcagcagcagctgcggcggcggcccagcctgctgtctgagttccaccctggcagtgaccggccccaggagaggaggaccagctatgagcccttccaccctggccccagccctgtggaccatgacagcctggagagcaagaggccccggctggagcaggtgtctgacagccacttccagagggtgtctgctgctgtgctgcccctggtgcaccccctgcctgagggcctgcgggccagcgcagatgccaagaaggaccctgcctttggaggcaagcatgaggcccccagcagccccatcagcggccagccctgtggagatgaccagaatgccagccccagcaagctgagcaaggaggagctgatccagagcatggacagagtggaccgggagatcgccaaggtggagcagcagatcctgaagctgaagaagaagcagcagcagctggaggaggaggccgccaagcccccagagcctgagaagcctgtgtccccacctcctgtggagcagaagcacaggagcatcgtgcagatcatctatgatgagaacaggaagaaggccgaggaggcccacaagatctttgagggcctgggccccaaggtggagctgcccctgtacaaccagcccagcgacaccaaggtgtaccacgagaacatcaagacaggagtgcctgcccggaggatgatgaagaaccaggtgatgaggaagaagctgatcctcttcttcaagagaagaaatcatgccaggaagcagcgggagcagaagatctgccagagatatgaccagctgatggaggcctgggagaagaaggtggacagaattgagaacaaccccaggaggaaggccaaggagagcaagacccgggagtactatgagaagcagtttcctgagatcaggaagcagcgggagcagcaggagcgcttccagagggtgggccagagaggagctggcctgagcgccaccatcgcccggagtgaacatgagatcagcgagatcattgatggcctgtctgagcaggagaacaatgagaagcagatgaggcagctgagcgtcatcccccccatgatgtttgatgctgagcagaggagagtgaagttcatcaacatgaatggcctgatggaggaccccatgaaggtgtacaaggaccggcagttcatgaatgtgtggacagaccacgagaaggagatcttcaaggacaagttcatccagcaccccaagaactttggcctgattgccagctacctggagaggaagtctgtgcctgactgtgtgctgtactactacctgaccaagaagaatgaaaactacaaggccctggtgagaagaaactacggcaagagaagaggaagaaaccagcagatcgcccggcccagccaggaggagaaggtggaggagaaggaggaggacaaggccgagaagacagagaagaagtag

SEQ ID NO: 21290 - DNA, 147 bp, synthetic construct
  source 1..147: mol_type = other DNA; note = Synthetic coding sequence
atggaggacctgtttgagaccttccaggatgagatgggcttcagcaacatggaggatgatggccctgaggaggaggagcgggtggccgagccccaggccaacttcaacaccccccaggccctgcggcagctgctgctgctgatgtag

SEQ ID NO: 21291 - DNA, 798 bp, synthetic construct
  source 1..798: mol_type = other DNA; note = Synthetic coding sequence
atggccagcagctctgtgcccccagccaccgtgtctgctgccacagctggccctggccctggcttcggctttgccagcaagaccaagaagaagcactttgtgcagcagaaggtgaaggtgttccgggctgctgaccccctggtgggcgtcttcctgtggggcgtggcccacagcatcaatgagctgagccaggtgcccccacctgtgatgctgctgcctgatgacttcaaggccagcagcaagatcaaggtgaacaaccacctgttccaccgggagaacctgcccagccacttcaagttcaaggagtactgcccccaggtgttcaggaacctgcgggacagatttggaattgatgaccaggactacctggtgtccctgaccaggaacccccccagcgagagcgagggcagtgatggccgcttcctgatctcctatgacaggaccctggtgatcaaggaggtgtccagtgaagatattgctgacatgcacagcaacctgagcaactaccaccagtacatcgtgaagtgccacggcaacaccctgctgccccagttcctgggcatgtacagagtgtctgtggacaatgaagacagctacatgctggtgatgaggaacatgttcagccaccggctgcctgtgcacaggaaatatgacctgaagggcagcctggtgtcccgggagcccgccatcaggaagaggctgaagaactgcccccccctgcgcatctggaccttcagcaccaggaccaggaagtacatcctggtgaagagaagaaggaagtacttctggaggagctag

SEQ ID NO: 21292 - DNA, 462 bp, synthetic construct
  source 1..462: mol_type = other DNA; note = Synthetic coding sequence
atgagccctgaggtggccctgaaccgcatcagccccatgctgagccccttcatcagctctgtggtgagaaatggcaaggtgggcctggatgccaccaactgcctgcgcatcacagacctgaagagcggctgcaccagcctgaccccaggccccaactgtgaccgcttcaagctgcacatcccctatgctggggagaccctgaagtgggacatcatcttcaatgcccagtacccagagctgcccccagacttcatctttggagaagatgctgagttcctgcctgaccccagcgccctgcagaacctggcctcctggaaccccagcaacccagaatgtctgctgctggtggtgaaggagctggtgcagcagtaccaccagttccagtgcagccggctgcgggagagcagccggctgatgtttgagtaccagaccctgctggaggagccccagtatggagagtag

SEQ ID NO: 21293 - DNA, 78 bp, synthetic construct
  source 1..78: mol_type = other DNA; note = Synthetic coding sequence
atggagctgcgctgtggcggcctgctcttcagcagcagatttgacagcggcaacctggcccacgtggagaaggtgtag

SEQ ID NO: 21294 - DNA, 228 bp, synthetic construct
  source 1..228: mol_type = other DNA; note = Synthetic coding sequence
atggccagcgaggtgggccacaacctggagagccctgagaccccaggcggcggcggctggaccagggtggagttccccccaccagcccccaagggagctgccaccgtgtggtgcctgaaccggctgggcagcaggaagctgagcctcatctggatcaccttcaacacaggctggaacatgaagagccgcctcatcatcctgatccagcaggtgtcctgccaccactag

SEQ ID NO: 21295 - DNA, 1620 bp, synthetic construct; identical to SEQ ID NO: 19050
  source 1..1620: mol_type = other DNA; note = Synthetic coding sequence

SEQ ID NO: 21296 - DNA, 390 bp, synthetic construct
  source 1..390: mol_type = other DNA; note = Synthetic coding sequence
atgcctggcctgagctgccgcttctaccagcacaagtttcctgaggtggaggatgtggtgatggtgaatgtgcgcagcattgctgagatgggcgcctacgtgtccctgctggagtacaacaacatcgagggcatgatcctgctgtctgagctgagcagaagacgcatccgcagcatcaacaagctgatcagaattggaagaaatgaatgtgtggtggtgatccgggtggacaaggagaagggctacatcgacctgagcaagaggcggctgaccctgtgggagacagagagcaacctgaggaacacagagcagcgcttcctggccgtgaacccccggctggagagcttccctgtgctgaagaccagcaagctgaacatcttctacttctag

SEQ ID NO: 21297 - DNA, 1842 bp, synthetic construct; identical to SEQ ID NO: 18580
  source 1..1842: mol_type = other DNA; note = Synthetic coding sequence

SEQ ID NO: 21298 - DNA, 1983 bp, synthetic construct
  source 1..1983: mol_type = other DNA; note = Synthetic coding sequence
attgccaagccccagggcacctaccaggtgctgccccccaacacaggcagcctgtacatcgacaaggactgcagcgctgtgtactgccacgagagcagcagcaacatctactaccccttccagaagcgggagcagctgcgggccggccgctacatcatgaggcacaccagcgaggtgatctgtgaggtgctggaccctgagggcaacaccttccaggtgatggctgatggcagcatcagcaccatcctgcctgagaagaagctggaggatgacctgaatgagaagacagagggctatgacagcctgagctccatgcacctggagaagaaccaccagcagatctatggagagcacgtgccccgcttctttgtgatgtatgcagatggcagcggcatggagctgctgcgggacagcgacatcgaggagtacctgagcctggcctacaaggagagcaacacagtggtgctgcaggagcctgtgcaggagcagcccggcaccctgaccatcaccgtgctgcggcccttccacgaggccagcccctggcaggtgaagaaggaggacaccatcgtgccccccaacctgcggagccgctcctgggagaccttccccagcgtggagaagaagaccccaggcccccccttcggcacccagatctggaagggcctgtgcatcgagagcaagcagctggtgtctgcccctggggccatcctgaagagccccagcgtgctgcagatgaggcagttcatccagcatgaagtcatcaagaatgaggtgaagctgcggctgcaggtgtccctgaaggactacatcaactacatcctgaagaaggaggatgagctgcaggagatgatggtgaaggacagcaggacagaggaggagagaggaaatgctgctgacctgctgaagctggtgatgtccttccccaagatggaggagaccaccaagagccacgtgacagaggtggccgcccacctgacagacctcttcaagcagagcctggccaccccacccaagtgccccccagacaccttcggcaaggacttctttgagaagacctggaggcacacagccagcagcaagcgctggaaggagaagattgacaagaccaggaaggagattgagaccacccagaactacctgatggacatcaagaaccgcatcatcccccccttcttcaagtctgagctgaaccagctgtaccagagccagtacaaccacctggacagcctgagcaagaagctgcccagcttcaccaagaagaatgaagatgccaatgaaacagctgtgcaggacaccagtgacctgaacctggacttcaagccccacaaggtgtctgagcagaagagcagctctgtgcccagcctgcccaagccagagatctctgctgacaagaaggacttcaccgcccagaaccagacagagaacctgaccaagagccctgaggaggccgagagctatgagcctgtgaagatccccacccagagcctgctgcaggatgtggccggccagaccaggaaggagaaggtgaagctgccccactacctgctgagcagcaagcccaagagccagcccctggccaaggtgcaggacagcgtgggcggcaaggtgaacaccagctctgtggccagcgctgccatcaacaatgccaagagcagcctgtttggcttccacctgctgcccagctctgtgaagtttggagtgctgaaggagggccacacctacgccaccgtggtgaagctgaagaatgtgggcgtggacttctgccgcttcaaggtgaagcagcccccacccagcacaggcctgaaggtgacctacaagccaggccctgtggccgccggcatgcagacagagctgaacatcgagctgtttgccacagctgtgggagaagatggagccaagggcagcgcccacatcagccacaacatcgagatcatgacagagcacgaggtgctcttcctgcctgtggaggccaacatcctgtag

SEQ ID NO: 21299 - DNA, 2475 bp, synthetic construct
  source 1..2475: mol_type = other DNA; note = Synthetic coding sequence
atgtacagcaatgaagacagccggcagaccatcgtgtacagcgaggagagcaacaccaccatgagctacacccagaagatcaccaaccccctgcctgctgccagcagcacagatcctgccccctttgccaacatcaacacccctgtgctgcaggaggactaccggcaggacagccagacccggcgcatcagcaccctgaagctgacccacaaccaggacctgggcagcagcagccccatcagcaccccccagttcagcaagtctgtggaggtgcccagcttcctgaagaggcccaggagcctgacccccaaccctgtgcctgagacccacacagccagcctgagcatccagatcgcccccctgagcggccaggacctggagagccacaagcagctgcctgagctgagccctgagacagccaagatccccctgcagcaggagcggcagaagtctgctgtggccgccgccagccagagcagtgactgccgggtgtcccagatcaccgtgaatggaaattctggaggagctgtgagccccatgagctactaccagaggcccttcagccccagcgcctacagcctgcctgccagcctgaacagcagcatcgtgatgcagcacggcaccagcctggacagcacagacacctacccccagcacgcccagagcctggatggcaccaccagcagcagcatccccctgtaccgcagcagcgaggaggagaagagggtgaccgtcatcaaggccccccactacccaggcatcggccctgtggatgagagcggcatccccacagccatccgcaccaccgtggaccggcccaaggactggtacaagaccatgttcaagcagatccacatggtgcacaagccagatgatgacacagacatgtacaacaccccctacacctacaatgccggcctgtacaaccccccctacagcgcccagagccaccctgctgccaagacccagacctaccggcccctgagcaagagccacagcgacaacagccccaatgccttcaaggatgccagcagccctgtgcccccacctcatgtgcccccacctgtgccccccctgcggccccgggacaggagcagcacagagaagcatgactgggaccccccagacaggaaggtggacaccaggaagttccgctctgagcccaggagcatctttgaatatgagcccgggaagagcagcatcctgcagcacgagcggcccccacccctgcccaccacccccacccctgtgccccgggagcccggcaggaagcccctgagcagcagccggctgggggaggtgacaggcagccccagccccccacccaggtctggggcccccacccccagcagccgggccccagccctgagccccaccaggcctcccaagaagcccctggactatgtgcaggaccacagcagcggggtcttcaatgaggccagcctgtaccagagcagcattgacaggagcctggagcggcccatgagcagcgcctccatggccagtgacttcaggaagaggaggaagtctgagcctgctgtgggccccccccggggcctgggggaccagagcgccagcaggaccagccctggccgggtggacctgcccggcagcagcaccaccctgaccaagagcttcaccagcagcagccccagcagccccagccgggccaaggaccgggagagccccaggagctacagcagcaccctgacagacatgggccgcagcgccccccgggagcggcggggcaccccagagaaggagaagctgcctgccaaggctgtgtatgacttcaaggcccagaccagcaaggagctgtccttcaagaagggggacacagtgtacatcctgaggaagattgaccagaactggtatgaaggagagcaccacggccgggtgggcatcttccccatctcctatgtggagaagctgaccccacctgagaaggcccagcctgcccggcccccacctccagcccagcctggagagatcggggaggccatcgccaagtacaacttcaatgctgacaccaacgtggagctgagcctgaggaaaggagacagagtcatcctgctgaagagggtggaccagaactggtatgagggcaagatccctggcaccaaccggcagggcatcttccctgtgtcctatgtggaggtggtgaagaagaacaccaagggagctgaggactacccagacccccccatcccccacagctacagcagtgaccgcatccacagcctgagcagcaacaagccccagaggcctgtgttcacccatgagaacatccagggcggcggggagcccttccaggccctgtacaactacaccccaagaaatgaagatgagctggagctgcgggagagtgatgtgattgatgtgatggagaagtgtgatgatggctggtttgtgggcaccagcaggaggaccaagttcttcggcaccttccctggcaactacgtgaagaggctgtag

SEQ ID NO: 21300 - DNA, 228 bp, synthetic construct
  source 1..228: mol_type = other DNA; note = Synthetic coding sequence
atgagatactacggcagctactaccggggcctgggctacggctgcggcggctttggaggcctgggctacggctgcggctgcggcggctaccgctatggcagcggctacggcggctaccgctatggctgctgccggcccagctgccgggagggctacggcttcagcggcttcaagaagctggccgacagccacaccctgacccccaggagctgcccctatgccagctag

SEQ ID NO: 21301 - DNA, 183 bp, synthetic construct
  source 1..183: mol_type = other DNA; note = Synthetic coding sequence
atggtgctgatcctgggccgccgcctgaaccgggaggacctgggcgtgcgggacagccctgccaccaagaggaaggtgtttgagatggaccccaagagcctgactggacatgagttctttgacttcagcagcggcagcagccatgctgagaacatcctgcagatcttcaatgagttcagatag

SEQ ID NO: 21302 - DNA, 600 bp, synthetic construct
  source 1..600: mol_type = other DNA; note = Synthetic coding sequence
atgaagctgggcaagaagcccatgtacaagcctgtggacccctacagcaggatgcagagcacctacaactacaacatgaggggcggggcctacccaccccgctacttctaccccttccctgtgccccccctgctgtaccaggtggagctgtctgtgggcggccagcagttcaacgggaagggcaagacccggcaggccgccaagcatgatgctgctgccaaggccctgcgcatcctgcagaatgagcccctgcctgagcggctggaggtgaatggccgggagagcgaggaggagaacctgaacaagtctgagatcagccaggtgtttgaaattgccctgaagaggaacctgcctgtgaactttgagagcttccccctgaagcaggtggcccgggagagcggccccccccacatgaagaactttgtgaccaaggtgtctgtgggggagtttgtgggggagggggagggcaagagcaagaagatcagcaagaagaatgctgccatcgctgtgctggaggagctgaagaagctgccccccctgcctgctgtggagcgggtgaagccccgcatcaagaagaagaccaagcccatcgtgaagtag

SEQ ID NO: 21303 - DNA, 2685 bp, synthetic construct
  source 1..2685: mol_type = other DNA; note = Synthetic coding sequence
atgcctgagcagttctctgtggccgagttcctggccgtgacagctgaggacctgagcagccctgctggagctgctgcctttgctgccaagatgccccgctacagaggagctgccctggcccgggaggagatcctggagggggaccaggccatcctgcagaggatcaagaaggctgtgcgggccatccacagcagcggcctgggccacgtggagaatgaggagcagtaccgggaggccgtggagagcctgggcaacagccacctgagccagaacagccatgagctgagcacaggcttcctgaacctggccgtgttcacccgggaggtggccgccctcttcaagaacctgatccagaacctgaacaacatcgtgtccttccccctggacagcctgatgaagggccagctgagagatggccggcaggccagcctgagcctgggcagccgggccaagctggagaaggagcgggaccgggcccgggtgactggaggcatccctggagaggtggcccaggacatgcagcgggagcggcgcatcttccagctgcacatgtgtgagtacctgctgaaggccggggagagccagatgaagcagggccctgacttcctgcagagcctcatcaagttcttccacgcccagcacaacttcttccaggacggctggaaggccgcccagagcctcttccccttcatcgagaagctggccgcctctgtgcacgccctgcaccaggcccaggaggatgagctgcagaagctgacccagctgcgggacagcctgcggggcaccctgcagctggagagccgggaggagcacctgagcaggaagaacagcggctgcggctacagcatccaccagcaccagggcaacaagcagtttggaacagagaaggtgggcttcctgtacaagaagagtgatggcatccggcgggtgtggcagaagaggaaatgtggggtgaagtatggctgcctgaccatcagccacagcaccatcaacagacctcctgtgaagctgaccctgctgacctgccaggtgcggcccaaccctgaggagaagaagtgctttgacctggtgacccacaacagaacctaccacttccaggccgaggatgaacatgaatgtgaggcctgggtgtctgtgctgcagaacagcaaggatgaggccctgagcagcgccttcctgggggagcccagcgctggccctggctcctggggcagcgctggccatgatggagagccccatgacctgaccaagctgctgattgctgaggtgaagagcaggcctggcaacagccagtgctgtgactgtggggctgctgaccccacctggctgagcaccaacctgggcgtgctgacctgcatccagtgcagcggcgtgcaccgggagctgggcgtgcgcttcagcaggatgcagagcctgaccctggacctgctgggccccagcgagctgctgctggccctgaacatgggcaacaccagcttcaatgaggtgatggaggcccagctgcccagccacggcggccccaagcccagcgctgagagtgacatgggcacccggcgggactacatcatggccaagtatgtggagcacagatttgcccggcgctgcaccccagagccccagaggctgtggacagccatctgcaacagagacctgctgtctgtgctggaggcctttgccaacggccaggactttggccagcccctgcccggcccagatgcccaggcccctgaggagctggtgctgcacctggccgtgaaggtggccaaccaggccagcctgcccctggtggacttcatcatccagaatggaggccacctggatgccaaggctgctgatggcaacacagccctgcactacgccgccctgtacaaccagcctgactgcctgaagctgctgctgaagggccgggccctggtgggcaccgtgaatgaagctggggagacagccctggacatcgccaggaagaagcaccacaaggaatgtgaggagctgctggagcaggcccaggccggcacctttgccttccccctgcacgtggactacagctgggtgatcagcacagagcccggcagtgacagtgaagaagatgaggaggagaagcgctgcctgctgaagctgcctgcccaggcccactgggccagcggccgcctggacatcagcaacaagacctatgagaccgtggccagcctgggcgccgccaccccccagggcgagagcgaggactgccccccacccctgcctgtgaagaacagcagcaggaccctggtgcagggctgtgcccggcatgccagcggggacagaagtgaggtgagcagcctgagcagcgaggcccctgagaccccagagagcctgggcagccctgccagcagcagcagcctgatgagccccctggagcccggggaccccagccaggccccacccaacagcgaggagggcctgcgggagcccccaggcaccagccggcccagcctgaccagcggcaccaccccatctgagatgtacctgcctgtgcgcttcagcagcgagagcaccaggagctaccgccgcggggcccggagcccagaagatggccccagcgcccggcagcccctgcccaggagaaatgtgcctgtgggcatcacagaaggagatggcagcaggacaggcagcctgcctgccagctctgtgcagctgctgcaggactag

SEQ ID NO: 21304 - DNA, 354 bp, synthetic construct; identical to SEQ ID NO: 20811
  source 1..354: mol_type = other DNA; note = Synthetic coding sequence

SEQ ID NO: 21305 - DNA, 1797 bp, synthetic construct
  source 1..1797: mol_type = other DNA; note = Synthetic coding sequence
atgtttgtgtctgacttcaggaaggagttctatgaggtggtgcagagccagagggtgctgctgtttgtggccagtgatgtggatgccctgtgtgcctgcaagatcctgcaggccctcttccagtgtgaccacgtgcagtacaccctggtgcctgtgtctggctggcaggagctggagacagccttcctggagcacaaggagcagttccactacttcatcctgatcaactgtggggccaacgtggacctgctggacatcctgcagccagatgaggacaccatcttctttgtgtgtgacacccacaggcctgtgaatgtggtgaatgtgtacaatgacacccagatcaagctgctgatcaagcaggatgatgacctggaggtgcctgcctatgaggacatcttcagagatgaggaggaggatgaggagcacagcggaaatgacagtgatggcagcgagcccagcgagaagaggacccggctggaggaggagatcgtggagcagaccatgagaagacggcagaggcgggagtgggaggcccggagcggcagcggcagcgagcctgtggccgccgccctggagaagagcagccggctgtttgctggccccatgtctgacagaacagcccccaggagcccccggcgggacatcctgtttgattatgagcagtatgagtaccacggcaccagcagcgccatggtgatgtttgagctggcctggatgctgagcaaggacctgaatgacatgctgtggtgggccatcgtgggcctgacagaccagtgggtgcaggacaagatcacccagatgaagtatgtgacagatgtgggcgtgctgcagagacatgtgagccgccacaaccacagaaatgaagatgaggagaacaccctgtctgtggactgcacccgcatcagctttgaatatgacctgcggctggtgctgtaccagcactggagcctgcatgacagcctgtgcaacaccagctacacagctgcccgcttcaagctgtggagcgtgcacggccagaagaggctgcaggagttcctggccgacatgggcctgcccctgaagcaggtgaagcagaagttccaggccatggacatcagcctgaaggagaacctgcgggagatgattgaggagagcgccaacaagtttggcatgaaggacatgagggtgcagaccttcagcatccacttcggcttcaagcacaagttcctggccagtgatgtggtgtttgccaccatgagcctgatggagagccctgagaaggatggcagcggcacagaccacttcatccaggccctggacagcctgagccgcagcaacctggacaagctgtaccacggcctggagctggccaagaagcagctgcgggccacccagcagaccatcgccagctgcctgtgcaccaacctggtgatcagccagggccccttcctgtactgcagcctgatggagggcaccccagatgtgatgctgttcagcaggcctgccagcctgagcctgctgagcaagcacctgctgaagagctttgtgtgcagcaccaagaacagacgctgcaagctgctgcccctggtgatggccgcccccctgtccatggagcacggcaccgtgacagtggtgggcatccccccagagacagacagcagtgacaggaagaacttcttcggccgggcctttgagaaggctgctgagagcaccagcagcaggatgctgcacaaccactttgacctgtctgtgattgagctgaaggccgaggacaggagcaagttcctggatgccctgatcagcctgctgtcctag

SEQ ID NO: 21306 - DNA, 2994 bp, synthetic construct
  source 1..2994: mol_type = other DNA; note = Synthetic coding sequence
atgcccagcgagaagaagatcagcagcgccaatgactgcatctccttcatgcaggccggctgtgagctgaagaaggtgcggcccaacagccgcatctacaaccgcttcttcaccctggacacagacctgcaggccctgcgctgggagcccagcaagaaggacctggagaaggccaagctggacatcagcgccatcaaggagatccggctgggcaagaacacagagaccttcaggaacaacggcctggccgaccagatctgtgaggactgtgccttcagcatcctgcacggggagaactatgagagcctggacctggtggccaacagcgcagatgtggccaacatctgggtgtctggcctgcgctacctggtgagccgcagcaagcagcccctggacttcatggagggcaaccagaacaccccccgcttcatgtggctgaagacagtgtttgaggccgcagatgtggatggaaatggcatcatgctggaggacacctctgtggagctgatcaagcagctgaaccccaccctgaaggaggccaagatccggctgaagttcaaggagatccagaagagcaaggagaagctgaccaccagggtgacagaggaggagttctgtgaggccttctgtgagctgtgcaccaggcctgaggtgtacttcctgctggtgcagatcagcaagaacaaggagtacctggatgccaatgacctgatgctgttcctggaggccgagcagggcgtgacccacatcacagaggacatctgcctggacatcatccgccgctatgagctgtctgaggagggccggcagaagggcttcctggccattgatggcttcacccagtacctgctgagcagtgaatgtgacatctttgatcctgagcagaagaaggtggcccaggacatgacccagcccctgagccactactacatcaatgccagccacaacacctacctgattgaggaccagttccggggccctgctgacatcaatggctacatccgggccctgaagatgggctgccgctctgtggagctggatgtgtctgatggcagtgacaatgagcccatcctgtgcaacagaaacaacatgaccacccacgtgtccttccgcagcgtcatcgaggtgatcaacaagtttgcctttgtggccagcgagtaccccctcatcctgtgcctgggcaaccactgcagcctgccccagcagaaggtgatggcccagcagatgaagaaggtgtttggaaacaagctgtacacagaggcccccctgcccagcgagagctacctgcccagccctgagaagctgaagaggatgatcatcgtgaagggcaagaagctgcccagcgaccctgatgtgctggagggggaggtgacagatgaagatgaggaggccgagatgagcaggaggatgtctgtggactacaatggagagcagaagcagatccggctgtgccgggagctgagtgacctggtgtccatctgcaagtctgtgcagtacagagactttgagctgtccatgaagagccagaactactgggagatgtgcagcttcagcgagacagaggccagcagaattgccaatgagtacccagaagattttgtgaactacaacaagaagttcctgagccgcatctaccccagcgccatgagaattgacagcagcaacctgaacccccaggacttctggaactgtggctgccagatcgtggccatgaacttccagaccccaggccccatgatggacctgcacacaggctggttcctgcagaatggaggctgcggctacgtgctgcggcccagcatcatgagagatgaggtgtcctacttcagcgccaacaccaagggcatcctgcccggggtgagccccctggccctgcacatcaagatcatcagcggccagaacttccccaagcccaagggggcctgtgccaagggagatgtgattgacccctacgtgtgcatcgagatccacggcatcccagctgactgcagcgagcagaggaccaagacagtgcagcagaacagcgacaaccccatctttgatgagacctttgagttccaggtgaacctgcctgagctggccatgatccgctttgtggtgctggatgatgactacatcggagatgagttcatcggccagtacaccatcccctttgaatgtctgcagcccggctacagacatgtgcccctgcggagctttgtgggggacatcatggagcacgtgaccctgtttgtgcacatcgccatcaccaacagaagtggcggcggcaaggcccagaagaggagcctgtctgtgaggatgggcaagaaggtgcgggagtacaccatgctgaggaacatcggcctgaagaccattgatgacatcttcaagattgctgtgcaccccctgcgggaggccatcgacatgagggagaacatgcagaatgccatcgtgtccatcaaggagctgtgtggcctgccccccatcgccagcctgaagcagtgcctgctgaccctgagcagccgcctcatcaccagtgacaacacccccagcgtgtccctggtgatgaaggacagcttcccctacctggagcccctgggcgccatcccagatgtgcagaagaagatgctgacagcctatgacctgatgatccaggagagccgcttcctgattgagatggctgacacagtgcaggagaagatcgtgcagtgccagaaggccggcatggagttccacgaggagctgcacaacctgggcgccaaggagggcctgaagggcaggaagctgaacaaggccacagagagctttgcctggaacatcaccgtgctgaagggccagggcgacctgctgaagaatgccaagaatgaggccatcgagaacatgaagcagatccagctggcctgcctgagctgtggcctgagcaaggcccccagcagcagcgctgaggccaagagcaagaggagcctggaggccatcgaggagaaggagagcagtgaagaaaatggcaagctgtag

SEQ ID NO: 21307 - DNA, 612 bp, synthetic construct
  source 1..612: mol_type = other DNA; note = Synthetic coding sequence
atgagaaatggagacttcctgcccacccggctgcaggcccagcaggatgctgtgaacatcgtgtgccacagcaagaccaggagcaacccagaaaataatgtgggcctcatcaccctggccaatgactgtgaggtgctgaccaccctgaccccagacaccggccgcatcctgagcaagctgcacacagtgcagcccaagggcaagatcaccttctgcaccggcatccgggtggcccacctggccctgaagcaccggcagggcaagaaccacaagatgaggatcatcgcctttgtgggcagccctgtggaggacaatgagaaggacctggtgaagctggccaagaggctgaagaaggagaaggtgaatgtggacatcatcaactttggagaggaggaggtgaacacagagaagctgacagcctttgtgaacaccctgaatggcaaggatggcaccggcagccacctggtgacagtgcccccaggccccagcctggctgatgccctgatcagcagccccatcctggccggggagggcggggccatgctgggcctgggcgccagtgactttgaatttggagtggaccccagcgctgaccctgagctggccctgtag

SEQ ID NO: 21308 - DNA, 429 bp, synthetic construct; identical to SEQ ID NO: 19383
  source 1..429: mol_type = other DNA; note = Synthetic coding sequence

SEQ ID NO: 21309 - DNA, 1410 bp, synthetic construct
  source 1..1410: mol_type = other DNA; note = Synthetic coding sequence
atgtgcagcctggccagcggggccaccggctacagccacctgctgaagaagcacttccacacagtgtccctgagcatcagcctcatcctgacagcctggttcatcaacatgaaccccaccgtggagtacatgaacagcatctacaaccctgtgccctgggagaaggaggagtacctgaagcctgtgctggaggatgacctgctgctgcagtttgatgtggaggacctgtatgagcctgtgtctgtgcccttctcctaccccaacggcctgtctgagaacacctctgtggtggagaagctgaagcacatggaggcccgggccctgtctgctgaggccgccctggcccgggcccgggaggacctgcagaagatgaagcagtttgcccaggactttgtgatgcacacagatgtgaggacctgcagcagcagcacctctgtgattgctgacctgcaggaggatgaagatggagtgtacttcagcagctatggccactacggcatccacgaggagatgctgaaggacaagatcagaacagagagctacagagacttcatctaccagaacccccacatcttcaaggacaaggtggtgctggatgtgggctgcggcaccggcatcctgtccatgtttgctgccaaggccggggccaagaaggtgctgggcgtggaccagagcgagatcctgtaccaggccatggacatcatccggctgaacaagctggaggacaccatcaccctcatcaagggcaagattgaggaggtgcacctgcctgtggagaaggtggatgtgatcatcagcgagtggatgggctacttcctgctgtttgagagcatgctggacagcgtgctgtatgccaagaacaagtacctggccaagggcggctctgtgtacccagacatctgcaccatcagcctggtggccgtgtctgatgtgaacaagcatgctgaccgcatcgccttctgggatgatgtgtatggcttcaagatgagctgcatgaagaaggctgtgattcctgaggccgtggtggaggtgctggaccccaagaccctcatcagcgagccctgtggcatcaagcacatcgactgccacaccaccagcatcagtgacctggagttcagcagtgacttcaccctgaagatcaccaggacctccatgtgcacagccatcgccggctactttgacatctactttgagaagaactgccacaacagagtggtgttcagcacaggcccccagagcaccaagacccactggaagcagacagtgttcctgctggagaagcccttctctgtgaaggccggggaggccctgaagggcaaggtgacagtgcacaagagcaagaaggaccccaggagcctgactgtgaccctgaccctgaacaacagcacccagacctacggcctgcagtag

SEQ ID NO: 21310 - DNA, 525 bp, synthetic construct
  source 1..525: mol_type = other DNA; note = Synthetic coding sequence
atggccagcgctggcacccagcactacagcatcggcctgcggcagaagaacagcttcaagcagagcggccccagcggcaccgtgcctgccaccccacctgagaagcccagcgagggccgggtgtggccccaggcccaccagcaggtgaagcccatctggaagctggagaagaagcaggtggagaccctgtctgctggcctgggccctggcctgctgggcgtgcccccccagcctgcctacttcttctgccccagcaccctgtgcagcagcggcaccacagctgtgattgctggccacagcagcagctgctacctgcacagcctgcctgacctcttcaacagcaccctgctgtacagaagaagcagctaccggcagaagccctaccagcagctggagagcttctgcctgcggagcagccccagcgagaagagccccttcagcctgccccagaagagcctgcctgtgtccctgacagccaacaaggccaccagctccatggtgttctccatggcccagcccatgtag

SEQ ID NO: 21311 - DNA, 1572 bp, synthetic construct
  source 1..1572: mol_type = other DNA; note = Synthetic coding sequence
atgcagaaggagcgggagctgcaggagaccatctacttcaagaacacctggccagcctgcatgttcctgattgtggcccccctgtctgtgctgtacaactggaaggatgagctggacacctggggctacttccgggtgacagtgctgcacggcaacaggaaggacaatgagctgatccgggtgaagcagaggaaatgtgagatcgccctgaccacctatgagaccctgcggctgtgcctggatgagctgaacagcctggagtggagcgctgtgattgtggatgaggcccaccgcatcaagaaccccaaggcccgggtgacagaggtgatgaaggccctgaagtgcaatgtgagaattggcctgaccggcaccatcctgcagaacaacatgaaggagctgtggtgtgtgatggactgggccgtgcccggcctgctgggcagcggcacctacttcaagaagcagttcagtgaccctgtggagcacggccagaggcacacagccaccaagcgggagctggccaccggcaggaaggccatgcagaggctggccaagaagatgagcggctggttcctgcggaggaccaagaccctcatcaaggaccagctgcccaagaaggaggacaggatggtgtactgcagcctgacagacttccagaaggctgtgtaccagacagtgctggagacagaagatgtgaccctcatcctgcagagcagcgagccctgcacctgccgcagcggccagaagagaagaaactgctgctacaagaccaacagccatggagagaccgtgaagaccctgtacctgagctacctgactgtgctgcagaaggtggccaaccacgtggccctgctgcaggccgccagcaccagcaagcagcaggagaccctcatcaagaggatctgtgaccaggtgttcagccgcttcccagactttgtgcagaagagcaaggatgctgcctttgagaccctgagtgaccccaagtacagcggcaagatgaaggtgctgcagcagctgctgaaccactgcaggaagaacagagacaaggtgctgctcttctccttcagcaccaagctgctggatgtgctgcagcagtactgcatggccagcggcctggactaccgccgcctggatggcagcaccaagtctgaggagcggctgaagatcgtgaaggagttcaacagcacccaggatgtgaacatctgcctggtgtccaccatggccggcggcctgggcctgaactttgtgggcgccaacgtggtggtgctgtttgaccccacctggaacccagccaatgacctgcaggccatcgaccgggcctaccgcatcggccagtgcagagatgtgaaggtgctgcggctcatcagcctgggcaccgtggaggagatcatgtacctgcggcagatctacaagcagcagctgcactgtgtggtggtgggctctgaaaatgccaagcgctactttgaagctgtgcagggcagcaaggagcaccagggcgagctgtttggcatccacaacctcttcaagttccgcagccagggcagctgcctgaccaaggacatcctggaggtgtag

SEQ ID NO: 21312 - DNA, 1179 bp, synthetic construct; identical to SEQ ID NO: 20458
  source 1..1179: mol_type = other DNA; note = Synthetic coding sequence

SEQ ID NO: 21313 - DNA, 1566 bp, synthetic construct
  source 1..1566: mol_type = other DNA; note = Synthetic coding sequence
atggagcagagcagcctgtacttctgggacctgctggagggcagcgagaaggctgtggtgggcaccacctacaagcacctgaaggacctgctgagcaagctgctgaacagcggctactttgagagcatccctgtgcccaagaatgccaaggagaaggaggtgcccctggaggaggagatgctgatccagagcgagaagaagacccagctgagcaagacagaatctgtgaaggagagcgagagcctgatggagtttgcccagcctgagatccagccccaggagttcctgaacagacgctacatgacagaggtggactacagcaacaagcagggcgaggagcagccctgggaggccgactatgccaggaagcccaacctgcccaagcgctgggacatgctgacagagccagatggccaggagaagaagcaggagagcttcaagtcctgggaggccagcggcaagcaccaggaggtgtccaagccagctgtgtccctggagcagaggaagcaggacaccagcaagctgcggagcaccctgcctgaggagcagaagaagcaggagatcagcaagagcaagcccagccccagccagtggaagcaggacacccccaagagcaaggccggctacgtgcaggaggagcagaagaagcaggagacccccaagctgtggcctgtgcagctgcagaaggagcaggaccccaagaagcagacccccaagtcctggacccccagcatgcagagcgagcagaacaccaccaagtcctggaccacccccatgtgtgaggagcaggacagcaagcagcctgagacccccaagtcctgggagaacaacgtggagagccagaagcacagcctgaccagccagagccagatcagccccaagtcctggggcgtggccacagccagcctcatccccaatgaccagctgctgcccaggaagctgaacacagagcccaaggatgtgcccaagcctgtgcaccagcctgtgggcagcagcagcaccctgcccaaggaccctgtgctgaggaaggagaagctgcaggacctgatgacccagatccagggcacctgcaacttcatgcaggagagcgtgctggactttgacaagcccagcagcgccatccccaccagccagcccccatctgccaccccaggcagccctgtggccagcaaggagcagaacctgagcagccagagcgacttcctgcaggagcccctgcaggccgccatccccccaggcaagcagcccagcagcctggccagccccaacccccccatggccaagggcagcgagcagggcttccagagccccccagccagcagcagctctgtgaccatcaacacagcccccttccaggccatgcagaccgtcttcaacgtgaatgcccccctgccccccaggaaggagcaggagatcaaggagagcccctacagccctggctacaaccagagcttcaccacagccagcacccagaccccaccccagtgccagctgcccagcatccacgtggagcagacagtgcacagccaggagacagcccctggcaaccaccacagcaccttctag

SEQ ID NO: 21314 - DNA, 480 bp, synthetic construct; identical to SEQ ID NO: 20848
  source 1..480: mol_type = other DNA; note = Synthetic coding sequence

SEQ ID NO: 21315 - DNA, 270 bp, synthetic construct; identical to SEQ ID NO: 20498
  source 1..270: mol_type = other DNA; note = Synthetic coding sequence

SEQ ID NO: 21316 - DNA, 1356 bp, synthetic construct
  source 1..1356: mol_type = other DNA; note = Synthetic coding sequence
atggccgagggcgcccagccccaccagcccccccagctgggccctggagctgctgcccggggcatgaagcgggagagcgagctggagctgcctgtgcctggagctggaggagatggagctgaccccggcctgagcaagaggcccaggacagaggaggccgctgctgatggcggcggcggcatgcagaatgagcccctgaccccaggctaccacggcttccctgcccgggacagccagggcaaccaggagcccaccaccaccccagatgccatggtgcagcccttcaccaccatccccttccccccaccaccccagaatggcatccccacagaatatggagtgccccacacccaggactatgccggccagacaggagagcacaacctgaccctgtatggcagcacccaggcccacggggagcagagcagcaacagccccagcacccagaatggcagcctgacccagacagagggcggggcccagacagatggccagcagagccagacccagagcagtgaaaattctgagagcaagagcacccccaagaggctgcacgtgagcaacatccccttccgcttccgggaccctgacctgcggcagatgtttggccagtttgggaagatcctggatgtggagatcatcttcaatgaaagaggcagcaaaggatttggatttgtgacctttgaaaattctgcagatgctgaccgggcccgggagaagctgcacggcaccgtggtggagggcaggaagattgaggtgaacaatgccacagcccgggtgatgaccaacaagaagatggtgaccccctatgccaacggctggaagctgagccctgtggtgggcgctgtgtatggccctgagctgtatgctgccagcagcttccaggctgatgtgtccctgggcaatgatgctgctgtgcccctgagcggccggggcggcatcaacacctacatccccctcatcagcctgcccctggtgcccggcttcccctaccccacagctgccaccacagctgctgccttccggggggcccacctgcggggccggggccgcacagtgtatggagctgtgcgggctgtgcccccaacagccatcccagcctacccaggagtggtgtaccaggacggcttctacggggctgacctgtatggaggctatgctgcctaccgctatgcccagcctgccacagccacagctgccacagctgctgctgctgctgctgctgcctacagtgatggctacggccgggtgtacacagctgacccctaccacgccctggccccagctgccagctatggagtgggcgctgtggccagcctgtacagaggaggctacagcagatttgccccctactag

SEQ ID NO: 21317 - DNA, 855 bp, synthetic construct
  source 1..855: mol_type = other DNA; note = Synthetic coding sequence
atgttcagccgccgcagccatggagatgtgaagaagagcacccagaaggtgctggaccccaagaaggatgtgctgacccggctgaagcacctgcgggccctgctggacaacgtggatgccaatgacctgaagcagttctttgagaccaactacagccagatctacttcatcttctatgagaacttcatcgccctggagaacagcctgaagctgaagggcaacaacaagagccagcgggaggagctggacagcatcctcttcctgtttgagaagatcctgcagttcctgcctgagcgcatcttcttccgctggcactaccagagcatcggcagcaccctgaagaagctgctgcacactggaaacagcatcaagatccgctgtgagggcatccgcctcttcctgctgtggctgcaggccctgcagaccaactgtgccgaggagcaggtgctgatctttgcctgcctggtgcccggcttccctgctgtgatgagcagccggggcccctgcaccctggagaccctcatcaaccccagccccagcgtggctgatgtgaagatctacccagaggagatcacccccctgctgcctgccatctctggagagaagattgctgaggaccagacctgcttcttcctgcagatcctgctgaagtacatggtgatccaggccgccagcctggagtggaagaacaaggagaaccaggacaccggcttcaagttcctgttcaccctcttcaggaagtactacctgccccacctgttccccagcttcaccaagctgaccaacatctacaagcctgtgctggacatcccccacctgcggcccaagcctgtgtacatcaccaccaccaggtag

SEQ ID NO: 21318 - DNA, 846 bp, synthetic construct
  source 1..846: mol_type = other DNA; note = Synthetic coding sequence
atgggagacacagtggtggagcccgcccccctgaagcccaccagcgagcccaccagcggccccccaggcaacaatggaggcagcctgctgagcgtcatcacagagggcgtgggggagctgtctgtgattgatcctgaggtggcccagaaggcctgccaggaggtgctggagaaggtgaagctgctgcatggaggagtggccgtgagcagccggggcacccccctggagctggtgaatggagatggagtggacagcgagatccgctgcctggatgatcctccagcccagatccgggaggaggaggatgagatgggcgctgctgtggccagcggcacagccaagggggccaggagaagacggcagaacaacagcgccaagcagagctggctgctgcggctgtttgagagcaagctgtttgacatctccatggccatctcctacctgtacaacagcaaggagcccggggtgcaggcctacatcggcaacagactcttctgcttcagaaatgaagatgtggacttctacctgccccagctgctgaacatgtacatccacatggatgaagatgtgggagatgccatcaagccctacatcgtgcaccgctgccggcagagcatcaacttcagcctgcagtgtgccctgctgctgggcgcctacagcagtgacatgcacatcagcacccagaggcacagccggggcaccaagctgaggaagctgatcctgagtgatgagctgaagccagcccacaggaagcgggagctgcccagcctgagccctgccccagacaccggcctgagccccagcaagaggacccaccagaggagcaagagtgatgccacagcctag

SEQ ID NO: 21319 - DNA, 591 bp, synthetic construct; identical to SEQ ID NO: 19409
  source 1..591: mol_type = other DNA; note = Synthetic coding sequence

SEQ ID NO: 21320 - DNA, 1620 bp, synthetic construct; identical to SEQ ID NO: 19050
  source 1..1620: mol_type = other DNA; note = Synthetic coding sequence

SEQ ID NO: 21321 - DNA, 1086 bp, synthetic construct
  source 1..1086: mol_type = other DNA; note = Synthetic coding sequence
gtcaccacagagaagacctacaccagcaccagcaacaacagcatcagcggcagcctgaagaggctggaggacaccacagcccgcttcaccaatgccaacttccaggaggtgtctgcccacaccagcagcggcaaggatgtgtctgagacccggggcagcgagggcaagggcaagaagagcagcgcccacagcagcggccagaggggcaggaagccaggcggcggcaggaaccctggcaccaccgtgtctgctgccagccccttcccccaggccggctacaagagggcccagaccagcggcatcgaggaggagaccgtgaaggagaagaagaggaagggcaacaagcagagcaagcacggccctggccggcccaagggcaacaagaaccaggagaatgtgagccacctgtctgtgagcagcgccagccccaccagctctgtggccagcgctgctggcagcatcaccagcagcagcctgcagaagagccccaccctgctgagaaatggcagcctgcagagcctgtctgtgggcagcagccctgtgggcagcgagatctccatgcagtacagacatgatggagcctgccccaccaccaccttcagcgagctgctgaatgccatccacaatgacagaggagacagcagcaccctgaccaagcaggagctgaagttcatcggcatctacaacagcaatgatgtggccgtgtccttccccaacgtggtgtctggcagcggcagcagcacccctgtgagcagcagccacctgccccagcagagcagcggccacctgcagcaggtgggcgccctgagccccagcgctgtgagcagcgctgccccagctgtggccaccacccaggccaacaccctgagcggcagcagcctgagccaggcccccagccacatgtatggcaacagaagcaacagctccatggccgccctgattgcccagagcgagaacaaccagacagaccaggacctgggggacaacagcaggaacctggtgggccggggcagcagcccccggggcagcctgagccccaggagccctgtgagcagcctgcagatccgctatgaccagcccggctag

SEQ ID NO: 21322 - DNA, 426 bp, synthetic construct
  source 1..426: mol_type = other DNA; note = Synthetic coding sequence
atggctgctgcccctccttcctactgctttgtggccttccccccccgggccaaggatggcctggtggtgtttgggaagaacagcgcccggcccagagatgaggtgcaggaggtggtgtacttctctgctgctgaccacgagcctgagagcaaggtggagtgcacctacatcagcattgaccaggtgcccaggacctacgccatcatgatcagcaggcctgcctggctgtggggcgctgagatgggcgccaatgagcacggcgtgtgcatcgccaatgaggccatcaacacccgggagcctgctgctgagattgaggccctgctgggcatggacctggtgcggctgggcctggagcggggggagacagccaaggaggccctggatgtgattgtgtccctgctggaggagcacggccagggcggctag

SEQ ID NO: 21323 - DNA, 573 bp, synthetic construct
  source 1..573: mol_type = other DNA; note = Synthetic coding sequence
tgacagctggccgccctgaaggagatccaggccgaggtgcaggagaaggagagtgatgctgtgaagcccaagaaccaggacatccagggcggcaaggccgccccagctgaggccctgggcatcccagatgagcactacctggacaacctgtgcatcttctgtggggagaggtctgagagcttcacagaggagggcctggacctgcactactggaagcactgcctgatgctgacccgctgtgaccactgcaagcaggtggtggagatcagcagcctgacagagcacctgctgacagaatgtgacaagaaggatggctttgggaagtgctaccgctgcagcgaggccgtgttcaaggaggagctgcccaggcacatcaagcacaaggactgcaacccagccaagccagagaagctggccaaccgctgccccctgtgccacgagaacttcagccctggagaggaggcctggaaggcccacctgatgggccctgctggctgcaccatgaacctgaggaagacccacatcctgcagaaggccccagccctgcagcccggggagggccagaggaggtag

SEQ ID NO: 21324 - DNA, 723 bp, synthetic construct
  source 1..723: mol_type = other DNA; note = Synthetic coding sequence
atgacagtgggcaagagcagcaagatgctgcagcacatcgactacaggatgcgctgcatcctgcaggacggccgcatcttcatcggcaccttcaaggcctttgacaagcacatgaacctgatcctgtgtgactgtgatgagttcaggaagatcaagcccaagaacagcaagcaggccgagcgggaggagaagagggtgctgggcctggtgctgctgcggggggagaacctggtgtccatgacagtggagggccccccacccaaggacaccggcatcgcccgggtgcccctggccggggctgctgggggccctggcatcggccgggccgccggccggggcatcccagctggggtgcccatgccccaggccccagctggcctggccggccctgtgcggggcgtgggcggccccagccagcaggtgatgaccccccagggccggggcaccgtggccgctgctgctgctgctgccacagccagcattgctggggcccccacccagtacccacctggccggggcggccccccaccacccatgggccgcggggcccctcctcctggcatgatgggccccccacctggcatgaggcctcccatgggcccccccatgggcatccccccaggccggggcacccccatgggcatgcctcctcctggcatgaggcctcctcctcctggcatgaggggccccccacctcctggcatgaggcctccccggccctag

SEQ ID NO: 21325 - DNA, 420 bp, synthetic construct
  source 1..420: mol_type = other DNA; note = Synthetic coding sequence
atggagacagactgcaaccccatggagctgagctccatgagcggctttgaggagggcagcgagctgaatggatttgagggcacagacatgaaggacatgaggctggaggccgaggccgtggtgaatgatgtgctgtttgctgtgaacaacatgtttgtgtccaagagcctgcgctgtgctgatgatgtggcctacatcaacgtggagaccaaggagaggaaccgctactgcctggagctgacagaagctggcctgaaggtggtgggctacgcctttgaccaggtggatgaccacctgcagaccccctaccacgagaccgtgtacagcctgctggacaccctgagccctgcctaccgggaggcctttggaaatgccctgctgcagaggctggaggccctgaagagagatggccagagctag

SEQ ID NO: 21326 - DNA, 606 bp, synthetic construct
  source 1..606: mol_type = other DNA; note = Synthetic coding sequence
atggccggcctggaggtgctgtttgccagcgctgccccagccatcacctgccggcaggatgccctggtgtgcttcctgcactgggaggtggtgacccacggctacttcggcctgggcgtgggggaccagcccggccccaatgacaagaagtctgagctgctgcctgctggctggaacaacaacaaggacctgtatgtgctgcgctatgagtacaaggatggcagcaggaagctgctggtgaaggccatcaccgtggagagctccatgatcctgaatgtgctggagtatggcagccagcaggtggccgacctgaccctgaacctggatgactacattgatgctgagcacctgggggacttccaccgctgtgaccccctgggcccctttgtggtgggcggggaggacctggaccccttcggcccccggcggggcggcatgattgtggaccccctgcggagcggcttcccccgggccctgattgaccccagcagcggcctgcccaaccggctgcccccaggagctgtgcccccaggggccaggtttgaccccttcggccccatcggcaccagccccccaggccccaggccagaccggcggggccagtag

SEQ ID NO: 21327 - DNA, 747 bp, synthetic construct; identical to SEQ ID NO: 20797
  source 1..747: mol_type = other DNA; note = Synthetic coding sequence

SEQ ID NO: 21328 - DNA, 1842 bp, synthetic construct; identical to SEQ ID NO: 18580
  source 1..1842: mol_type = other DNA; note = Synthetic coding sequence

SEQ ID NO: 21329 - DNA, 1620 bp, synthetic construct; identical to SEQ ID NO: 19050
  source 1..1620: mol_type = other DNA; note = Synthetic coding sequence

SEQ ID NO: 21330 - DNA, 1089 bp, synthetic construct
  source 1..1089: mol_type = other DNA; note = Synthetic coding sequence
atggcccccaagccaggagctgagtggagcacagccctgagccacctggtgctgggcgtggtgtccctgcatgctgctgtgtccacagctgaggccagcagaggagctgctgctggcttcctgctgcaggtgctggccgccaccaccaccctggcccctggcctgagcacccatgaggactgcctggccggggcctgggtggccaccgtgattggcctgcccctgctggcctttgacttccactggtgcaccaacggccacctgatgtgtgccggctgcttcatccacctgctggctgatgcccggctgaaggaggagcaggccacctgccccaactgccgctgtgagatcagcaagagcctgtgctgcaggaacctggccgtggagaaggctgtgtctgagctgcccagtgaatgtggcttctgcctgcggcagttccccaggagcctgctggagcggcaccagaaggaggagtgccaggacagagtgacccagtgcaagtacaagagaattggctgcccctggcacggccccttccacgagctgactgtgcatgaagctgcctgtgcccaccccaccaagacaggcagcgagctgatggagatcctggatggcatggaccagagccacaggaaggagatgcagctgtacaacagcatcttcagcctgctgagctttgagaagattggctacacagaggtgcagttccggccctacagaacagatgacttcatcacccggctgtactatgagaccccccgcttcaccgtgctgaaccagacctgggtgctgaaggcccgggtgaatgattctgaaagaaaccccaacctgagctgcaagaggaccctgtccttccagctgctgctgaagagcaaggtgacagcccccctggagtgcagcttcctgctgctgaagggcccctatgatgatgtgcgcatcagccctgtgatctaccactttgtgttcaccaatgaaagcaatgaaacagattatgtgcccctgcccatcattgattctgtggagtgcaacaagctgctggccgccaagaacatcaacctgcggctcttcctgttccagatccagaagtag

SEQ ID NO: 21331 - DNA, 273 bp, synthetic construct; identical to SEQ ID NO: 21270
  source 1..273: mol_type = other DNA; note = Synthetic coding sequence

SEQ ID NO: 21332 - DNA, 2502 bp, synthetic construct
  source 1..2502: mol_type = other DNA; note = Synthetic coding sequence
atggctgtggaggacagcaccctgcaggtggtggtgcgggtgcggccccccaccccccgggagctggacagccagaggaggcctgtggtgcaggtggtggatgagcgggtgctggtgttcaaccctgaggagccagatggcggcttccctggcctgaagtggggcggcacccatgatggccccaagaagaagggcaaggacctgacctttgtgtttgacagagtgtttggagaggccgccacccagcaggatgtgttccagcacaccacccacagcgtgctggacagcttcctgcagggctacaactgcagcgtgtttgcctacggggccactggagctgggaagacccacaccatgctgggccgggagggggaccccggcatcatgtacctgaccaccgtggagctgtaccgccgcctggaggcccggcagcaggagaagcactttgaggtgctgatctcctaccaggaggtgtacaatgagcagatccatgacctgctggagcccaagggccccctggccatcagagaagatcctgacaagggcgtggtggtgcagggcctgtccttccaccagcctgccagcgctgagcagctgctggagatcctgacccggggcaacagaaacagaacccagcaccccacagatgccaatgccaccagcagccgcagccacgccatcttccagatctttgtgaagcagcaggacagagtgcccggcctgacccaggccgtgcaggtggccaagatgagcctgattgacctggccggcagcgagcgggccagcagcacccacgccaagggggagcggctgcgggagggcgccaacatcaacagaagcctgctggccctgatcaacgtgctgaatgccctggctgatgccaagggcaggaagacccacgtgccctacagagacagcaagctgacccggctgctgaaggacagcctgggcggcaactgcaggacagtgatgattgctgccatcagccccagcagcctgacctatgaggacacctacaacaccctgaagtatgctgaccgggccaaggagatccggctgagcctgaagagcaatgtgaccagcctggactgccacatcagccagtatgccaccatctgccagcagctgcaggccgaggtggccgccctgaggaagaagctgcaggtgtatgagggcggcggccagcccccaccccaggacctgcccggcagccccaagagcggccccccacctgagcacctgcccagcagccccctgcccccccacccccccagccagccctgcaccccagagctgcctgctggcccccgggccctgcaggaggagagcctgggcatggaggcccaggtggagcgggccatggagggcaacagcagtgaccaggagcagagcccagaagatgaagatgagggccctgctgaggaggtgcccacccagatgcctgagcagaaccccacccacgccctgcctgagagcccccggctgaccctgcagcccaagcctgtggtgggccacttcagcgcccgggagctggatggagacaggagcaagcagctggccctgaaggtgctgtgtgtggcccagaggcagtacagcctgctgcaggccgccaacctgctgaccccagacatgatcacagaatttgagaccctgcagcagctggtgcaggaggagaagattgagcccggggctgaggccctgcggaccagcggcctggcccggggggcccccctggcccaggagctgtgcagcgagagcatccctgtgcccagccccctgtgcccagagcccccaggctacacaggccctgtgaccaggaccatggcccggcggctgagcggccccctgcacaccctgggcatccccccaggccccaactgcaccccagcccagggcagccgctggcccatggagaagaagagaagaagaccttctgccctggaggccgacagccccatggcccccaagaggggcaccaagaggcagaggcagagcttcctgccctgcctgcggcggggcagcctgcctgacacccagcccagccagggccccagcacccccaagggggagcgggccagcagcccctgccacagcccccgggtgtgcccagccaccgtcatcaagagccgggtgcccctgggccccagcgccatgcagaactgcagcacccccctggccctgcccacccgggacctgaatgccacctttgacctgtctgaggagccccccagcaagcccagcttccacgagtgcatcggctgggacaagatcccccaggagctgagccggctggaccagcccttcatcccccgggcccctgtgcccctcttcaccatgaagggccccaagcccaccagcagcctgcccggcaccagcgcctgcaagaagaagagggtggccagcagctctgtgagccacggccgcagcagaattgcccggctgcccagcagcaccctgaagaggcctgctggccccctggtgctgcccggggactggcactag

SEQ ID NO: 21333 - DNA, 1842 bp, synthetic construct; identical to SEQ ID NO: 18580
  source 1..1842: mol_type = other DNA; note = Synthetic coding sequence

SEQ ID NO: 21334 - DNA, 654 bp, synthetic construct
  source 1..654: mol_type = other DNA; note = Synthetic coding sequence
atgaacagccagccccagaccaggagccccttcttccagaggccccagatccagcccccccgggccaccatccccaacagcagccccagcatccggcctggggcccagacccccacagctgtgtaccaggccaaccagcacatcatgatggtgaaccacctgcccatgccctaccctgtgccccagggcccccagtactgcatcccccagtaccgccacagcggccccccctacgtgggccccccccagcagtaccctgtgcagcccccaggccctggccccttctacccaggccctggccctggggacttccccaatgcctacggcacccccttctaccccagccagcctgtgtaccagagcgcccccatcatcgtgcccacccagcagcagcccccaccagccaagcgggagaagaagaccatccgcatccgggaccccaaccagggcggcaaggacatcacagaggagatcatgtctgggggcggcagcaggaaccccaccccacccatcggccggcccaccagcacccccaccccaccccagcagctgcccagccaggtgcctgagcacagccctgtggtgtatggcaccgtggagagcgcccacctggccgccagcacccctgtgacagctgccagtgaccagaagtag

SEQ ID NO: 21335 - DNA, 969 bp, synthetic construct
  source 1..969: mol_type = other DNA; note = Synthetic coding sequence
atgtacttctgctggggcgctgacagccgggagctgcagaggagaagaacagctggcagccctggagctgagctgctgcaggccgccagcggggagcggcacagcctgctgctgctgaccaaccaccgggtgctgagctgtggggacaacagccggggccagctgggcagaagaggagcccagagaggagagctgcctgagcccatccaggccctggagaccctcatcgtggacctggtgtcctgtgggaaggagcacagcctggccgtgtgccacaagggccgggtgtttgcctggggcgccggcagcgagggccagctgggcattggagagttcaaggagatctccttcacccccaagaagatcatgaccctgaatgacatcaagatcatccaggtgtcctgtggccactaccacagcctggccctgagcaaggacagccaggtgttctcctggggcaagaacagccacggccagctgggcctgggcaaggagttccccagccaggccagcccccagagggtgcgcagcctggagggcatccccctggcccaggtggccgccggcggggcccacagctttgccctgagcctgtgtggcaccagctttggctggggcagcaacagcgctggccagctggccctgagcggcagaaatgtgcctgtgcagagcaacaagcccctgtctgtgggcgccctgaagaacctgggcgtggtgtacatcagctgtggagatgcccacacagctgtgctgacccaggacggcaaggtgttcaccttcggggacaacagaagtggccagctgggctacagccccaccccagagaagaggggcccccagctggtggagagaattgatggcctggtgtcccagattgactgtggccgcctgcggggctgcagcagccagacccacttctgctggaacatctgccagctgtgtgacaacagctctgtgaagctggagtag

SEQ ID NO: 21336 - DNA, 1743 bp, synthetic construct
  source 1..1743: mol_type = other DNA; note = Synthetic coding sequence
atgagggccctgactgtgcagagggtgaagtttgccatggacctgcccctgctgaagagagctggccaggacctggccgagaagaccaagaactttgtgagccgcagcctggtgattggagaggtgctgtccatggctgacatggccaccggggtgaagtgtggcatcatctactggctgtttggaggagccatccggaacctgggcagccctgagcacgtgaccaagtggttccagcccctgcaggagcagaagtacacaggcatgtttgccatgacagagcggggccacggcagcaatgcccggggcatccagacagaggccacctttgacctgagcgcccaggagtttgtgattgacaccccctgtgaaaatgctgagaagatgtacatcggaaatgccatgtatggcaactatgctgctgtgtttgcccagctgatcattgatggccgcagccagggcccccactgcttcatcgtgcctgtgagagatgaaaatggcagcctgtacccaggagtgacagccatcgacatgatgtacaaggagggcctgcatggagtggacaatggcatcctgatctttgacaaggtgcgcatcccccgggagaacctgctggacaagtttggatctgtggccccagatggccagtaccacagccccatccggaacaagagcgcccgcttcaatgccatgctggccgccctgacccccagccggctggccgtggccttccaggccatgggcgccatgaagctgggcctgaccatcgccatccgctacagccacagccggcggcagtttggccccaagaccaaggaggaggtgaagatcatcgagcaccagacccagaccctgcggctgatgccccacctggccacagccctggccctgacctttgtgagccgctatgctggggccctgctggatgaagatgtgttccagggcaaggagctggtgaacagccgcagcctgcaggccctggtggccggcctgaaggcctacagcacctgggagaacatccgctgcctgcaggactgccgggagtgcaccggcggcatggtggtgggccgggagctgctggcccagtacaccaagcagtatgaggagaagcccctgtttggcctgctgcagaactgggccgagagcgtgggggacaagctgcggaccagcttcctggccttcaacatggacacagtggatgacctggccttcctgctgaaggctgtgaagttccgggagcgggtgctgcagaggggcctggtggcccgcatctactacaaggtgaagaccaagaaggaggacttcttccacgcctggaacagctgcctgcaccacgtggccagcctgagcctggcccacacccaccgggtgaccctggagcagttcagcctggccgtgaagagctgcccagaccaggaggaccagaccctgctgatgaagttctgcctgctgtatggcaccaagctggtgttccaggagcgggcctggtacctggagcacaagtacctgacccccatggccagcacccgcatccggaaccagctgctggacctgtgtgacagcgtgaaggatgatgcccggcgggtcatcagcaccttcaacatcccccacacctacctgcacgcccccatcgccggcatcagcaacccccgggccgcctgggccttctacccagcccccctgcagccccggccccgggaggaggcccggagccggcggcccaagctgggcgccaagctgtag

SEQ ID NO: 21337 - DNA, 561 bp, synthetic construct
  source 1..561: mol_type = other DNA; note = Synthetic coding sequence
atgggcgtgaaccagagcgtgggcttcccccctgtgacaggcccccacctggtgggctgtggagatgtgatggagggccagaacctgcagggcagcttcttccgcctcttctacccctgccagaaggccgaggagaccatggagcagcccctgtggatccccaggtatgagtactgcaccggcctggccgagtacctgcagttcaacaagagatgtggcggcctgctcttcaacctggccgtgggcagctgccgcctgcctgtgtcctggaatggccccttcaagaccaaggacagcggctaccccctcatcatcttcagccacggcctgggcgccttccgcaccctgtacagcgccttctgcatggagctggccagccggggctttgtggtggccgtgcctgagcaccgctgtgtgtacttccgggacagatctgctgccaccacctacttctgcaagcaggcccctgaggagaaccagcccaccaatgaaagcctgcaggaggagtggatccccttccggcgggtggaggagggggagaaggagttccacgtgaggtag

SEQ ID NO: 21338 - DNA, 1620 bp, synthetic construct; identical to SEQ ID NO: 19050
  source 1..1620: mol_type = other DNA; note = Synthetic coding sequence

SEQ ID NO: 21339 - DNA, 2613 bp, synthetic construct
  source 1..2613: mol_type = other DNA; note = Synthetic coding sequence
atgagcaggaaccccagcagcaacagccctgaggaggacacagtgcctgtgcccaagggctctgtgcctgctgcccggcccagccggggcggcatgtctgtggtgggcatcgacctgggcttcctgaactgctacatcgctgtggcccggagcggcggcatcgagaccatcgccaatgagtacagcgaccgctgcaccccagcctgcatcagcctgggcagcaggacccgggccatcggaaatgctgccaagagccagatcgtgaccaacgtgaggaacaccatccacggcttcaagaagctgcacggccgcagctttgatgaccccatcgtgcagacagagcgcatccggctgccctatgagctgcagaagatgcccaatggatctgctggggtgaaggtgcgctacctggaggaggagcggccctttgccatcgagcaggtgacaggcatgctgctggccaagctgaaggagaccagtgaaaatgccctgaagaagcctgtggccgactgtgtgatcagcatccccagcttcttcacagatgctgagcggcgctctgtgatggccgccgcccaggtggccggcctgaactgcctgcggctgatgaatgagaccacagctgtggccctggcctacggcatctacaagcaggacctgccccccctggatgagaagcccagaaatgtggtgttcatcgacatgggccacagcgcctaccaggtgctggtgtgtgccttcaacaagggcaagctgaaggtgctggccaccacctttgacccctacctgggcggcaggaactttgatgaggccctggtggactacttctgtgatgagttcaagaccaagtacaagatcaacgtgaaggagaacagccgggccctgctgcggctgtaccaggagtgtgagaagctgaagaagctgatgtctgccaatgccagtgacctgcccctgaacatcgagtgcttcatgaatgacctggatgtgagcagcaagatgaacagagcccagtttgagcagctgtgtgccagcctgctggcccgggtggagccccccctgaaggctgtgatggagcaggccaacctgcagcgggaggacatcagcagcattgaaattgtgggcggggccacccgcatcccagctgtgaaggagcagatcaccaagttcttcctgaaggacatcagcaccaccctgaatgctgatgaggccgtggcccggggctgtgccctgcagtgtgccatcctgagccctgccttcaaggtgcgggagttcagcatcacagacctggtgccctacagcatcaccctgcgctggaagaccagctttgaagatggcagcggagaatgtgaggtgttctgcaagaaccacccagcccccttcagcaaggtgatcaccttccacaagaaggagccctttgagctggaggccttctacaccaacctgcacgaggtgccctacccagatgcccgcatcggcagcttcaccatccagaatgtgttcccccagagtgatggagacagcagcaaggtgaaggtgaaggtgcgggtgaacatccacggcatcttctctgtggccagcgcctctgtgattgagaagcagaacctggagggggaccacagtgatgcccccatggagacagagaccagcttcaagaatgaaaacaaggacaacatggacaagatgcaggtggaccaggaggagggccaccagaagtgccacgccgagcacaccccagaggaggagattgaccacactggagccaagaccaagtctgctgtgtctgacaagcaggaccggctgaaccagaccctgaagaagggcaaggtgaagagcattgacctgcccatccagagcagcctgtgccggcagctgggccaggacctgctgaacagctacattgaaaatgaaggcaagatgatcatgcaggacaagctggagaaggagagaaatgatgccaagaatgctgtggaggagtatgtgtatgacttccgggaccggctgggcaccgtgtatgagaagttcatcaccccagaggacctgagcaagctgtctgctgtgctggaggacacagagaactggctgtatgaagatggagaggaccagcccaagcaggtgtatgtggacaagctgcaggagctgaagaagtatggccagcccatccagatgaagtacatggagcacgaggagcggcccaaggccctgaatgacctgggcaagaagatccagctggtgatgaaggtgattgaggcctacagaaacaaggatgaaagatatgaccacctggaccccacagagatggagaaggtggagaagtgcatcagtgatgccatgtcctggctgaacagcaagatgaatgcccagaacaagctgagcctgacccaggaccctgtggtgaaggtgtctgagatcgtggccaagagcaaggagctggacaacttctgcaaccccatcatctacaagcccaagcccaaggccgaggtgcctgaggacaagcccaaggccaacagcgagcacaacggccccatggatggccagagcggcacagagaccaagagtgacagcaccaaggacagcagccagcacaccaagagcagcggggagatggaggtggactag

SEQ ID NO: 21340 - DNA, 5463 bp, synthetic construct
  source 1..5463: mol_type = other DNA; note = Synthetic coding sequence
atggagcccccccaggagaccaaccggcccttcagcaccctggacaacagaagtggccaggtgcaggtgctgagcgccacccccctgctgcagaggaacccctacagcagcccagacatcatgcacatcaagggcagcgaggccagctctgtgccctatgccctgaaccagggcaccacagccctgcccaagaacaagaaccaggagggcaccggccaccggctgctgaacatgctgaggaagaccctgaaggagagtgacagcgaggagctggagatcacccaggagacccccaacctggtgccctttggagatgtggtgggctgcctgggcatccacatcaagaactgccgccacttcatgcccaagatcagcctgcagcactacgccaacctcttcatccgcatcagcatcaacaaggctgtgaagtgcaccaagatgtgcagcctgctgagcaagaatgatgagaagaacacagtcatcaagtttgatgaggtgaagtacttctctgtgcaggtgcccaggagatatgatgacaagaggaacaacatcctgctggagctgatccagtatgacaaccgggagaagagggccttcctgctgggctctgtgcagatccacctgtatgaagtcatccagaagggctgcttcatcgaggaggtgcaggtgctgcacggcaacatctttgtgtgccgcctggaggtggagttcatgttctcctatggcaactttggctacggcttcagccaccagctgaagcccctgcagaagatcacagagcccagcatgttcatgaacctggcccctcctcctgagaggacagatcctgtgaccaaggtgatcaccccccagacagtggagtacccagccttcctgagcccagacctgaatgtgacagtgggcaccccagctgtgcagagcagcaaccagcccagcgtggtgcggctggagaagctgcagcagcagccccgggagcggctggagaagatgaagaaggagtacagaaacctgaacacctggattgacaaggccaactacctggagagcatcctgatgcccaagctggagcacaaggacagcgaggagaccaacattgatgaggccagcgagaacaccaagagcaaccaccctgaggaggagctggagaacatcgtgggcgtggacatccccctggtgaatgaggaggccgagaccacagccaatgagctgctggacaatgacagcgagaagggcctgaccatccccaccctgaaccagagcgaccaggacaacagcacagcagatgccagcaagaatgatgagagcacccccagccccacagaggtgcacagcctgtgcaccatcagcaaccaggagaccatcaaggccggccgcatcccccccctgggggagcggcagagcgagagcatgccagacaggaagatgaagaatgtgttcttccccctggaggtgaagctgaaggacaactaccccagcatcctgaaggctgacagcagcctgtctgaggtggccttcagccccaaggagtacaacagccccagcttccggcctgagtacatcgagttcaagcccaagttccagttccagaagttcaacaagaatggatttgaccccttcctgaggaacatcaacaagatgtctgtgaggaagaggaaggaccaggacatctacaagtacagaaacatcctgggcgctgaggtgattgaacatgaggaccaggaccccccctacccagcccagagcaagacagctggccctgccaacaccacctgggcccatgaccccaacatcttcaccaccaagatgctggagacagagaacaagctggccccagaccccaccatcaacaccatcaagggcctggacaccaagaacagcctgaaggagaacctgcccaacgtgtccctgcccagcatcaagggggagagcagcagagctggaaatgtgcaggccaacacctgccacctgagcaagagcctgaacttcaccccccacatcgagtacctgaagcagagcatgatcctgaagagcatcctgtctgagaacctgcaggacctgagtgacaagctgttcagcaagccagaggtgtccatgaacagcgaggcccgggagaagagcagcagccccctgctgagcatccatgacaagagcagcagctccatggaggacaacgtgctggagaagaagcaggacctgaacaactggctgtctgagaaggacatcctgaacagcaagaccaccctgagccagatcatcaagaacatcccagctgacagcttcagcgagggcagccagatcatcgagaacatcccagctgacagcctgctggagggcggccaggtgatcaagaacatccctgagtacagcctgtctgagggcggccagatcatcaagaacatcccagctgacagcttcctggagagcggccctggccagagccctgaggtggaggagcacgtgtccaagaagcactttgaagcagatgagcgggacttccccatcaagaagaacagcagcaccaagaagaagcacctgatcagcgaggtgcccaacagcaagagcggcagcagcggcaccgtgcatgactacatcatgaggcagatcttcaccgcccccatcttcagcgagctggagattgaggtgaaggagcccagcgagacccccatgaacctggagaaccagctgcccaccccctggaagaggagcctgagcagccacatcctcttccacgaggagaatgctgatgaaattgagctgccccagcccaggtctgccaccagccagatcatccaggccttccccatcgacaccctgctggagagcggcatcatcaaggtgattgagctggacaaggagcaccacaagagcagcctgctgggcaccggcatcaccagccccaagggcaacctgaaggacagccaggagtactacagcgagatccgctcagaaacagagcccctgtctgagcagagcatccccatcatccccaaggacaccacctctgtgtccagagctgagttcatccaggaggaccagaacatgttcccccaggacagcagctactacagcatcgccaacaaggagctgtacctgcccagaaatggccagaggctgtgcaaggacaagaatgacctgagcagcaccctggagagcctgaccaacagcctgatggacaagctgtctgagagtgatgagatcatgctgaagagcttcctgaagaacatcttcaacgtgttcttcaagtacaaccacagcgagcggcggggccagcctgagaaggagctggagcggctcatccagcccagcttcaccagtgacacagagcacctggaggagctgcaggaggactttgacaaggctgacaagctggacaggaagcccatcctgagccccaagctgcgggtcttcctggaggagctgtctgagagcgaggtgaagcacctgaagtctgagctgagcaagcagatccagcactacctggtggagcggctgtctgagagcggccacatcaccaaggaggacctgcccaagatctaccagaacctgtacctgatgaatgagaaggccgagcagaagggccccaacagcttccagggcaagtacagcgagaccgtgaaggagatcatgagctttgtgaacaacttcaaccaccacttcatcgacaagcacctggagatcaagctgcggagcttcctgaaggagatcctgcagaactacttcctgaagaacatcagcgagagcagcctcttcaatgaaacagccagcgagaccatctaccccaacatcagcagcctgcggaccaagtctgtgtccatctccttccacgagctggagcaggacatcagcaagggcagctttggccgccgctttgagatcaacatgaagtaccccctgagcaagagcctgcagaactacctgattgccctgtctgaaaatgagctgctgcacctgaaggctgacctgagcaagcacctgcagagcctcttcatcgagaagctgagcaagagcggcctgatgaccaagaagcagctggagggcatcaaccagcacatcaacctgctgaacagcagcagcatccccctgaagtacatcaagacccacctgcccttcagagatgactgccactttgtggagaagcacagcgagaagcagaacaagtacagccgcatcgtgcagcagaccaccctgcagacagtgtctgaggacaagctgcgggaggccgagctgatccgggagaaggagaagaagtacttccccctgcagaacctgaagggcaacagcagcctcatcaaggagcagaagagctactacaccaaggaggaggccaagacccccagcctcatcaaggtgcagcccagcagcaatgaaaacatccaggccagccccctgagcaagagcagcgagatcctgacagacatcctgctgaagaagctgaggaaggagcacgtgttcacccagctgccccaggctgaaaattctgtgcacaagacagagatccaggacccctacagctggggcggcaagagcaagatcacccagagcaaggcctggtgtgagaagaccctgaagatgaagagcctggacaggaaggagcacgtgaacatctacaagtggacagtgcaggagaagccagaggccgtgctgaccagctacccccgcatccccaatgccaggatgccccgggaggatgagtacctgaaccgcatcaccttccccagctggcagagcagcaccctgacccacttcaacacagagaccggggagaagagcaagctggaggaccagtactgccagaccctgaagggcaacaacaacaacaacaagaagcacctggtgacctttgcccagtacaagaaggagatccagaccctgtacatcaagccagatgagatctgcagcgagaagtgtgccaagtttcctgagatccagagcttccagtacaaggtggtggaggatgagaagaacctgaagccccacctgtttcctgagctgttcaagattgaggacctgaagcccaaggtgaggaaggagcgggacagagtggcccagcccaagaagagcttcaacaagatcgtgcgcatcctgcccaccaccctgcccaccacccgcatccacctgaagaagtctgtgcccaggaccctgctgcactggacagcccggaggaccatccatgactgcagcgacaagtttgaggacctgcatgacatgaccagcttcacccacctgaagaaggtgaagagccgcagccggctgctgggcaagagcagtgatgacatccacaaccacgcccggcacagcgcccggccctacacagcccctgaggtgaacaagcagcgggagagctacagcggcaagttcaccagcaggaggatggtgagcagcggcctggtgcacatcaatgacaagaccagtgactatgagatgcacaagatgaggcccaagaagatcaagaggggctactag

SEQ ID NO: 21341 - DNA, 498 bp, synthetic construct
  source 1..498: mol_type = other DNA; note = Synthetic coding sequence
atggagcccacccgggactgccccctgtttggaggagccttcagcgccatcctgcccatgggcgccattgatgtgtctgacctgcggcctgtgcctgacaaccaggaggtgttctgccaccctgtgacagaccagagcctcatcgtggagctgctggagctgcaggcccacgtgcggggggaggccgccgcccgctaccactttgaagatgtgggcggcgtgcagggcgcccgggctgtgcacgtggagagcgtgcagcccctgagcctggagaacctggccctgcggggccgctgccaggaggcctgggtgctgagcggcaagcagcagatcgccaaggagaaccagcaggtgcgggcccgggagtgtgtgatgtcctggaagggcggcagcggagatgctgagatccaggtgtccatcctgaccctcatccccctgggcagcaagggccgggacaccagcagcggcctggccgaggccgcccctgtgcctgactag

SEQ ID NO: 21342 - DNA, 4482 bp, synthetic construct
  source 1..4482: mol_type = other DNA; note = Synthetic coding sequence
atggccagcatcacccagctgtttgatgacctgtgtgaggccctgctgcctgctgccaagacccacctgggccagaggtctgtgaacaggaagagggccaagaggagcctgaagaaggtggcctacaatgccctcttcaccaacctcttccaggatgagacccagcagctgcagcctgacatgagcaagctgcctgccaggaacaagatcctgatgctgagctttgacctgcgggtgggcggcctgggccccaaggctgaccggctggaggagctggtggaggagctggaggccgccccctgctgccccctgctggaggtgggctctgtgctggacctgctggtgcagctggccggcagcggccccccccaggtgctgcccaggaagagggactacttcctgaacaacaagcacgtgggcagaaatgtgccctacagcggctatgactgtgatgacctgtctgtgtttgagatggatgtgcagagcctcatcagccgggaggagtgcctgtgccacagcatgatccaggagaccctgcaggtgatggaggccgcccctggcaccggcctgcccaccgtgggcctcttctcctttggagacccctgtggggacagatttgagcgggacaccagggtgtccctgtttggagccctggtgcacagcaggacctatgacatggatgtgcggctgggcctgccccctgtgcctgacaatgctgacctgagcggcctggccatcaaggtgcccccatctgtggaccagtgggaggatgagggcttccagagcgccagcaacctgaccccagacagccagagcgagcccagcgtgaccccagatgtggacctgtgggaggccgccctgacctatgaggccagcaagaggcgctgctgggagcgggtgggctgccccccaggccaccgggaggagccctacctgacagaagctggaagagatgcctttgacaagttctgccgcctgcaccagggcgagctgcagctgctggccggcggcgtgctgcaggccccccagcctgtgctggtgaaggaatgtgagctggtgaaggatgtgctgaatgtgctgattggagtggtgtctgccaccttcagcctgtgccagcctgcccaggcctttgtggtgaagaggggcgtgcacgtgtctggggccagccctgagagcatcagcagcctgctgtctgaggtggccgagtatggcacctgctacacccggctgagccacttcagcctgcagcctgtgctggacagcctgtacagcaagggcctggtgttccaggccttcaccagcggcctgcggcgctacctgcagtactaccgggcctgtgtgctgagcaccccacccaccctgagcctgctgaccatcggcttcctgttcaagaagctgggccggcagctgcgctacctggccgagctgtgtggggtgggcgctgtgctgcccggcacctgtggcggcggccccagggctgccttccccactggagtgaagctgctgagctacctgtaccaggaggccctgcacaactgcagcaatgagcactaccctgtgctgctgagcctgctgaagaccagctgtgagccctacacccgcttcatccatgactgggtgtacagcggggtcttcagagatgcctatggagagttcatgatccaggtgaaccacgagtacctgtccttccgggacaagctgtactggacccacggctacgtgctgatcagcaaggaggtggaggactgtgtgcctgtgttcctgaagcacatcgcccatgacatctacgtgtgtgggaagaccatcaacctgctgaagctgtgctgccccaggcactacctgtgctggagcgatgtgcctgtgccccgcatcagcgtcatcttcagcctggaggagctgaaggagattgagaaggactgtgctgtgtatgtgggccgcatggagcgggtggcccggcacagctctgtgtccaaggaggagaaggagctgaggatggagatcgccaagcaggagctgattgcccacgcccgggaggccgccagccgggtgctgagcgccctgagtgaccggcagatgtctgagaggatggccctggatgccaggaagcgggagcagttccagaggctgaaggagcagtttgtgaaggaccaggagcggcggcaggccgcccggcaggaggagctggatgatgacttctcctatgcccgggagctgcgggaccgggagcggcggctgaagagcctggaggaggagctggagaggaaggcccggcaggccctggtggaccactacagcaagctgtctgctgaggccgcccggcgggagcagaaggccctgtggaggatccagaggcaccggctggagagcgcccggctgcgcttcctgctggaggatgagaagcacatccaggagatgctgaaggctgtgtctgaggcccaccagccccaggagcccccagatgtgctgctgtctgtgcacccccaggtgaccagccctggccctgagcaccctgagggcggccagggctgtgacagcggcagcgctgagcagcacagccctgcctgggatggctggaacagacctggcctgctgaccccccagcccctgaagcccctggccgtgggcgctgggggccggggcctgcagcaggccgagggcgcccggcccttcagtgacagcctgagcatcggggacttcctgcctgtgggccctggagctgagcccagcgtgcagacaggcatggtgcccctgctggaggtggccctgcagaccatcaacctggacctgccccccagcgcccctggagaggccccagctgctgccagcacccagcccagccggccccaggagtatgacttcagcacagtgctgcggcctgctgtggccaccagccctgcccctggccccctgcaggccgctgagtgcagcctgggcagcagcggcctgcagctgtgggaggacagctgtgggaagatggatgcctgtggcagcgccagccgggagaccctgctgcccagccaccccccccggcgggccgccctggaggagggcagcagccagcccacagagcggctgtttggccaggtgtctgggggcggcctgcccaccggggactatgccagcgagatcgcccccacccggccccgctggaacacccacggccacgtgtctgatgccagcatccgggtgggagaaaatgtgtctgatgtggcccccacccagccccgctggaacacccacggccacgtgtccaatgccagcatcagcctgggggagagcgtgtctgatgtggcccccacccggccccgctggaacatccacggccacgtgtccaatgccagcatccgggtgggagaaaatgtgtctgatgtggcccccacccggccccgctggaacacccacggccacgtgtccaatgccagcatccgggtgggggagaatgtgtctgatgtggcccccacccggccccgctggaacacccacggccacgtgtctgatgccagcatcagcctgggggagagcgtgtctgacatggccccagcccggccccgctggaacacccacggccacgtgtctgatgccagcatcagcctgggggagagcgtgtctgacatggcccccacccggccccgctggaacacccacggccacgtgtctgacaccagcatccgggtgggagaaaatgtgtctgatgtggcccccatccgcagccgctgcaacacccacggccacgtgtctgatgccagcatcagcctgggggagcctgtgtctgatgtggtgtccacccggccccgctggaacacccacgtgcccatccccccaccccacatggtgctgggcgccctgagccctgaggccgagcccaacaccccccggccccagcagagccccccaggccacaccagccagagcgccctgagcctgggcgcccagagcacagtgctggactgtggcccccggctgcctgtggaggtgggccccagcctgagcagccccagcagcggctgtggggagggcagcatctctgtgggagaaaatgtgtctgatgtggcccccacccagccctggtggcccaacacccctggggacagcgtgtctgaggagctgggccagagccgggtggccggcggccaggagtgggactgtggcacccaccgggcctgggaggccctgggcggggccggcaccctgcggaccagcctgcagatcggcctgagcacccacaggaagacccagctgccccgggccgcccaggccgtggtgagaagaagaagacacagaagaagaaggctgcgggtgggcagccggcccacctggcaggcctggcagggcagcaccacctggagcggcaccaggacagtgaccagcccctgccccagccggcccctgctgatcttctgtgccccctgcttccctggccccagccccagcccctggacccccaggagcagcctgcccctgatgaggctgctgtgcagctag

SEQ ID NO: 21343 - DNA, 1077 bp, synthetic construct; identical to SEQ ID NO: 18512
  source 1..1077: mol_type = other DNA; note = Synthetic coding sequence

SEQ ID NO: 21344 - DNA, 2757 bp, synthetic construct; identical to SEQ ID NO: 19844
  source 1..2757: mol_type = other DNA; note = Synthetic coding sequence

SEQ ID NO: 21345 - DNA, 222 bp, synthetic construct
  source 1..222: mol_type = other DNA; note = Synthetic coding sequence
atgagctaccagcagcagcagtgcaagcagccctgccagcccccacctcctgtgtgccgcctgcccaagaggcctgagccctgcccccccctgaagtgcccagagccctgccccccacccaagtgcccccagccctgccccccccagcagtgccagcagaagtaccccctggtgacccccagccccccctgccagcccaagtgcccccccaagagcaagtag

SEQ ID NO: 21346 - DNA, 576 bp, synthetic construct; identical to SEQ ID NO: 18243
  source 1..576: mol_type = other DNA; note = Synthetic coding sequence

SEQ ID NO: 21347 - DNA, 60 bp, synthetic construct
  source 1..60: mol_type = other DNA; note = Synthetic coding sequence
atgctgaagaacaagggccacagcagcaagaaggacaacctggccgtgaatgctgtgtag

SEQ ID NO: 21348 - DNA, 1026 bp, synthetic construct
  source 1..1026: mol_type = other DNA; note = Synthetic coding sequence
atggagagcaacttcaaccaggagggcgtgccccggcccagctatgtgttttctgctgaccccatcgcccggcccagcgagatcaactttgatggcatcaagctggacctgagccatgagttcagcctggtggcccccaacacagaggccaacagctttgagagcaaggactacctgcaggtgtgcctgcgcatccggcccttcacccagagcgagaaggagctggagagcgagggctgtgtgcacatcctggacagccagacagtggtgctgaaggagccccagtgcatcctgggccgcctgtctgagaagagcagcggccagatggcccagaagttctccttcagcaaggtgtttggacctgccaccacccagaaggagttcttccagggctgcatcatgcagcctgtgaaggacctgctgaagggccagagccgcctcatcttcacctacggcctgaccaacagcggcaagacctacaccttccagggcacagaagaaaatattggcatcctgcccaggaccctgaatgtgctgtttgacagcctgcaggagcggctgtacaccaagatgaacctgaagccccacaggagccgggagtacctgcggctgagcagcgagcaggagaaggaggagatcgccagcaagagcgccctgctgcggcagatcaaggaggtgacagtgcacaatgacagtgatgacaccctgtatggcagcctgaccaacagcctgaacatcagcgagtttgaggagagcatcaaggactatgagcaggccaacctgaacatggccaacagcatcaagttctctgtgtgggtgtccttctttgagatctacaatgagtacatctatgacctgtttgtgcctgagctggccaagaccaagggggagctgatcaagaccaaggaggagctgaagaagagagaaaatgaaagtgacagcctcatccaggagctggagaccagcaacaagaagatcatcacccagaaccagaggatcaaggagctgatcaacatcatcgactag

SEQ ID NO: 21349 - DNA, 27 bp, synthetic construct
  source 1..27: mol_type = other DNA; note = Synthetic coding sequence
atggctgacacagacctcttcatgtag

SEQ ID NO: 21350 - DNA, 2628 bp, synthetic construct
  source 1..2628: mol_type = other DNA; note = Synthetic coding sequence
atgatgtacacagtgctgcctgatggcagccctgtgccccagggcatggccctgtatgcccctcctccacccctgcccaacaacagccggcccctgaccccaggcaccgtggtgtatggccccccacctgctggggcccccatggtgtatggccccccaccacccaacttcagcatccccttcatccccatgggcgtgctgcactgcaatgtgcctgagcaccacaacctggagaatgaggtgtcccggctggaggacatcatgcagcacctgaagagcaagaagcgggaggagcgctggatgagggccagcaagaggcagagcgagaaggagatggaggagctgcaccacaacattgatgacctgctgcaggagaagaagagcctggagtgtgaggtggaggagctgcacaggacagtgcagaagaggcagcagcagaaggacttcattgatggaaatgtggagagcctgatgacagagctggagattgagaagagcctgaagcaccatgaagatattgtggatgaaattgagtgcatcgagaagaccctgctgaagagaagaagtgagctgcgggaggccgaccggctgctggccgaggccgagagcgagctgagctgcaccaaggagaagaccaagaatgctgtggagaagttcacagatgccaagaggagcctgctgcagacagaaagtgatgctgaggagctggagcggcgggcccaggagacagctgtgaacctggtgaaggctgaccagcagctgcggagcctgcaggctgatgccaaggacctggagcagcacaagatcaagcaggaggagatcctgaaggagatcaacaagatcgtggccgccaaggacagcgacttccagtgcctgagcaagaagaaggagaagctgacagaggagctgcagaagctgcagaaggacatcgagatggccgagagaaatgaagaccaccacctgcaggtgctgaaggagagcgaggtgctgctgcaggccaagagagctgagctggagaagctgaagagccaggtgaccagccagcagcaggagatggctgtgctggaccggcagctgggccacaagaaggaggagctgcacctgctgcagggctccatggtgcaggccaaggctgacctgcaggaggccctgcggctgggggagacagaggtgacagagaagtgcaaccacatccgggaggtgaagagcctgctggaggagctgtccttccagaagggggagctgaatgtgcagatcagcgagaggaagacccagctgaccctcatcaagcaggagattgagaaggaggaggagaacctgcaggtggtgctgcggcagatgagcaagcacaagacagagctgaagaacatcctggacatgctgcagctggagaaccacgagctgcagggcctgaagctgcagcacgaccagagggtgtctgagctggagaagacccaggtggccgtgctggaggagaagctggagctggagaacctgcagcagatcagccagcagcagaagggggagattgagtggcagaagcagctgctggagcgggacaagcgggagattgaaagaatgacagctgagagccgggccctgcagagctgtgtggagtgcctgagcaaggagaaggaggacctgcaggagaagtgtgacatctgggagaagaagctggcccagaccaagagggtgctggccgctgctgaggagaacagcaagatggagcagagcaacctggagaagctggagctgaatgtgaggaagctgcagcaggagctggaccagctgaacagagacaagctgagcctgcacaatgacatcagcgccatgcagcagcagctgcaggagaagcgggaggccgtgaacagcctgcaggaggagctggccaacgtgcaggaccacctgaacctggccaagcaggacctgctgcacaccaccaagcaccaggatgtgctgctgtctgagcagacccggctgcagaaggacatcagcgagtgggccaacagatttgaggactgccagaaggaggaggagaccaagcagcagcagctgcaggtgctgcagaatgaaattgaggagaacaagctgaagctggtgcagcaggagatgatgttccagaggctgcagaaggagcgggagagcgaggagagcaagctggagaccagcaaggtgaccctgaaggagcagcagcaccagctggagaaggagctgacagaccagaagagcaagctggaccaggtgctgagcaaggtgctggccgctgaggagcgggtgaggaccctgcaggaggaggagcgctggtgtgagagcctggagaagaccctgagccagaccaagaggcagctgtctgagcgggagcagcagctggtggagaagagcggggagctgctggccctgcagaaggaggccgacagcatgagagctgacttcagcctgctgaggaaccagttcctgacagagaggaagaaggccgagaagcaggtggccagcctgaaggaggccctgaagatccagaggagccagctggagaagaacctgctgacagcccgggaggccgaggcccagaagctgaagaagcaggtgtgtgcccagaaggcccagctggccagcctgggccgggagtag

SEQ ID NO: 21351 - DNA, 1188 bp, synthetic construct
  source 1..1188: mol_type = other DNA; note = Synthetic coding sequence
atggagcccccccaggagaccaaccggcccttcagcaccctggacaacagaagtggccaggtgcaggtgctgagcgccacccccctgctgcagaggaacccctacagcagcccagacatcatgcacatcaagggcagcgaggccagctctgtgccctatgccctgaaccagggcaccacagccctgcccaagaacaagaaccaggagggcaccggccaccggctgctgaacatgctgaggaagaccctgaaggagagtgacagcgaggagctggagatcacccaggagacccccaacctggtgccctttggagatgtggtgggctgcctgggcatccacatcaagaactgccgccacttcatgcccaagatcagcctgcagcactacgccaacctcttcatccgcatcagcatcaacaaggctgtgaagtgcaccaagatgtgcagcctgctgagcaagaatgatgagaagaacacagtcatcaagtttgatgaggtgaagtacttctctgtgcaggtgcccaggagatatgatgacaagaggaacaacatcctgctggagctgatccagtatgacaaccgggagaagagggccttcctgctgggctctgtgcagatccacctgtatgaagtcatccagaagggctgcttcatcgaggaggtgcaggtgctgcacggcaacatctttgtgtgccgcctggaggtggagttcatgttctcctatggcaactttggctacggcttcagccaccagctgaagcccctgcagaagatcacagagcccagcatgttcatgaacctggcccctcctcctgagaggacagatcctgtgaccaaggtgatcaccccccagacagtggagtacccagccttcctgagcccagacctgaatgtgacagtgggcaccccagctgtgcagagcagcaaccagcccagcgtggtgcggctggagaagctgcagcagcagccccgggagcggctggagaagatgaagaaggagtacagaaacctgaacacctggattgacaaggccaactacctggagagcatcctgatgcccaagctggagcacaaggacagcgaggagaccaacattgatgaggccagcgagaacaccaagagcaaccaccctgaggaggagctggagaacatcgtgggcgtgggcggcttcttcaccaagaggatctag

SEQ ID NO: 21352 - DNA, 282 bp, synthetic construct
  source 1..282: mol_type = other DNA; note = Synthetic coding sequence
atgagctactaccagaggcccttcagccccagcgcctacagcctgcctgccagcctgaacagcagcatcgtgatgcagcacggcaccagcctggacagcacagacacctacccccagcacgcccagagcctggatggcaccaccagcagcagcatccccctgtaccgcagcagcgaggaggagaagagggtgaccgtcatcaaggccccccactacccaggcatcggccctgtggatgaaagtggcatccccacagccatccgcaccaccgtggacagatag

SEQ ID NO: 21353 - DNA, 558 bp, synthetic construct
  source 1..558: mol_type = other DNA; note = Synthetic coding sequence
atggccgcctctgtggagcagcgggagggcaccatccaggtgcagggccaggccctcttcttccgggaggccctgcccggcagcggccaggcccgcttctctgtgctgctgctgcacggcatccgcttcagcagcgagacctggcagaacctgggcaccctgcaccggctggcccaggccggctacagagctgtggccatcgacctgcccggcctgggccacagcaaggaggccgccgccccagcccccatcggggagctggcccctggcagcttcctggccgctgtggtggatgccctggagctgggcccccctgtggtgcctgtggcccccatctgcacagacaagatcaatgctgccaactatgcctctgtgaagaccccagccctgattgtgtatggagaccaggaccccatgggccagaccagctttgagcacctgaagcagctgcccaaccaccgggtgctgatcatgaagggagctggccacccctgctacctggacaagccagaggagtggcacacaggcctgctggacttcctgcagggcctgcagtag

SEQ ID NO: 21354 - DNA, 1443 bp, synthetic construct
  source 1..1443: mol_type = other DNA; note = Synthetic coding sequence
atgctggagcggcccccagccctggccatgcccatgcccacagagggcaccccaccacccctgagcggcacccccatccctgtgcctgcctacttcagacatgctgagcccggcttcagcctgaagaggccccggggcctgagccgcagcctgcccccacctcctccagccaagggcagcatccccatcagccgcctcttcccccccaggaccccaggctggcaccagctgcagccccggcgggtgtccttccggggggaggccagcgagaccctgcagagccctggctatgaccccagcaggcctgagagcttcttccagcagagcttccagaggctgagccggctgggccacggcagctatggagaggtgttcaaggtgcgcagcaaagaagatggccgcctgtatgctgtgaagaggtccatgagccccttccggggccccaaggaccgggccaggaagctggccgaggtgggcagccatgagaaggtgggccagcacccctgctgcgtgcggctggagcaggcctgggaggagggcggcatcctgtacctgcagacagagctgtgtggccccagcctgcagcagcactgtgaggcctggggcgccagcctgcctgaggcccaggtgtggggctacctgcgggacaccctgctggccctggcccacctgcacagccagggcctggtgcacctggatgtgaagccagccaacatcttcctgggcccccggggccgctgcaagctgggggactttggcctgctggtggagctgggcacagctggagctggggaggtgcaggagggggacccccgctacatggcccctgagctgctgcagggcagctatggaacagctgctgatgtgttcagcctgggcctgaccatcctggaggtggcctgcaacatggagctgccccatggaggagagggctggcagcagctgcggcagggctacctgcccccagagttcaccgctggcctgagcagcgagctgcggtctgtgctggtgatgatgctggagccagaccccaagctgcgggccacagctgaggccctgctggccctgcctgtgctgcggcagccccgggcctggggcgtgctgtggtgcatggctgctgaggccctgagccggggctgggccctgtggcaggccctgctggccctgctgtgctggctgtggcacggcctggcccacccagcctcctggctgcagcccctgggccccccagccaccccacctggcagccccccctgcagcctgctgctggacagcagcctgagcagcaactgggatgatgacagcctgggccctggccaccccccctgcctggcctgccccccagctggcctgcacagccccctgcggctgtcctggccaggcctgtggggcgcccctcctcctcctggagctggggcccaccctggcatgccctggacctag

SEQ ID NO: 21355 - DNA, 1740 bp, synthetic construct; identical to SEQ ID NO: 21072
  source 1..1740: mol_type = other DNA; note = Synthetic coding sequence

SEQ ID NO: 21356 - DNA, 975 bp, synthetic construct
  source 1..975: mol_type = other DNA; note = Synthetic coding sequence
atggaggccctgggccctggaggagaccgggccagccctgccagcagcaccagcagcctggacctgtggcacctgtccatgagagctgacagcgcctacagcagcttctctgctgccagcggcggccctgagcccaggacccagagccctggaacagacctgctgccctacctggactgggactatgtgcgggtggtgtggggcggccctggccctgcccccccagatgctgccctgtgcaccagcccccggcccaggcctgctgtggccgcccggagcggcccccagcccacagaggtgcccggcaccccaggccccctgaaccggcaggccacccccctgctgtatgccctggccgctgaggccgaggccgccgcccaggccgctgagccccccagccccccagccagcagagctgcctaccggcagaggctgcagggcgcccagaggagagtgctgcgggagaccagcttccagaggaaggagctgaggatgagcctgcctgcccggctgcggcccaccgtgcctgcccggcccccagccacccaccccaggtctgccagcctgagccaccctggaggagagggggagcccgcccggagccgggccccagcccctggaacagctggccggggccccctggccaaccagcagaggaagtggtgcttcagcgagcccgggaagctggacagagtgggccggggcggcggccctgccagagaatgtctgggggaggcctgcagcagcagcggcctgcccggccctgagcccctggagttccagcacccagccctggccaagtttgaagatcatgaggtgggctggctgcctgagacccagccccagggctccatgaacctggacagcggcagcctgaagctgggagatgccttccggcctgccagccgcagccgcagcgccagcggggaggtgctgggctcctggggcggcagcggcggcaccatccccatctag

SEQ ID NO: 21357 - DNA, 780 bp, synthetic construct
  source 1..780: mol_type = other DNA; note = Synthetic coding sequence
atgccccgggcccggagcggccgccgcagcagaggagctgggggccgggaggagaccttcctgcgggtgcgggccaaccggcagacccggctgaatgccagaattggcaagatgaagaggaggaagcaggatgagggccagcgggagggcagctgcatggctgaagatgatgctgtggacattgaacatgagaacaacaacagatttgaggagtatgagtggtgtggccagaagaggatccgggccaccaccctgctggagggcggcttccggggcagcggcttcatcatgtgcagcggcaaggagaacccagacagtgatgctgacctggatgtggatggagatgacaccctggagtatggcaagccccagtacacagaagcagatgtgatcccctgcaccggggaggagcccggggaggccaaggagcgggaggccctgcggggagctgtgctgaatggaggcccccccagcacccgcatcaccccagagttcagcaagtgggccagtgatgagatgcccagcaccagcaatggagagagcagcaagcaggaggccatgcagaagacctgcaagaacagcgacatcgagaagatcacagaagattctgctgtgaccacctttgaggccctgaaggcccgggtgcgggagctggagcggcagctgagcagaggagaccgctacaagtgcctgatctgcatggacagctacagcatgcccctgaccagcatccagtgctggcacgtgcactgtgaggagtgctggctgcggaccctgtag

SEQ ID NO: 21358 - DNA, 369 bp, synthetic construct; identical to SEQ ID NO: 21112
  source 1..369: mol_type = other DNA; note = Synthetic coding sequence

SEQ ID NO: 21359 - DNA, 984 bp, synthetic construct
  source 1..984: mol_type = other DNA; note = Synthetic coding sequence
atggccagcttcctgaagggggcccacgtgaccatcaatgcccgggcagaggaggatgtggagcctgagtgcatcatggagaaggtggccaaggccagcggggccaactacagcttccacaaggagagcggccgcttccaggatgtgggcccccaggcccctgtgggctctgtgtaccagaagaccaatgctgtgtctgagatcaagagggtgggcaaggacagcttctgggccaaggccgagaaggaggaggagaacagaaggctggaggagaagagaagagctgaggaggcccagaggcagctggagcaggagcggcgggagcgggagctgcgggaggccgcccggcgggagcagcgctaccaggagcagggcggggaggccagcccccagaggacctgggagcagcagcaggaggtggtgtccaggaacagaaatgagcaggagagcgctgtgcacccccgggagatcttcaagcagaaggagcgggccatgagcaccaccagcatcagcagcccccagcccgggaagctgcggagccccttcctgcagaagcagctgacccagcctgagacccacttcggccgggagcctgctgctgccatcagccggcccagggctgacctgcctgctgaggagcccgcccccagcaccccaccctgcctggtgcaggccgaggaggaggccgtgtatgaggagcccccagagcaggagaccttctatgagcagccccccctggtgcagcagcagggcgccggcagcgagcacatcgaccaccacatccagggccagggcctgagcggccagggcctgtgtgcccgggccctgtatgactaccaggccgcagatgacacagagatcagctttgatcctgagaacctgatcaccggcatcgaggtgattgatgagggctggtggaggggctacggcccagatggccacttcggcatgtttcctgccaactacgtggagctgattgaatag

SEQ ID NO: 21360 - DNA, 438 bp, synthetic construct
  source 1..438: mol_type = other DNA; note = Synthetic coding sequence
atgcagggccgcatcaccaaggtgctgaacatgaagcccccagagatcctgtccatgattgaggaggccgccggcaccaggatgtatgagtacaagaagattgctgcccagaagaccatcgagaagaaggaggccaagctgaaggagatcaagaccatcctggaggaggagatcacccccaccatccagaagctgaaggaggagaggagcagctacctggagtaccagaaggtgatgagagaaattgagcacctgagccggctgtacatcgcctaccagttcctgctggccgaggacaccaaggtgcgctctgctgaggagctgaaggagatgcaggacaaggtgatcaagctgcaggaggagctgtctgaaaatgacaagaagatcaaggccctgaaccacgagattgaggagctggagaagaggaaggacaagtag

SEQ ID NO: 21361 - DNA, 816 bp, synthetic construct
  source 1..816: mol_type = other DNA; note = Synthetic coding sequence
atggagaaggagaccggcatcagccagcagaggaactactacttcacccagagcaaaggagagcccctgcagattgaccacctggtgtttgtggtgcatggaattggccctgcctgtgacctgcgcttccgcagcatcgtgcagtgtgtgaatgacttccgctctgtgtccctgaacctgctgcagacccacttcaagaaggcccaggagaaccagcagatcggccgggtggagttcctgcctgtgaactggcacagccccctgcacagcactggagtggatgtggacctgcagaggatcaccctgcccagcatcaaccggctgcggcacttcaccaatgacaccatcctggatgtgttcttctacaacagccccacctactgccagaccatcgtggacacagtggccagcgagatgaaccgcatctacaccctcttcctgcagagaaatccagacttcaagggcggcgtgtccattgctggccacagcctgggcagcctcatcctgtttgacatcctgaccaaccagaaggacagcctgggggacattgattctgagaaggacagcctgaacatcgtgatggaccagggcgacacccccaccctggaggaggacctgaagaagctgcagctgtctgagttctttgacatctttgagaaggagaaggtggacaaggaggccctggccctgtgcacagaccgggacctgcaggagatcggcatccccctgggccccaggaagaacctgagcagcgctgtggccgtcatcctggagatggtgaccatctggatgctggccctgggccgctgcctgtag

SEQ ID NO: 21362 - DNA, 1818 bp, synthetic construct; identical to SEQ ID NO: 20587
  source 1..1818: mol_type = other DNA; note = Synthetic coding sequence

SEQ ID NO: 21363 - DNA, 294 bp, synthetic construct
  source 1..294: mol_type = other DNA; note = Synthetic coding sequence
atgcagaccagcagcagccgctctgtgcacctgtctgagtggcagaagaactactttgccatcaccagcggcatctgcaccggccccaaggcagatgcctaccgggcccagatcctgcgcatccagtatgcctgggccaacagcgagatcagccaggtgtgtgccaccaagctgttcaagaagtatgcagagaagtacagcgccatcatcgacagcgacaacgtggagagcggcctgaacaactatgcagagaacatcctgaccctggccggcagccagcagacagacagctag

SEQ ID NO: 21364 - DNA, 333 bp, synthetic construct; identical to SEQ ID NO: 19493
  source 1..333: mol_type = other DNA; note = Synthetic coding sequence

SEQ ID NO: 21365 - DNA, 627 bp, synthetic construct
  source 1..627: mol_type = other DNA; note = Synthetic coding sequence
atggagccccccatggagcccagcggcggggagcaggagcccggggctgtgcgcttcctggacctgccctgggaggatgtgctgctgccccacgtgctgaacagagtgcccctgcggcagctgctgcggctgcagagggtgtcccgggccttccgcagcctggtgcagctgcacctggccggcctgcggagatttgatgctgcccaggtgggcccccagatccccagggctgccctggcccggctgctgagagatgctgagggcctgcaggagctggccctggccccctgccacgagtggctgagtgatgaggacctggtgcctgtgctggccaggaacccccagctgcggtctgtggccctgggcggctgcggccagctgagcagaagagccctgggcgccctggccgagggctgcccccggctgcagaggctgagcctggcccactgtgactgggtggatggcctggccctgcggggcctggccgaccgctgcccagccctggaggagctggacctgacagcctgccggcagctgaaggatgaggccatcgtgtacctggcccagaggagaggagctggcctgcggagcctgagcctggccgtgaatgccaacgtgggggactag

SEQ ID NO: 21366 - DNA, 1419 bp, synthetic construct
  source 1..1419: mol_type = other DNA; note = Synthetic coding sequence
gtcacccactacaagcagtacccacccaacaccagcaaggtgtacagctactttgaatgtcgggagaagaagacagagaacagcaagctgaggaaggtgaagtatgaggagaccgtcttctacggcctgcagtacatcctgaacaagtacctgaagggcaaggtggtgaccaaggagaagatccaggaggccaaggatgtgtacaaggagcacttccaggatgatgtggtgaatgagaagggctggaactacatcctggagaagtatgatggccacctgcccatcgagatcaaggctgtgcctgagggcttcgtcatccccagaggaaatgtgctcttcaccgtggagaacacagatcctgagtgctactggctgaccaactggattgagaccatcctggtgcagagctggtaccccatcaccgtggccaccaacagccgggagcagaagaagatcctggccaagtacctgctggagaccagcggcaacctggatggcctggagtacaagctgcatgactttggctaccggggcgtgagcagccaggagacagctggcattggagccagcgcccacctggtgaacttcaagggcacagacacagtggccggcctggccctgaacaagaagtactacggcaccaaggaccctgtgcccggctacagcgtgcctgctgctgagcacagcaccatcacagcctggggcaaggaccacgagaaggatgcctttgagcacatcgtgacccagttcagctctgtgcctgtgtctgtggtgagcaacagctatgacatctacaatgcctgtgagaagatctggggcgaggacctgcggcacctgattgtgagccgcagcacccaggcccccctcatcatccggccagattctggcaaccccctggacacagtgctgaaggtgctggagatcctgggcaagaagtttcctgtgacagagaacagcaagggctacaagctgctgcccccctacctgcgggtcatccagggagatggagtggacatcaacaccctgcaggagatcgtggagggcatgaagcagaagatgtggagcattgaaaatattgcctttggaagtggcggcggcctgctgcagaagctgacccgggacctgctgaactgcagcttcaagtgcagctatgtggtgaccaacggcctgggcatcaacgtgttcaaggaccctgtggccgaccccaacaagaggagcaagaagggccgcctgagcctgcacaggaccccagctggcaactttgtgaccctggaggagggcaagggggacctggaggagtatggccaggacctgctgcacacagtgttcaagaatggcaaggtgaccaagagctacagctttgatgagatcaggaagaatgcccagctgaacatcgagctggaggccgcccaccactag

SEQ ID NO: 21367 - DNA, 519 bp, synthetic construct
  source 1..519: mol_type = other DNA; note = Synthetic coding sequence
tgcaagcagagcaccaagacagaggagaagctgcggcccaccaggaccagcagcgagagcatctacagcaggcctggcagcagcatccctggcagccctggccacaccatctatgccaaggtggacaatgagatcctggactacaaggacctggccgccatccccaaggtgaaggccatctatgacatcgagaggccagacctgatcacctatgagcccttctacaccagcggctatgatgacaagcaggagcggcagagcctgggggagagccccaggaccctgagccccacccccagcgctgagggctaccaggatgtgcgggacaggatgatccacaggagcaccagccagggcagcatcaacagccctgtgtacagccgccacagctacacccccaccaccagccgcagcccccagcacttccacaggccagaccagggcatcaacatctacaggaagccacccatctacaagcagcacgtgctgtttgaggtgatcctgctgctgctgatctag

SEQ ID NO: 21368 - DNA, 2445 bp, synthetic construct
  source 1..2445: mol_type = other DNA; note = Synthetic coding sequence
atgaggctgctggatggcaagcagaccagccgctacagtgaaaatgcctgtgagaagaagatcttcagcatctacggccactaccctgtggtgcgggccgccctgcggaggaagggctgggtggagaagaagttccacttcctgcccaaggtgatcccagatgtggaggatgaaggagcccgggtgaatgatgacacctgtgccaaggtgaaggagaaccaggagatggccctggagaagacagacaacatccatgatgtgatgagccggctggtgaagaatgagatgccctacctgctgtggaccatcaagagggacatcatcgactaccacagcctgacctatgaccagatgctgaaccactacgccaagacagccagcttcaccaccaagattggcctgtgtgtgaacatgaggagcctgccctggtacgtgcctgccaacccagacagcttcttcccccgctgctacagcctgtgcacagaaagtgagcagcaggagttcctggaggacttccggaggaccatggccagcagcatcctgaagtgggtggtgagccaccagagctgcagccgcagcagccgcagcaagccccgggaccagcgggaggaggccggcagcagtgacctgagcagccggcaggatgctgaaaatgctgaggccaagctgcggggcctgcccggccagctggtggacatcgcctgcaaggtgtgccaggcctacctgggccagctggagcacgaggacatcgacaccagcgcagatgctgtggaggacctgacagaagctgagtgggaggacctgacccagcagtactacagcctggtgcatggagatgccttcatcagcaacagcaggaactacttcagccagtgccaggccctgctgaaccgcatcacctctgtgaacccccagacagacattgatggcctgaggaacatctggatcatcaagccagctgccaagagccggggccgggacatcgtgtgcatggacagagtggaggagatcctggagctggccgctgctgaccaccccctgagccgggacaacaagtgggtggtgcagaagtacatcgagacccccctgctgatctgtgacaccaagtttgacatccggcagtggttcctggtgacagactggaaccccctgaccatctggttctacaaggagagctacctgcgcttcagcacccagcgcttcagcctggacaagctggacagcgccatccacctgtgcaacaatgctgtgcagaagtacctgaagaatgatgtgggccgcagccccctgctgcctgcccacaacatgtggaccagcacccgcttccaggagtacctgcagaggcagggcagaggagctgtgtggggcagcgtcatctaccccagcatgaagaaggccatcgcccacgccatgaaggtggcccaggaccacgtggagcccaggaagaacagctttgagctgtatggagctgactttgtgctgggccgggacttccggccctggctgattgagatcaacagcagccccaccatgcaccccagcacccctgtgacagcccagctgtgtgcccaggtgcaggaggacaccatcaaggtggccgtggacaggagctgtgacatcggcaactttgagctgctgtggaggcagcctgtggtggagcccccacccttcagcggcagtgacctgtgtgtggccggcgtgtctgtgcggcgggcccggcggcaggtgctgcctgtgtgcaacctgaaggccagcgccagcctgctggatgcccagcccctgaaggcccggggccccagcgccatgccagaccctgcccagggcccccccagccctgccctgcagagggacctgggcctgaaggaggagaagggcctgcccctggccctgctggcccccctgcggggagctgctgagagcggcggggccgcccagcccaccaggaccaaggccgccggcaaggtggagctgcctgcctgcccctgccgccacgtggacagccaggcccccaacacaggagtgcctgtggcccagcctgccaagtcctgggaccccaaccagctgaatgcccaccccctggagcctgtgctgcggggcctgaagacagctgagggcgccctgcggcccccacctgggggcaagggggagggcaccgtgtgcagccggctgccccaccacggccaccacgtggccgcctgccagaccaccggcaccacctgggatggcggccctggggtgtgcttcctgcggcagctgctggccagcgagctgcccatgggccctggcctgccccgggacccccgggccccaccctgcctggtgtgccggggcctgctgcccccagctggcccctgcaagcgctgccgctccttctgtgccgctgtgctgcagggcgccagctttgtgcggctgggcggccgcagctgcagccccaggaccccctag

SEQ ID NO: 21369 - DNA, 318 bp, synthetic construct
  source 1..318: mol_type = other DNA; note = Synthetic coding sequence
atggacaagaacattggagagcagctgaacaaggcctatgaggccttccggcaggcctgcatggaccgggacagcgctgtgaaggagctgcagcagaagacagaaaattatgagcagaggatccgggagcagcaggagcagctgagcctgcagcagaccatcatcgacaagctgaagagccagctgctgctggtgaacagcacccaggacaacaactacggctgtgtgcccctgctggaggacagcgagaccaggaagaacaacctgaccctggaccagccccaggacaaggtgatcagcggcatcgcccgggagtag

SEQ ID NO: 21370 - DNA, 816 bp, synthetic construct
  source 1..816: mol_type = other DNA; note = Synthetic coding sequence
atggcccctgtgggcgtggagaagaagctgctgctgggccccaatggacctgctgtggccgccgccggggacctgaccagcgaggaggaggagggccagagcctgtggagcagcatcctgtctgaggtgtccacccgggcccggagcaagctgcccagcggcaagaacatcctggtgtttgaccacacccgctgcaatgtgtggatcctggatggagacctgtaccacaagggcctgctgaagtttgctgtgtctgctgagagcctgcctgagaccctggtgatctttgtggccgacatgagccggccctggacagtgatggagagcctgcagaagtgggcctctgtgctgcgggagcacatcgacaagatgaagatccccccagagaagatgagggagctggagaggaagtttgtgaaggacttccaggactacatggagcctgaggagggctgccagggcagcccccagaggcggggccccctgaccagcggcagtgatgaagaaaatgtggccctgcccctgggggacaacgtgctgacccacaacctgggcatccctgtgctggtggtgtgcaccaagtgtgatgctgtgtctgtgctggagaaggagcatgactacagagatgagcacctggacttcatccagagccacctgcggcgcttctgcctgcagtacggggccgccctgatctacacctctgtgaaggaggagaagaacctggacctgctgtacaagtacatcgtgcacaagacctacggcttccacttcaccaccccagccctggtggtggagaaggatgctgtgttcatgtag

SEQ ID NO: 21371 - DNA, 522 bp, synthetic construct
  source 1..522: mol_type = other DNA; note = Synthetic coding sequence
atggctgacaggatgcagatcgtggtgatcctgtctgagttcttcaacaccacctggcaggaggccaactgtgccaactgcctgaccaacaacagcgaggagctgagcaacagcacagtgtacttcctgaacctcttcaaccacaccctgacctgctttgagcacaacctgcagggcaatgcccacagcctgctgcagaccaagaactacagcgaggtgtgcaagaactgccgggaggcctacaagaccctgagcagcctgtacagcgagatgcagaagatgaatgagctggagaacaaggccgagcccggcacccacctgtgcattgatgtggaggatgccatgaacatcaccaggaagctgtggagcaggaccttcaactgcagcgtgccctgcagcgacacagtgcctgtgattgctgtgtctgtgttcatcctcttcctgcctgtggtgttctacctgagcagcttcctgcacagcgagcagaagaagaggaagctgatcctgcccaagaggctgtag

SEQ ID NO: 21372 - DNA, 435 bp, synthetic construct
  source 1..435: mol_type = other DNA; note = Synthetic coding sequence
tgattcatccactgcacagatgacagcccagacccctgcatcgagtatgagctggtgctgaggaagtggtgtgagctgatccctggagctgagttccgctgctttgtgaaggagaacaagctgattggcatcagccagagggactacacccagtactatgaccacatcagcaagcagaaggaggagatccgccgctgcatccaggacttcttcaagaagcacatccagtacaagttcctggatgaggactttgtgtttgacatctacagagacagccggggcaaggtgtggctgattgacttcaacccctttggagaggtgacagacagcctgctcttcacctgggaggagctgatcagcgagaacaacctgaatggagacttcagcgaggtggatgcccaggagcagaagaggaaccagcaggaggatgactag

SEQ ID NO: 21373 - DNA, 978 bp, synthetic construct
  source 1..978: mol_type = other DNA; note = Synthetic coding sequence
tgaatccagggcgaggccagccggcgggctgctggggagcctgaggccggcagtgactatgtgaagttcagcaaggagaagtacatcctggacagcagccctgagaagctgcacaaggagctggaggaggagctgaagctgagcagcacagacctgcggagccacgcctggtaccacggccgcatcccccgggaggtgtctgagaccctggtgcagagaaatggagacttcctgatccgggacagcctgaccagcctgggggactatgtgctgacctgccgctggaggaaccaggccctgcacttcaagatcaacaaggtggtggtgaaggccggggagagctacacccacatccagtacctgtttgagcaggagagctttgaccacgtgcctgccctggtgcgctaccacgtgggcagcaggaaggctgtgtctgagcagagcggggccatcatctactgccctgtgaacagaaccttccccctgcgctacctggaggccagctatggcctgggccagggcagcagcaagccagccagccctgtgagccccagcggccccaagggcagccacatgaagagaagatctgtgaccatgacagatggcctgacagctgacaaggtgaccaggagtgatggctgccccaccagcaccagcctgccccggccccgggacagcatccgcagctgtgccctgtccatggaccagatcccagacctgcacagccccatgagccccatcagcgagagccccagcagccctgcctacagcacagtgaccagggtgcacgccgccccagctgcccccagcgccacagccctgcctgccagccctgtggcccggcgcagcagcgagccccagctgtgccccggcagcgcccccaagacccatggagagagtgacaagggcccccacaccagccccagccacaccctgggcaaggccagccccagccccagcctgagcagctacagctag

SEQ ID NO: 21374 - DNA, 330 bp, synthetic construct
  source 1..330: mol_type = other DNA; note = Synthetic coding sequence
atgagcagcaagggcagcagcacagatggccgcacagacctggccaacggcagcctgagcagcagccctgaggagatgtctggagctgaggagggccgggagaccagcagcggcatcgaggtggaggccagtgacctgagcctgagcctgactggagatgatggcggccccaacagaaccagcacagagagccggggcacagacacagagagcagcggggaggacaaggacagcgacagcatggaggacaccggccactacagcatcaatgatgagaacagagtgcatgacagaagtgaggaggaggaggaggaggaggaggaggagtag

SEQ ID NO: 21375 - DNA, 1638 bp, synthetic construct
  source 1..1638: mol_type = other DNA; note = Synthetic coding sequence
gctgctggggccccccggctgctgggccctggagctgtgcggggccctgctggggtgggccgggtggccgccggggccatggagggcgtgctgtacaagtggaccaactacctgagcggctggcagccccgctggttcctgctgtgtggcggcatcctgagctactatgacagcccagaagatgcctggaagggctgcaagggcagcatccagatggctgtgtgtgagatccaggtgcacagcgtggacaacaccaggatggacctgatcatccctggagagcagtacttctacctgaaggcccggtctgtggccgagcggcagcgctggctggtggccctgggcagcgccaaggcctgcctgacagacagcaggacccagaaggagaaggagtttgctgagaacacagagaacctgaagaccaagatgtctgagctgcggctgtactgtgacctgctggtgcagcaggtggacaagaccaaggaggtgaccaccaccggggtgagcaacagcgaggagggcattgatgtgggcaccctgctgaagagcacctgcaacaccttcctgaagaccctggaggagtgcatgcagatcgccaatgctgccttcaccagcgagctgctgtaccgcaccccacctggcagcccccagctggccatgctgaagagcagcaagatgaagcaccccatcatccccatccacaacagcctggagcggcagatggagctgagcacctgtgaaaatggcagcctgaacatggagatcaacggggaggaggagatcctgatgaagaacaagaacagcctgtacctgaagtctgctgagattgactgcagcatcagcagcgaggagaacacagatgacaacatcaccgtgcagggcgagatcagaaaagaagatggcatggagaacctgaagaaccacgacaacaacctgacccagagcggcagtgacagcagctgcagccctgagtgcctgtgggaggagggcaaggaggtgatccccaccttcttcagcaccatgaacaccagcttcagtgacatcgagctgctggaggacagcggcatccccacagaggccttcctggccagctgctatgctgtggtgcctgtgctggacaagctgggccccaccgtgtttgcccctgtgaagatggacctggtgggcaacatcaagaaggtgaaccagaagtacatcaccaacaaggaggagttcaccaccctgcagaagatcgtgctgcacgaggtggaggctgatgtggcccaggtgaggaacagcgccacagaggccctgctgtggctgaagaggggcctgaagttcctgaagggcttcctgacagaggtgaagaatggagagaaggacatccagacagccctgaacaatgcctacggcaagaccctgcggcagcaccacggctgggtggtgcggggcgtgtttgccctggccctgcgggccgcccccagctatgaggactttgtggccgccctgactgtgaaggagggggaccaccagaaggaggccttcagcatcggcatgcagagggacctgagcctgtacctgcctgccatggagaagcagctggccatcctggacaccctgtatgaggtgcacggcctggagagtgatgaggtggtgtag

SEQ ID NO: 21376 - DNA, 522 bp, synthetic construct
  source 1..522: mol_type = other DNA; note = Synthetic coding sequence
atgtacaccctgctgagcggcctgtacaagtacatgttccagaaggatgagtactgcatcctgatcctgggcctggacaatgctgggaagaccaccttcctggagcagagcaagacccgcttcaacaagaactacaagggcatgagcctgagcaagatcaccaccaccgtgggcctgaacattggaacagtggatgtgggcaaggcccggctgatgttctgggacctgggcggccaggaggagctgcagagcctgtgggacaagtactatgcagagtgccacggcgtcatctacgtgattgacagcacagatgaggagcggctggccgagagcaagcaggcctttgagaaggtggtgaccagcgaggccctgtgtggggtgcctgtgctggtgctggccaacaagcaggatgtggagacctgcctgagcatcccagacatcaagacagccttcagtgactgcaccagcaagattggccggcgggactgcctgacccaggcctgcagcgccctgaccggctag

SEQ ID NO: 21377 - DNA, 729 bp, synthetic construct
  source 1..729: mol_type = other DNA; note = Synthetic coding sequence
atgggcctggtgtgtgtgctgggagatggcaagacagagcagaagggcggggacaagaagaggggcgtgaagaggccccgggaggaccacggccggggctactttgagtacatcgaggagaacaagtacagccgggccaagagcccccagccccctgtggaggaggaggatgagcactttgatgacacagtggtgtgcctggacacctacaactgtgacctgcacttcaagatcagccgggaccggctgagcgccagcagcctgaccatggagagctttgccttcctgtgggccggcggccgggccagctatggagtgtccaagggcaaggtgtgctttgagatgaaggtgacagagaagatccctgtgcgccacctgtacaccaaggacatcgacatccacgaggtgcgcatcggctggagcctgaccaccagcggcatgctgctgggggaggaggagttctcctatggctacagcctgaagggcatcaagacctgcaactgtgaaacagaagattatggagagaagtttgatgaaaatgatgtgatcacctgctttgccaactttgaaagtgatgaggtggagctgtcctatgccaagaatggccaggacctgggcgtggccttcaagatcagcaaggaggtgctggccggccggcccctcttcccccacgtgctgtgccacaactgtgctgtggagttcaactttggccagaaggagaagccctag

SEQ ID NO: 21378 - DNA, 2922 bp, synthetic construct
  source 1..2922: mol_type = other DNA; note = Synthetic coding sequence
agcagcagtgacaaggagagcatcctgaccatcctgaaggtgctgggggacctgctgtctgtgggcacagaccggcgcatccactacatgatcagcaaaggaggcagcgaggccctgctgcagaccctggtggacacagccaggacagcccccccagactatgacatcctgctgcccctcttccggctgctggccaaggtgggcctgcgggacaagaagattggaaggaaggccctggagctggaggccctggatgtgaccctcatcctggccaggaagaacctgagccacggccagaacctgctgcactgcctgtgggccctgcgggtgtttgccagctctgtgtccatgggcgccatgctgggcatcaacggggccatggagctgctcttcaaggtgatcaccccctacaccaggaagaggacccaggccatccgggccgccacagaggtgctggccgccctgctgaagagcaagagcaatggaagaagagctgtgaacagaggctacgtgaccagcctgctgggcctgcaccaggactggcacagccatgacacagccaatgcctacgtgcagatccggcggggcctgctgctgtgcctgcggcacatcgccgccctgcggagcggccgggaggccttcctggccgcccagggcatggagatcctcttcagcaccacccagaactgcctggatgacaagtccatggagcccgtcatctctgtggtgctgcagatcctgcggcagtgctaccccaccagccccctgcccctggtgacagccagcagcgcctatgccttccctgtgcccggctgcatcaccacagagccccctcatgacctgcctgaggaggactttgaagatgatggagatgatgaggtggacaaggacagcgacacagaagatggcaaggtggaggatgatgacctggagacagatgtgaacaagctgagcagcaagccaggcctggacaggcctgaggaggagctgatgcagtatgaggtgatgtgcctggagctgagctacagctttgaggagctgcagagcaagctgggagatgacctgaacagcgagaagacccagtatgccaaccaccaccacatcccagctgctgccagcagcaagcagcactgctacagcaaggaccagagcagctgtggccaggagcgggagtatgctgtgcagaccagcctgctgtgccgggtgaagacaggccgcagcacagtgcacctgggcagcaagaagaaccctggggtgaacctgtaccagaatgtgcagagcaacagcctgcggcgggacagcagcgagagcgagatcccagacatccaggccagccccaaggcagatgcctgggatgtggatgccatcttctgccccaggatgtctgccagcttcagcaacagcaccaggacccgggaggtggtgaaggtgattgacaagctgctgcagacccacctgaagagggtgcccttccatgacccctacctgtacatggccaaggcccggaggaccagctctgtggtggacttcaagatgatggccttcccagatgtgtggggccactgccccccacccaccacccagcccatgctggagaggaaatgtggggtgcagaggatccgcatctttgaggacatcagaagactcatccagcccagtgatgtgatcaacaaggtggtgttcagcctggatgagccctggcccctgcaggacaatgccagcaactgcctgcgcttcttcagcaagtttgaaagtggcaacctgaggaaggccatccaggtgcgggagtttgaatatgacctgctggtgaatgctgatgtgaacagcacccagcaccagcagtggttctacttcaaggtgtctggcatgcaggccgccatcccctaccacttcaacatcatcaactgtgagaagcccaacagccagttcaactacggcatgcagcccaccctgtacagcgtgaaggaggccctgctgggcaagcccacctggatcagaactggacatgagatctgctactacaagaaccactaccggcagagcacagctgtggccggcggggccagcggcaagtgctactacaccctgacctttgctgtgaccttcccccacagtgaagatgtgtgctacctggcctaccactacccctacacctacacagccctgatgacccacctggacatcctggagaagtctgtgaacctgaaggaggtgtacttccggcaggatgtgctgtgccagaccctgggcggcaacccctgccccctggtgaccatcacagccatgcctgagagcaacagtgatgagcacctggagcagttccgccaccggccctaccaggtgatcacagcccgggtgcaccctggagagagcaatgcctcctgggtgatgaagggcaccctggagttcctggtgtccagtgaccctgtggcccggctgctgcgggagaacttcatcttcaagatcatccccatgctgaacccagatggagtcatcaatggaaaccaccgctgcagcctgtctggagaggacctgaaccggcagtggctgagccccagcgcccacctgcagcccaccatctaccacgccaagggcctgctgtaccacctgagcagcatcggccgcagccctgtggtgagccacttcctgctggtgttctgtgacttccacggccacagccagaagaagaatgtgttcctgtatggctgcagcatcaaggagaccctgtggcaggccgcctgcaccgtgggcaccagcaccatcctggaggaggtgaactaccgcaccctgcccaagatcctggacaagctggccccagccttcaccatgagcagctgcagcttcctggtggagaagagccgggccagcacagcccgggtggtggtgtggagggagatgggcgtgagccgcagctacacctag

SEQ ID NO: 21379 - DNA, 7752 bp, synthetic construct
  source 1..7752: mol_type = other DNA; note = Synthetic coding sequence
tgaagcagcatcaccttctctgtgaaggtggagggccggcctgtgcccaccgtgcactggctgcgggaggaggccgagcggggcgtgctgtggattggccctgacaccccaggctacacagtggccagcagcgcccagcagcacagcctggtgctgctggatgtgggccggcagcaccagggcacctacacctgcatcgccagcaatgctgctggccaggccctgtgcagcgccagcctgcacgtgtctggcctgcccaaggtggaggagcaggagaaggtgaaggaggccctgatcagcaccttcctgcagggcaccacccaggccatcagcgcccagggcctggagacagccagctttgctgacctgggcggccagaggaaggaggagcccctggccgccaaggaggccctgggccacctgagcctggccgaggtgggcacagaggagttcctgcagaagctgaccagccagatcacagagatggtgtctgccaagatcacccaggccaagctgcaggtgcctggaggagacagtgatgaggacagcaagaccccatctgccagccccaggcatggccgcagccggcccagcagcagcatccaggagagcagcagcgagagtgaagatggagatgcccggggggagatctttgacatctacgtggtgacagctgactacctgcccctgggcgctgagcaggatgccatcaccctgcgggagggccagtatgtggaggtgctggatgctgcccaccccctgcgctggctggtgaggaccaagcccaccaagagcagccccagccggcagggctgggtgtccccagcctacctggaccggcggctgaagctgagccctgagtggggcgctgctgaggcccctgagttccctggagaggccgtgtctgaagatgagtacaaggcccggctgagcagcgtcatccaggagctgctgagcagcgagcaggcctttgtggaggagctgcagttcctgcagagccaccacctgcagcacctggagcgctgcccccacgtgcccatcgctgtggccggccagaaggccgtcatcttcagaaatgtgcgggacatcggccgcttccacagcagcagcttcctgcaggagctgcagcagtgtgacacagatgatgatgtggccatgtgcttcatcaagaaccaggccgcctttgagcagtacctggagttcctggtgggccgggtgcaggccgagagcgtggtggtgtccacagccatccaggagttctacaagaagtatgcagaggaggccctgctggccggggaccccagccagcccccacctccacccctgcagcactacctggagcagcctgtggagcgggtgcagcgctaccaggccctgctgaaggagctgatccggaacaaggccaggaaccggcagaactgtgccctgctggagcaggcctatgctgtggtgtctgccctgccccagagagctgagaacaagctgcacgtgtccctgatggagaactacccaggcaccctgcaggccctgggggagcccatccggcagggccacttcatcgtgtgggagggcgcccctggggccaggatgccctggaagggccacaacagacatgtgttcctgttcaggaaccacctggtgatctgcaagccccggcgggacagcaggacagacacagtgtcctatgtgttcaggaacatgatgaagctgagcagcattgacctgaatgaccaggtggagggagatgaccgggcctttgaggtgtggcaggagagagaagattctgtgaggaagtacctgctgcaggccaggacagccatcatcaagagctcctgggtgaaggagatctgtggcatccagcagaggctggccctgcctgtgtggaggcccccagactttgaggaggagctggccgactgcacagctgagctgggggagaccgtgaagctggcctgccgggtgacaggcacccccaagcctgtgatctcctggtacaaggatggcaaggctgtgcaggtggacccccaccacatcctgattgaagatcctgatggcagctgtgccctgatcctggacagcctgactggagtggacagcggccagtacatgtgctttgctgccagcgctgctggcaactgcagcaccctgggcaagatcctggtgcaggtgccccccaggtttgtgaacaaggtgcgggccagcccctttgtggagggggaggatgcccagttcacctgcaccatcgagggcgccccctacccccagatccgctggtacaaggatggagccctgctgaccactggaaacaagttccagaccctgtctgagcccaggagcggcctgctggtgctggtgatccgggccgccagcaaggaggacctgggcctgtatgaatgtgagctggtgaaccggctgggcagcgcccgggccagcgctgagctgcgcatccagagccccatgctgcaggcccaggagcagtgccaccgggagcagctggtggccgctgtggaggacaccaccctggagagagctgaccaggaggtgacctctgtgctgaagaggctgctgggccccaaggcccctggccccagcactggagacctgactggacctggcccctgccccaggggggccccagccctgcaggagaccggcagccagccccctgtgacaggcaccagcgaggccccagctgtgcccccccgggtgccccagcccctgctgcacgagggccctgagcaggagcctgaggccatcgcccgggcccaggagtggacagtgcccatccgcatggagggcgccgcctggccaggagctggcactggagagctgctgtgggatgtgcacagccacgtggtgcgggagaccacccagaggacctacacctaccaggccatcgacacccacacagcccggcccccatccatgcaggtgaccattgaagatgtgcaggcccagacaggaggaacagcccagtttgaggccatcattgaaggagacccccagcccagcgtgacctggtacaaggacagcgtgcagctggtggacagcacccggctgagccagcagcaggagggcaccacctacagcctggtgctgcggcacgtggccagcaaggatgctggggtgtacacctgcctggcccagaacacaggaggccaggtgctgtgcaaggccgagctgctggtgctgggcggggacaatgaaccagacagcgagaagcagagccacaggaggaagctgcacagcttctatgaggtgaaggaggagatcggccggggcgtgtttggatttgtgaagagggtgcagcacaagggcaacaagatcctgtgtgccgccaagttcatccccctgcggagcaggacccgggcccaggcctaccgggagcgggacatcctggccgccctgagccaccccctggtgacaggcctgctggaccagtttgagaccaggaagaccctcatcctgatcctggagctgtgcagcagcgaggagctgctggaccggctgtacagaaaaggagtggtgacagaagctgaggtgaaggtgtacatccagcagctggtggagggcctgcactacctgcacagccacggcgtgctgcacctggacatcaagcccagcaacatcctgatggtgcacccagcccgggaggacatcaagatctgtgactttggatttgcccagaacatcaccccagctgagctgcagttcagccagtatggcagccctgagtttgtgtccccagagatcatccagcagaaccctgtgtctgaggccagtgacatctgggccatgggcgtcatctcctacctgagcctgacctgcagcagcccctttgctggggagagtgaccgggccaccctgctgaatgtgctggagggccgggtgtcctggagcagccccatggccgcccacctgtctgaagatgccaaggacttcatcaaggccaccctgcagagggccccccaggcccggcccagcgctgcccagtgcctgagccacccctggttcctgaagtccatgcctgctgaggaggcccacttcatcaacaccaagcagctgaagttcctgctggcccggagccgctggcagaggagcctgatgagctacaagagcatcctggtgatgaggagcatccctgagctgctgcggggccccccagacagccccagcctgggcgtggcccggcacctgtgccgggacacaggaggcagcagcagcagcagcagcagcagtgacaatgagctggccccctttgcccgggccaagagcctgccccccagccctgtgacccacagccccctgctgcacccccggggcttcctgcggcccagcgccagcctgcctgaggaggccgaggccagcgagaggagcacagaggccccagcccccccagccagccctgagggcgccggccccccagctgcccagggctgtgtgcccaggcacagcgtcatccgcagcctcttctaccaccaggccggggagagccctgagcacggggccctggcccctggcagcagaagacacccagccaggagaagacacctgctgaagggcggctacatcgccggggccctgcccggcctgcgggagcccctgatggagcaccgggtgctggaggaggaggccgcccgggaggagcaggccaccctgctggccaaggcccccagctttgaaacagccctgcggctgcctgccagcggcacccacctggcccctggccacagccacagcctggagcatgacagccccagcaccccccggcccagcagcgaggcctgtggggaggcccagaggctgcccagcgcccccagcggcggggcccccatccgggacatgggccacccccagggcagcaagcagctgcccagcactggaggccaccctggaacagcccagcctgagcggcccagcccagacagcccctggggccagcctgcccccttctgccaccccaagcagggcagcgccccccaggagggctgcagcccccaccctgctgtggccccctgccccccaggcagcttccccccaggcagctgcaaggaggcccccctggtgcccagcagccccttcctgggccagccccaggcccccccagccccagccaaggccagcccccccctggacagcaagatgggccctggggacatcagcctgcccggccggcccaagccaggcccctgcagcagccctggcagcgccagccaggccagcagcagccaggtgagcagcctgcgggtgggcagcagccaggtgggcacagagcccggccccagcctggatgctgagggctggacccaggaggccgaggacctgagtgacagcacccccaccctgcagaggccccaggagcaggccaccatgaggaagttcagcctgggcggccggggcggctacgccggcgtggccggctacggcacctttgcctttggaggagatgctgggggcatgctgggccagggccccatgtgggcccgcatcgcctgggccgtgtcccagagcgaggaggaggagcaggaggaggcccgggcagagagccagagcgaggagcagcaggaggcccgggcagagagccccctgccccaggtgtctgcccggcctgtgcctgaggtgggccgggcccccaccaggagcagccctgagcccaccccctgggaggacatcggccaggtgtccctggtgcagatccgggacctgtctggagatgctgaggccgctgacaccatcagcctggacatcagcgaggtggaccctgcctacctgaacctgagtgacctgtatgacatcaagtacctgccctttgagttcatgatcttcaggaaggtgcccaagagcgcccagcctgagccccccagccccatggccgaggaggagctggccgagttccctgagcccacctggccctggccaggagagctgggcccccacgccggcctggagatcacagaggagagtgaagatgtggatgccctgctggccgaggccgctgtgggcaggaagaggaagtggagcagccccagccgcagcctcttccacttccctggccgccacctgcccctggatgagcctgctgagctgggcctgcgggagcgggtgaaggcctctgtggagcacatcagccgcatcctgaagggccggcctgagggcctggagaaggagggcccccccaggaagaagccaggcctggccagcttccggctgagcggcctgaagtcctgggaccgggcccccaccttcctgcgggagctgagtgatgagaccgtggtgctgggccagagcgtgaccctggcctgccaggtgtctgcccagcctgctgcccaggccacctggagcaaggatggagcccccctggagagcagcagccgggtgctgatcagcgccaccctgaagaacttccagctgctgaccatcctggtggtggtggccgaggacctgggcgtgtacacctgcagcgtgtccaatgccctgggcaccgtgaccaccactggagtgctgaggaaggccgagcggcccagcagcagcccctgcccagacatcggggaggtgtatgcagatggagtgctgctggtgtggaagcctgtggagagctatggccctgtgacctacatcgtgcagtgcagcctggagggcggctcctggaccaccctggccagtgacatctttgactgctgctacctgaccagcaagctgagccggggcggcacctacaccttcagaacagcctgtgtgtccaaggccggcatgggcccctacagcagccccagcgagcaggtgctgctgggcggccccagccacctggccagcgaggaggagagccagggccgcagcgcccagcccctgcccagcaccaagacctttgccttccagacccagatccagaggggccgcttctctgtggtgcggcagtgctgggagaaggccagcggccgggccctggccgccaagatcatcccctaccaccccaaggacaagacagctgtgctgcgggagtatgaggccctgaagggcctgcggcacccccacctggcccagctgcacgccgcctacctgagccccaggcacctggtgctgatcctggagctgtgcagcggccctgagctgctgccctgcctggccgagcgggccagctacagcgagagcgaggtgaaggactacctgtggcagatgctgagcgccacccagtacctgcacaaccagcacatcctgcacctggacctgcggtctgagaacatgatcatcacagagtacaacctgctgaaggtggtggacctgggcaatgcccagagcctgagccaggagaaggtgctgcccagcgacaagttcaaggactacctggagaccatggagctgctggagggccagggcgctgtgccccagacagacatctgggccatcggcgtgacagccttcatcatgctgtctgctgagtaccctgtgagcagcgagggcgcccgggacctgcagaggggcctgaggaagggcctggtgcggctgagccgctgctacgccggcctgtctggaggagctgtggccttcctgcggagcaccctgtgtgcccagccctggggccggccctgtgccagcagctgcctgcagtgcccctggctgacagaggagggccctgcctgcagcaggcctgcccctgtgaccttccccacagcccggctgcgggtgtttgtgaggaaccgggagaagagaagagccctgctgtacaagaggcacaacctggcccaggtgaggtag

SEQ ID NO: 21380 - DNA, 1749 bp, synthetic construct
  source 1..1749: mol_type = other DNA; note = Synthetic coding sequence
atggagaaggctgtgaatgatggcagccacagcgaggagctgttctgccacctgaagaccatcagcgagaaggaggacctgccccgctgcaccagcgagagccacctgagctgcctgaagcaggacatcctgaatgagaagacagagctggaggccaccctgaaggaggccgagctggtgacccacagcgtggagctgctgctgcccctcttcaaggacaccatcgagaagatcaactttgaaaatgccaacctgagcgccctgaacctgaagatcagcgagcagaaggagatcctgatcaaggagctggacaccttcaagtctgtgaagctggccctggagcacctgctgaggaagagggactacaagcagacaggagacaacctgagctccatgctgctggagaacctgacagacaatgaaagtgagaacaccaacctgaagaagaaggtgtttgagaaggaggcccacatccaggagctgagctgcctcttccagagcgagaaggccaacaccctgaaggccaaccgcttcagccagagcgtgaaggtggtgcatgagcggctgcagatccagatccacaagcgggaggctgaaaatgacaagctgaaggagtatgtgaagagcctggagaccaagatcgccaagtggaacctgcagagcaggatgaacaagaatgaggccatcgtgatgaaggaggccagccggcagaagacagtggccctgaagaaggccagcaaggtgtacaagcagaggctggaccacttcaccggggccatcgagaagctgaccagccagatccgggaccaggaggccaagctgtctgagaccatcagcgccagcaatgcctggaagagccactatgagaagatcgtgattgagaagacagagctggaggtgcagatcgagaccatgaagaagcagatcatcaacctgctggaggacctgaagaagatggaggaccacggcaagaacagctgtgaggagatcctgaggaaggtgcacagcattgaatatgaaaatgagaccctgaacctggagaacaccaagctgaagaccaccctggccgccctgaaggatgaggtggtgtctgtggagaatgagctgtctgagctgcaggaggtggagaagaagcagaagaccctgattgagatgtacaagacccaggtgcagaagctgcaggaggccgctgagatcgtgaagagccgctgtgagaacctgctgcacaagaacaaccagatcaccaagaccaagaacaagaatgtggagaagatgaggggccagatggagagccacctgaaggagctggagcgggtgtgtgacagcctgacagctgctgagcggcggctgcacgagtgccaggtggatggcaaccacaacctgctgaccaagctgagcctggaggaggagaactgcctgatccagctgaagtgtgagaacctgcagcagaagctggagcagatggatgctgagaacaaggagctggagaagaagctggccaaccaggaggagtgcctgaagcacagcaacctgaagttcaaggagaagtctgctgagtacacagccctggcccggcagctggaggccgccctggaggagggccggcagaaggtggccgaggagattgagaagatgagcagccgggagagcgccctgcagatcaagatcctggacctggagacagagctgaggaagaagaatgaggagcagaaccagctggtgtgcaagatgaacagcaccaatggatag

SEQ ID NO: 21381 - DNA, 384 bp, synthetic construct
  source 1..384: mol_type = other DNA; note = Synthetic coding sequence
atggtgagcagcggccgccgctggctgcgggagcagcagcaccggcgctggaggctgcactgcctgaagctgcagcccctgagccctgtgcccagcgacatcgagatcagccggggccagacccccaaggctgtggatgtgctggccaaggagatcggcctgctggctgatgaaattgagatctacggcaagagcaaggccaaggtgcggctgtctgtgctggagcggctgaaggaccaggctgatggcaagtatgtgctggtggccggcatcacccccacccccctgggggagggcaagagcacagtgaccatcggcctggtgcaggccctgacagcccacctgaatgtgaacagctttgcctgcctgcggcagcccagctag

SEQ ID NO: 21382 - DNA, 1929 bp, synthetic construct
  source 1..1929: mol_type = other DNA; note = Synthetic coding sequence
atgaagatcttctgcagccgggccaaccccaccaccggctctgtggagtggctggaggaggatgagcactatgactaccaccaggagatcgcccggagcagctatgctgacatgctgcatgacaaggacagagtcttcaagcccatggctgatgctgctgtgaagatcgtggagaagaatggcttcagtgacaagatcaaggtgatcaacaagcacagcacagaggtgacagtgggccctgagggggacatgccctgccgggccaacatcctggtgacagagctgtttgacacagagctgattggagagggcgccctgcccagctatgaacatgcccaccgccacctggtggaggagaactgtgaggccgtgccccaccgggccaccgtgtatgcccagctggtggagagcggccgcatgtggagctggaacaagctgttccccatccacgtgcagaccagcctgggggagcaggtgattgtgccccctgtggatgtggagagctgccctggggcccccagcgtgtgtgacatccagctgaaccaggtgtccccagctgacttcaccgtgctgagtgatgtgctgcccatgttcagcattgacttcagcaagcaggtgagcagcagcgctgcctgccacagcagaagatttgagcccctgaccagcggccgggcccaggtggtgctgtcctggtgggacatcgagatggaccctgagggcaagatcaagtgcaccatggcccccttctgggcccacagcgaccctgaggagatgcagtggagggaccactggatgcagtgtgtgtacttcctgccccaggaggagcctgtggtgcagggcagcgccctgtacctggtggcccaccatgatgactactgtgtgtggtacagcctgcagaggaccagccctgagaagaatgaaagagtgcggcagatgaggcctgtgtgtgactgccaggcccacctgctgtggaaccggcccaggtttggagagatcaatgaccaggacagaacagacagatatgtgcaggccctgaggacagtgctgaagccagattctgtgtgcctgtgtgtgtctgatggcagcctgctgtctgtgctggcccaccacctgggcgtggagcaggtgttcaccgtggagagcagcgctgccagccacaagctgctgaggaagatcttcaaggccaaccacctggaggacaagatcaacatcatcgagaagaggcctgagctgctgaccaatgaagacctgcagggcaggaaggtgtccctgctgctgggggagcccttcttcaccaccagcctgctgccctggcacaacctgtacttctggtacgtgaggacagctgtggaccagcacctgggccctggggccatggtgatgccccaggccgccagcctgcatgctgtggtggtggagttccgggacctgtggaggatccgcagcccctgtggggactgtgagggctttgatgtgcacatcatggatgacatgatcaagagggccctggacttccgggagagccgggaggccgagccccaccccctgtgggagtacccctgccgcagcctgtctgagccctggcagatcctgacctttgacttccagcagcctgtgcccctgcagcccctgtgtgccgagggcaccgtggagctgcggcggcccggccagagccacgccgctgtgctgtggatggagtaccacctgaccccagagtgcaccctgagcacaggcctgctggagcctgctgaccctgagggcggctgctgctggaacccccactgcaagcaggccgtgtacttcttcagccctgccccagacccccgggccctgctgggcggccccaggacagtgtcctatgctgtggagttccacccagacaccggggacatcatcatggagttcagacatgctgacaccccagactag

SEQ ID NO: 21383 - DNA, 300 bp, synthetic construct
  source 1..300: mol_type = other DNA; note = Synthetic coding sequence
atggtggtgaagctgctgagcaacaagaggagccaggccgtgggcatcctgatgagcagcctgcacctggacatgaaggacatccagcacgctgtggtgaacctggacaacagcgtggtggacctggagaccctgcaggccctgtatgagaacagagcccagagtgatgagctggagaagattgagaagcacggccgcagcagcaaggacaaggaaaatgccaagagcctggacaagccagagcagttcctgtatgagctgagcctcatccccaacttcagcgagagggtcttctgctag

SEQ ID NO: 21384 - DNA, 390 bp, synthetic construct
  source 1..390: mol_type = other DNA; note = Synthetic coding sequence
atgggcggctgcttcagcaagcccaagcctgtggagctgaagattgaggtggtgctgcctgagaaggagcggggcaaggaggagctgagcgccagcggcaagggcagcccccgggcctaccagggcaatggaacagcccggcacttccacacagaggagcggctgagcaccccccacccctaccccagcccccaggactgtgtggaggccgctgtgtgccacgtgaaggacctggagaatggccagatgagggaggtggagctgggctggggcaaggtgctgctggtgaaggacaatggagagttccacgccctgggccacaagtgcccccactacggggcccccctggtgaagggcgtgctgagccggggccgggtgcgctgcccctag

SEQ ID NO: 21385 - DNA, 453 bp, synthetic construct
  source 1..453: mol_type = other DNA; note = Synthetic coding sequence
atgaacctggccgagatctgtgacaatgccaagaagggccgggagtatgccctgctgggcaactatgacagctccatggtgtactaccagggcgtgatgcagcagatccagaggcactgccagagcgtgcgggaccctgccatcaagggcaagtggcagcaggtgcggcaggagctgctggaggagtatgagcaggtgaagagcatcgtgtccaccctggagagcttcaagattgacaagcccccagacttccctgtgtcctgccaggatgagcccttccgggaccctgctgtgtggcccccacctgtgcctgctgagcaccgggccccaccccagatccggcggcccaaccgggaggtgcggcccctgaggaaggagatggccggcgtgggcgcccggggccctgtgggccgggcccaccccatcagcaagtctgagaagcccagcacctag

SEQ ID NO: 21386 - DNA, 498 bp, synthetic construct
  source 1..498: mol_type = other DNA; note = Synthetic coding sequence
atgggcgtgaaccagagcgtgggcttcccccctgtgacaggcccccacctggtgggctgtggagatgtgatggagggccagaacctgcagggcagcttcttccgcctcttctacccctgccagaaggccgaggagaccatggagcagcccctgtggatccccaggtatgagtactgcaccggcctggccgagtacctgcagttcaacaagagatgtggcggcctgctcttcaacctggccgtgggcagctgccgcctgcctgtgtcctggaatggccccttcaagaccaaggacagcggctaccccctcatcatcttcagccacggcctgggcgccttccgcaccctgtacagcgccttctgcatggagctggccagccggggctttgtggtggccgtgcctgagcaccgggacagatctgctgccaccacctacttctgcaagcaggcccctgaggagaaccagcccaccaatgaaagcctgcaggaggagtggtag

SEQ ID NO: 21387 - DNA, 270 bp, synthetic construct; identical to SEQ ID NO: 20498
  source 1..270: mol_type = other DNA; note = Synthetic coding sequence

SEQ ID NO: 21388 - DNA, 6009 bp, synthetic construct
  source 1..6009: mol_type = other DNA; note = Synthetic coding sequence
atggaggagaggaagcatgagaccatgaacccagcccacgtgctgtttgacagatttgtgcaggccaccacctgcaagggcaccctgaaggccttccaggagctgtgtgaccacctggagctgaagcccaaggactaccgctccttctaccacaagctgaagagcaagctgaactactggaaggccaaggccctgtgggccaagctggacaagaggggcagccacaaggactacaagaagggcaaggcctgcaccaacaccaagtgcctgatcatcggggccggcccctgtggcctgaggacagccatcgacctgagcctgctgggcgccaaggtggtggtgattgagaagagagatgccttcagcagaaataatgtgctgcacctgtggcccttcaccatccatgacctgcggggcctgggcgccaagaagttctacggcaagttctgtgccggggccatcgaccacatcagcatccggcagctgcagctgatcctgctgaaggtggccctgatcctgggcatcgagatccacgtgaatgtggagttccagggcctcatccagcccccagaggaccaggagaatgaaagaattggctggagggccctggtgcaccccaagacccaccctgtgtctgaatatgaatttgaggtgatcattggaggagatggaagaagaaacaccctggagggcttccggaggaaggagttccggggcaagctggccatcgccatcacagccaacttcatcaacagaaacaccacagctgaggccaaggtggaggagatcagcggcgtggccttcatcttcaaccagaagttcttccaggagctgcgggaggccaccggcatcgacctggagaacatcgtgtactacaaggatgacacccactactttgtgatgacagccaagaagcagagcctgctggacaagggcgtcatcctgcatgactatgctgacacagagctgctgctgagccgggagaatgtggaccaggaggccctgctgtcctatgcccgggaggccgctgacttcagcacccagcagcagctgcccagcctggactttgccatcaaccactacggccagccagatgtggccatgtttgacttcacctgcatgtatgcctctgaaaatgctgccctggtgcgggagcagaatggccaccagctgctggtggccctggtgggggacagcctgctggagcccttctggcccatgggcactggaattgcccggggcttcctggccgccatggattctgcctggatggtgcgctcctggagcctgggcaccagccccctggaggtgctggccgagcgggagagcatctaccgcctgctgccccagaccaccccagaaaatgtgtccaagaacttcagccagtacagcattgatcctgtgacccgctaccccaacatcaacgtgaacttcctgcggcccagccaggtgcgccacctgtatgacaccggggagaccaaggacatccacctggagatggagagcctggtgaacagcaggaccacccccaagctgaccagaaatgaatctgtggcccggagcagcaagctgctgggctggtgccagaggcagacagatggctacgccggcgtgaatgtgacagacctgaccatgtcctggaagagcggcctggccctgtgtgccatcatccaccgctacagaccagacctgattgactttgacagcctggatgagcagaatgtggagaagaacaaccagctggcctttgatattgctgagaaggagctgggcatcagccccatcatgaccgggaaggagatggcctctgtgggggagccagacaagctgtccatggtgatgtacctgacccagttctatgagatgttcaaggacagcctgcccagcagtgacaccctggacctgaatgctgaggagaaggctgtgctgattgccagcaccaggagccccatctccttcctgagcaagctgggccagaccatcagcaggaagaggagccccaaggacaagaaggagaaggacctggatggagctgggaagaggaggaagaccagccagagcgaggaggaggaggccccccggggccacagaggagagcggcccaccctggtgtccaccctgacagacaggaggatggatgtggccgtgggcaaccagaacaaggtgaagtacatggccacccagctgctggccaagtttgaagaaaatgccccagcccagagcatcggcatccggcggcagggctccatgaagaaggagttcccccagaacctgggcggcagtgacacctgctacttctgccagaagagggtgtatgtgatggagcggctgtctgctgagggcaagttcttccacaggagctgcttcaagtgtgagtactgtgccaccaccctgcggctgagcgcctatgcctatgacattgaagatggcaagttctactgcaagccccactactgctaccgcctgagcggctacgcccagaggaagaggcctgctgtggcccccctgagcggcaaggaggccaagggccccctgcaggatggagccaccacagatgccaacggccgggccaatgctgtggccagcagcacagagaggaccccaggcagcggcgtgaatggcctggaggagcccagcatcgccaagaggctgcggggcaccccagagagaattgagctggagaactaccgcctgagcctgcggcaggccgaggccctgcaggaggtgcctgaggagacccaggccgagcacaacctgagctctgtgctggacacaggagcagaagaagatgtggccagcagcagcagcgagagcgagatggaggaggagggggaggaggaggaggaggagccccggctgccccccagcgacctgggcggcgtgccctggaaggaggccgtgcgcatccacgccctgctgaagggcaagtctgaggaggagctggaggccagcaagagctttggacctggaaatgaggaggaggaggaggaggaggaggagtatgaggaggaggaggaggaggactatgatgaggaggaggaggagagcagcgaggccggcaaccagaggctgcagcaggtgatgcacgccgctgaccccctggagatccaggctgatgtgcactggacccacatccgggagcgggaggaggaggagaggatggccccagccagcgagagcagcgccagcggggcccccctggatgaaaatgacctggaggaggatgtggacagcgagcctgctgagattgaaggagaggccgcagaagatggagaccccggggacaccggggctgagctggatgatgaccagcactggagcgacagccccagtgatgctgaccgggagctgcggctgccctgcccagctgagggggaggccgagctggagctgcgggtgtctgaagatgaggagaagctgcctgccagccccaagcaccaggagcggggccccagccaggccaccagccccatccgcagcccccaggagagcgccctgctcttcatccctgtgcacagccccagcacagagggcccccagctgccccctgtgcctgctgccacccaggagaagagccctgaggagcggctcttccctgagcccctgctgcccaaggagaagcccaaggcagatgcccccagcgacctgaaggctgtgcacagccccatccgcagccagcctgtgaccctgcctgaggcccggacccctgtgtccccaggcagcccccagccccagccccctgtggccgccagcaccccaccacccagccccctgcccatctgcagccagccccagcccagcacagaggccaccgtgcccagccccacccagagccccatccgcttccagcctgccccagccaagaccagcacccccctggcccccctgcctgtgcagagccagagcgacaccaaggaccggctgggcagccccctggccgtggatgaggccctgcggcggagtgacctggtggaggagttctggatgaagtctgctgagatcagaagaagcctgggcctgacccctgtggacaggagcaaaggacctgagcccagcttccccaccccagccttccggcctgtgtccctgaagagctacagcgtggagaagagcccccaggatgagggcctgcacctgctgaagcccctgagcatccccaagaggctgggcctgcccaagccagagggggagcccctgagcctgcccacccccaggagccccagcgaccgggagctgcggagcgcccaggaggagcggcgggagctgagcagcagcagcggcctgggcctgcacggcagcagcagcaacatgaagaccctgggcagccagagcttcaacaccagtgacagcgccatgctgaccccacccagcagccccccacctcctcctcctcctggagaggagcccgccaccctgcggaggaagctgcgggaggccgagcccaatgcctctgtggtgcccccacccctgcctgccacctggatgaggcctccccgggagcccgcccagcccccccgggaggaggtgaggaagagctttgtggagagcgtggaggagatcccctttgctgatgatgtggaggacacctatgatgacaagacagaggacagcagcctgcaggagaagttcttcaccccacccagctgctggcccaggcctgagaagcccaggcacccccccctggccaaggaaaatggccgcctgcctgccctggagggcaccctgcagccccagaagaggggcctgcccctggtgtctgctgaggccaaggagctggccgaggagaggatgagggcccgggagaagtctgtgaagagccaggccctgagagatgccatggcccggcagctgagcaggatgcagcagatggagctggccagcggggccccccggcccaggaaggccagcagcgcccccagccagggcaaggagaggaggccagacagccccacccggcccaccctgcggggcagcgaggagcccaccctgaagcatgaggccaccagcgaggaggtgctgagccccccaagtgacagcggcggcccagatggcagcttcaccagcagcgagggcagcagcggcaagagcaagaagaggagcagcctcttcagccccaggaggaacaagaaggagaagaagagcaaaggagagggccggcccccagagaagcccagcagcaacctgctggaggaggccgccgccaagcccaagagcctgtggaagagcgtcttcagcggctacaagaaggacaagaagaagaaggcagatgacaagagctgccccagcacccccagcagcggggccaccgtggacagcggcaagcaccgggtgctgcctgtggtgcgggcagagctgcagctgcggcggcagctgtccttctctgaagattctgacctgagcagtgatgatgtgctggagaagagcagccagaagagcagaagagagcccaggacctacacagaggaggagctgaatgccaagctgacccggcgggtgcagaaggccgcccggcggcaggccaagcaggaggagctgaagaggctgcaccgggcccagatcatccagaggcagctgcagcaggtggaggagcggcagaggcggctggaggagcggggcgtggccgtggagaaggccctgcggggggaggccggcatgggcaagaaggatgaccccaagctgatgcaggagtggttcaagctggtgcaggagaagaatgccatggtgcgctatgagagcgagctgatgatctttgcccgggagctggagctggaggaccggcagagccggctgcagcaggagctgcgggagaggatggctgtggaggaccacctgaagacagaggaggagctgtctgaggagaagcagatcctgaatgagatgctggaggtggtggagcagagggacagcctggtggccctgctggaggagcagaggctgcgggagcgggaggaggacaaggacctggaggccgccatgctgagcaagggcttcagcctgaactggagctag

SEQ ID NO: 21389 - DNA, 540 bp, synthetic construct
  source 1..540: mol_type = other DNA; note = Synthetic coding sequence
atgagcagcaatgaatgcttcaagtgtggccgcagcggccactgggcccgggagtgccccactggaggcggccggggccggggcatgaggagccggggccggggcggcttcaccagtgaccggggcttccagtttgtgagcagcagcctgcctgacatctgctaccgctgtggggagagcggccacctggccaaggactgtgacctgcaggaggatgtggaggcctgctacaactgtggccggggcggccacatcgccaaggactgcaaggagcccaagcgggagcgggagcagtgctgctacaactgtgggaagccaggccacctggcccgggactgtgaccacgcagatgagcagaagtgctacagctgtggggagtttggccacatccagaaggactgcaccaaggtgaagtgctaccgctgtggggagactggacatgtggccatcaactgcagcaagaccagcgaggtgaactgctaccgctgtggggagagcggccacctggcccgggagtgcaccatcgaggccacagcctag

SEQ ID NO: 21390 - DNA, 1140 bp, synthetic construct
  source 1..1140: mol_type = other DNA; note = Synthetic coding sequence
gcccgggctgtgcctgtgggcagcggcctgcggggcctgcagaggaccctgcccctggtggtgatcctgggcgccaccggcaccgggaagagcaccctggccctgcagctgggccagaggctgggcggggagatcgtgtctgctgacagcatgcagccccaggagatgggcacagagaaggtgattgacaggaaggtggagctggagaaggaggatggcctggtgctgcacaagaggctgagccaggtggaccctgagatggccgccaagctgcacccccatgacaagaggaaggtggcccggagcctgcaggtgtttgaggagaccggcatcagccacagcgagttcctgcaccggcagcacacagaggagggcggcggccccctgggcggccccctgaagttcagcaacccctgcatcctgtggctgcatgctgaccaggctgatgagcggctggacaagagggtggatgacatgctggccgccggcctgctggaggagctgcgggacttccaccggcgctacaaccagaagaatgtgtctgagaacagccaggactaccagcacggcatcttccagagcatcggcttcaaggagttccacgagtacctgatcacagagggcaagtgcaccctggagaccagcaaccagctgctgaagaagggcatcgaggccctgaagcaggtgaccaagagatatgccaggaagcagaaccgctgggtgaagaaccgcttcctgagcaggcctggccccatcgtgccccctgtgtatggcctggaggtgtctgatgtgtccaagtgggaggagagcgtgctggagcccgccctggagatcgtgcagagcttcatccagggccacaagcccacagccacccccatcaagatgccctacaatgaagctgagaacaagaggagctaccacctgtgtgacctgtgtgaccgcatcatcattggagaccgggagtgggccgcccacatcaagagcaagagccacctgaaccagctgaagaagagaagaaggctggacagtgatgctgtgaacaccatcgagagccagagcgtgtccccagaccacaacaaggagcccaaggagaagggcagccctggccagaatgaccaggagctgaagtgcagcgtgtag

SEQ ID NO: 21391 - DNA, 483 bp, synthetic construct; identical to SEQ ID NO: 20009
  source 1..483: mol_type = other DNA; note = Synthetic coding sequence

SEQ ID NO: 21392 - DNA, 816 bp, synthetic construct
  source 1..816: mol_type = other DNA; note = Synthetic coding sequence
atgaacctggagaagctgagcaagccagagctgctgaccctcttcagcatcctggagggggagctggaggcccgggacctggtgattgaggccctgaaggcccagcaccgggacaccttcatcgaggagagatatggcaagtacaacatcagtgaccccctgatggccctgcagagggactttgagaccctgaaggagaagaatgatggagagaagcagcctgtgtgcaccaaccccctgagcatcctgaaggtggtgatgaagcagtgcaagaacatgcaggagaggatgctgagccagctggccgctgctgagagccgccacaggaaggtgatcctggacctggaggaggagcggcagagacatgcccaggacacagcagaaggagatgatgtgacctacatgctggagaaggagcgggagcggctgacccagcagctggagtttgagaagagccaggtgaagaagtttgagaaggagcagaagaagctgagcagccagctggaggaggagaggagccgccacaagcagctgagctccatgctggtgctggagtgcaagaaggccaccaacaaggctgctgaggagggccagaaggccggggagctgagcctgaagctggagaaggagaagagccgggtgtccaagctggaggaggagctggccgctgagaggaagaggggcctgcagacagaggcccaggtggagaagcagctgtctgaatttgacatcgagcgggagcagctgcgggccaagctgaaccgggaggagaacagaaccaagaccctgaaggaggagatggagagcctgaagtag

SEQ ID NO: 21393 - DNA, 1482 bp, synthetic construct
  source 1..1482: mol_type = other DNA; note = Synthetic coding sequence
atggaccaggactatgaaagaaggctgctgcggcagatcgtcatccagaatgaaaacaccatgccccgggtgacagagatgaggaggaccctgaccccagccagcagccctgtgagcagccccagcaagcacggggaccgcttcatccccagcagagctggggccaactggagcgtgaacttccaccgcatcaatgaaaatgagaagagccccagccagaacaggaaggccaaggatgccaccagtgacaacgggaaggatggcctggcctacagcgccctgctgaagaatgagctgctgggcgccggcatcgagaaggtgcaggacccccagacagaagatagaaggctgcagcccagcaccccagagaagaagggcctcttcacctacagcctgagcaccaagaggagcagcccagatgatggaaatgatgtgagcccctacagcctgagccctgtgagcaacaagagccagaagctgctgcggagccccaggaagcccaccaggaagatcagcaagatccccttcaaggtgctggatgcccctgagctgcaggatgacttctacctgaacctggtggactggagcagcctgaatgtgctgtctgtgggcctgggcacctgtgtgtacctgtggagcgcctgcaccagccaggtgacccggctgtgtgacctgtctgtggagggggacagcgtgacctctgtgggctggagcgagcggggcaacctggtggccgtgggcacccacaagggctttgtgcagatctgggatgctgctgctgggaagaagctgtccatgctggagggccacacagcccgggtgggcgccctggcctggaatgctgagcagctgagcagcggcagccgggacaggatgatcctgcagagggacatccgcaccccacccctgcagagcgagcggcggctgcagggccaccggcaggaggtgtgtggcctgaagtggagcacagaccaccagctgctggccagcggcggcaatgacaacaagctgctggtgtggaaccacagcagcctgagccctgtgcagcagtacacagagcacctggccgctgtgaaggccatcgcctggagcccccaccagcacggcctgctggccagcggcggcggcacagctgaccgctgcatccgcttctggaacaccctgaccggccagcccctgcagtgcatcgacaccggcagccaggtgtgcaacctggcctggagcaagcacgccaatgagctggtgtccacccacggctacagccagaaccagatcctggtgtggaagtaccccagcctgacccaggtggccaagctgaccggccacagctacagagtgctgtacctggccatgagcccagatggagaggccatcgtgactggagctggagatgagaccctgcgcttctggaatgtgttcagcaagaccaggagcaccaaggagagcgtgtctgtgctgaacctcttcacccgcatcagatag

SEQ ID NO: 21394 - DNA, 552 bp, synthetic construct
  source 1..552: mol_type = other DNA; note = Synthetic coding sequence
atgaagaaggagcacgtgctgcactgccagttcagcgcctggtaccccttcttccggggcgtgaccatcaagagcgtcatcctgcccctgccccagaatgtgaaggactacctgctggatgatggcaccctggtggtgtctggaagagatgacccccccacccacagccagcctgacagtgatgatgaggccgaggagatccagtggagcgatgatgaaaatacagccaccctgacagatgcctactggatcgccatgaacagcagcctgaagtgcaagaccctgagtgacatcttcctgctcttcaagagcagtgacttcatcacccgggacttcacccagcccttcatccactgcacagatgacagcccagacccctgcatcgagtatgagctggtgctgaggaagtggtgtgagctgatccctggagctgagttccgctgctttgtgaaggagaacaagctgattggcatcagccagagggactacacccagtactatgaccacatcagcaagcagaaggaggagatccgccgctgcatccaggactag

SEQ ID NO: 21395 - DNA, 672 bp, synthetic construct; identical to SEQ ID NO: 19405
  source 1..672: mol_type = other DNA; note = Synthetic coding sequence

SEQ ID NO: 21396 - DNA, 348 bp, synthetic construct
  source 1..348: mol_type = other DNA; note = Synthetic coding sequence
atgcccatcctgctcttcctgattgacaccagcgcctccatgaaccagaggagccacctgggcaccacctacctggacacagccaagggagctgtggagaccttcatgaagctgcgggcccgggaccctgccagcagaggagaccgctacatgctggtgacctttgaggagcccccctatgccatcaaggccggctggaaggagaaccacgccaccttcatgaatgagctgaagaacctgcaggccgagggcctgaccaccctgggccagagcctgaggacagcctttgacctgctgaacctgaaccggctggtgacaggcatcgacaactacggccaggtgggctag

SEQ ID NO: 21397 - DNA, 390 bp, synthetic construct; identical to SEQ ID NO: 19988
  source 1..390: mol_type = other DNA; note = Synthetic coding sequence

SEQ ID NO: 21398 - DNA, 2676 bp, synthetic construct
  source 1..2676: mol_type = other DNA; note = Synthetic coding sequence
atggtggcccctgtgctggagaccagccacgtgttctgctgccccaacagagtgcggggcgtgctgaactggagcagcggcccccggggcctgctggccttcggcaccagctgcagcgtggtgctgtatgaccccctgaagagggtggtggtgaccaacctgaatggccacacagcccgggtgaactgcatccagtggatctgcaagcaggacggcagccccagcacagagctggtgtctgggggcagtgacaaccaggtgatccactgggagattgaggacaaccagctgctgaaggctgtgcacctgcagggccacgagggccctgtgtatgctgtgcatgctgtgtaccagaggaggaccagtgaccctgccctgtgcaccctcatcgtgtctgctgctgctgacagcgctgtgcggctgtggagcaagaagggccctgaggtgatgtgcctgcagaccctgaactttggaaatggatttgccctggccctgtgcctgtccttcctgcccaacacagatgtgacctggaagacaggccaggtggagcggggccgggcctggaagcccccagccagcctggccctgtgcagccgcagctgtgacagcatggtgtcctgctacgccagcatcctgtgcaaggccctgtggaaggagaagctgcacaccttctggcaccacaaccgcatctccttcctgcccagcgccttccggcccatccccatcctggcctgtggaaatgatgactgccgcatccacatctttgcccagcagaatgaccagttccagaaggtgctgagcctgtgtggccacgaggactggatccggggcgtggagtgggccgccttcggccgggacctcttcctggccagctgcagccaggactgcctgatccgcatctggaagctgtacatcaagagcaccagcctggagacccaggatgatgacaacatccggctgaaggagaacaccttcaccattgaaaatgaatctgtgaagatcgcctttgctgtgaccctggagaccgtgctggccggccacgagaactgggtgaatgctgtgcactggcagcccgtcttctacaaggatggagtgctgcagcagcctgtgcggctgctgagcgcctccatggacaagaccatgatcctgtgggccccagatgaggagagcggcgtgtggctggagcaggtgcgggtgggggaggtgggcggcaacaccctgggcttctatgactgccagttcaatgaagatggctccatgatcatcgcccacgccttccatggagccctgcacctgtggaagcagaacacagtgaacccccgggagtggaccccagaaattgtcatcagcggccactttgatggagtgcaggacctggtgtgggaccctgagggggagttcatcatcaccgtgggcacagaccagaccacccggctgtttgccccctggaagaggaaggaccagagccaggtgacctggcatgagatcgcccggccccagatccacggctatgacctgaagtgcctggccatgatcaaccgcttccagtttgtgtctggagcagatgagaaggtgctgcgggtcttcagcgcccccaggaactttgtggagaacttctgtgccatcaccggccagagcctgaaccacgtgctgtgcaaccaggacagcgacctgcctgagggcgccaccgtgcctgccctgggcctgagcaacaaggctgtgttccagggcgacatcgccagccagcccagtgatgaggaggagctgctgaccagcactggatttgagtaccagcaggtggccttccagcccagcatcctgacagagcccccaacagaggaccacctgctgcagaacaccctgtggccagaggtgcagaagctgtatggccacggctatgagatcttctgtgtgacctgcaacagcagcaagaccctgctggccagcgcctgcaaggccgccaagaaggagcacgccgccatcatcctgtggaacaccacctcctggaagcaggtgcagaacctggtgttccacagcctgactgtgacccagatggccttcagccccaatgagaagttcctgctggccgtgtcccgggacaggacctggagcctgtggaagaagcaggacaccatcagccctgagtttgagcccgtcttcagcctgtttgccttcaccaacaagatcacctctgtgcacagccgcatcatctggagctgtgactggagcccagacagcaagtacttcttcaccggcagccgggacaagaaggtggtggtgtggggagaatgtgacagcacagatgactgcatcgagcacaacatcggcccctgcagctctgtgctggatgtgggcggcgctgtgacagctgtgtctgtgtgccctgtgctgcaccccagccagagatatgtggtggccgtgggcctggagtgtgggaagatctgcctgtacacctggaagaagacagaccaggtgcctgagatcaatgactggacccactgtgtggagaccagccagagccagagccacaccctggccatcaggaagctgtgctggaagaactgcagcggcaagacagagcagaaggaggccgagggcgctgagtggctgcactttgccagctgtggggaggaccacacagtgaagatccaccgggtgaacaagtgtgccctgtag

SEQ ID NO: 21399 - DNA, 573 bp, synthetic construct
  source 1..573: mol_type = other DNA; note = Synthetic coding sequence
atgggccccctgcccaggacagtggagctgttctatgatgtgctgagcccctacagctggctgggctttgagatcctgtgccgctaccagaacatctggaacatcaacctgcagctgcggcccagcctcatcaccggcatcatgaaggacagcggcaacaagcccccaggcctgctgcccaggaagggcctgtacatggccaatgacctgaagctgctgcggcaccacctgcagatccccatccacttccccaaggacttcctgtctgtgatgctggagaagggcagcctgagcgccatgaggttcctgacagctgtgaacctggagcaccctgagatgctggagaaggccagccgggagctgtggatgagggtgtggagcagaaatgaagacatcacagagccccagagcatcctggccgctgctgagaaggccggcatgtctgctgagcaggcccagggcctgctggagaagatcgccacccccaaggtgaagaaccagctgaaggagaccacagaggccgcctgccgctacggggagaggagcggctgggccctgtacctgcagccctag

SEQ ID NO: 21400 - DNA, 1482 bp, synthetic construct
  source 1..1482: mol_type = other DNA; note = Synthetic coding sequence
atgatgaagaggcagctgcacaggatgaggcagctggcccagacaggcagcctgggccgcaccccagagacagctgagttcctgggggaggacctgctgcaggtggagcagaggctggagcccgccaagagagctgcccacaacatccacaagaggctgcaggcctgcctgcagggccagagcggggctgacatggacaagagggtgaagaagctgcccctgatggccctgagcaccaccatggccgagagcttcaaggagctggaccctgacagctccatgggcaaggccctggagatgagctgtgccatccagaaccagctggcccgcatcctggccgagtttgagatgaccctggagagagatgtgctgcagcccctgagccggctgtctgaggaggagctgcctgccatcctgaagcacaagaagagcctgcagaagctggtgtctgactggaacaccctgaagagccggctgagccaggccaccaagaacagcggcagcagccagggcctgggcggcagccctggcagccacagccacaccaccatggccaacaaggtggagaccctgaaggaggaggaggaggagctgaagaggaaggtggagcagtgcagagatgagtacctggccgacctgtaccactttgtgaccaaggaggacagctatgccaactacttcatccggctgctggagatccaggccgactaccacagaagaagcctgagcagcctggacacagccctggccgagctgcgggagaaccacggccaggccgaccacagccccagcatgacagccacccacttcccccgggtgtatggagtgtccctggccacccacctgcaggagctgggccgggagatcgccctgcccatcgaggcctgtgtgatgatgctgctgtctgagggcatgaaggaggagggcctcttccggctggccgccggggcctctgtgctgaagaggctgaagcagaccatggccagtgacccccacagcctggaggagttctgcagcgacccccatgctgtggccggggccctgaagagctacctgcgggagctgcctgagcccctgatgacctttgacctgtatgatgactggatgagagctgccagcctgaaggagcccggggcccggctgcaggccctgcaggaggtgtgcagccggctgcccccagagaacctgagcaacctgcgctacctgatgaagttcctggcccggctggccgaggagcaggaggtgaacaagatgacccccagcaacatcgccatcgtgctgggccccaacctgctgtggcccccagagaaggagggcctggagtacagcggggccatcagcgcccactgcaacctgcggctgcccggcagcagtgacagcagcgccagcgcctgccaggtggccggcaccaccggcacccggcccagctggatgcagcccccctgcctgcccagccgctggtgggccagcagcagaagatag

SEQ ID NO: 21401 - DNA, 45 bp, synthetic construct; identical to SEQ ID NO: 12369
  source 1..45: mol_type = other DNA; note = Synthetic coding sequence

SEQ ID NO: 21402 - DNA, 828 bp, synthetic construct
  source 1..828: mol_type = other DNA; note = Synthetic coding sequence
atgtctgctgaggtgaaggtgacaggccagaaccaggagcagttcctgctgctggccaagagcgccaagggagctgccctggccaccctcatccaccaggtgctggaggcccctggggtgtatgtgtttggagagctgctggacatgcccaacgtgcgggagctggccgagagtgactttgccagcaccttccggctgctgactgtgtttgcctacggcacctacgccgactacctggccgaggccaggaacctgccccccctgacagaggcccagaagaacaagctgcggcacctgtctgtggtgaccctggccgccaaggtgaagtgcatcccctatgctgtgctgctggaggccctggccctgagaaatgtgcggcagctggaggacctggtgattgaagctgtgtatgcagatgtgctgcggggcagcctggaccagaggaaccagaggctggaggtggactacagcatcggccgggacatccagaggcaggacctgagcgccatcgcccggaccctgcaggagtggtgtgtgggctgtgaggtggtgctgagcggcatcgaggagcaggtgtcccgggccaaccagcacaaggagcagcagctgggcctgaagcagcagattgaaagtgaggtggccaacctgaagaagaccatcaaggtgaccacagctgctgctgctgctgccaccagccaggaccctgagcagcacctgacagagctgcgggagcccgcccctggcaccaaccagaggcagcccagcaagaaggccagcaagggcaagggcctgcggggcagcgccaagatctggagcaagagcaactag

SEQ ID NO: 21403 - DNA, 1506 bp, synthetic construct
  source 1..1506: mol_type = other DNA; note = Synthetic coding sequence
atggccgcccctgagcccgccccccggcgggcccgggagcgggagcgggagagagaagatgaaagtgaagatgaaagtgacatcctggaggagagcccctgtggccgctggcagaagaggcgggagcaggtgaaccagggcaacatgcctggcctgcagagcaccttcctggccatggacacagaggagggcgtggaggtggtgtggaatgagctgcactttggagacaggaaggcctttgctgcccacgaggagaagatccagacagtgtttgagcagctggtgctggtggaccaccccaacatcgtgaagctgcacaagtactggctggacaccagcgaggcctgtgcccgggtcatcttcatcacagaatatgtgagcagcggcagcctgaagcagttcctgaagaagaccaagaagaaccacaaggccatgaatgcccgggcctggaagcgctggtgcacccagatcctgagcgccctgtccttcctgcacgcctgcagcccccccatcatccacggcaacctgaccagtgacaccatcttcatccagcacaacggcctcatcaagattggctctgtgtggcaccgcatcttcagcaatgccctgcctgatgacctgcggagccccatccgggcagagcgggaggagctgaggaacctgcacttcttccccccagaatatggagaggtggctgatggaacagctgtggacatcttctcctttggcatgtgtgccctggagatggctgtgctggagatccagaccaatggagacaccagggtgacagaggaggccatcgcccgggcccggcacagcctgagtgaccccaacatgagggagttcatcctgtgctgcctggcccgggaccctgcccggcggcccagcgcccacagcctgctcttccaccgggtgctgtttgaggtgcacagcctgaagctgctggccgcccactgcttcatccagcaccagtacctgatgccagaaaatgtggtggaggagaagaccaaggccatggacctgcatgctgtgctggccgagctgccccggccccggcggccccccctgcagtggagatacagcgaggtgtccttcatggagctggacaagttcctggaggatgtgagaaatggcatctaccccctgatgaactttgctgccacccggcccctgggcctgccccgggtgctggcccctcctcctgaggaggtgcagaaggccaagacccccaccccagagccctttgattctgagaccaggaaggtgatccagatgcagtgcaacctggagaggtctgaggacaaggcccgctggcacctgaccctgctgctggtgctggaggaccggctgcaccggcagctgacctatgacctgctgcccacagattctgcccaggacctggccagcgagctggtgcactacggcttcctgcatgaagatgacaggatgaagctggccgccttcctggagagcaccttcctgaagtaccggggcacccaggcctag

SEQ ID NO: 21404 - DNA, 36 bp, synthetic construct
  source 1..36: mol_type = other DNA; note = Synthetic coding sequence
atgacagcccccagctgtgccttccctgtgcagtag

SEQ ID NO: 21405 - DNA, 534 bp, synthetic construct
  source 1..534: mol_type = other DNA; note = Synthetic coding sequence
atgctgctggacaagaatgtgcccaacccccgcatcaagctgattgactttggaattgcccacaagattgaagctggaaatgagttcaagaacatcttcggcaccccagagtttgtggcccctgagatcgtgaactatgagcccctgggcctggaggccgacatgtggagcattggagtcatcacctacatcctgctgagcggggccagccccttcctgggggagaccaagcaggagaccctgaccaacatctctgctgtgaactatgactttgatgaggagtacttcagcaacaccagcgagctggccaaggacttcatccggcggctgctggtgaaggaccccaagaggaggatgaccatcgcccagagcctggagcacagctggatcaaggccatcagaagaagaaatgtgagaggagaagattctggcaggaagccagagcggcggcggctgaagaccacccggctgaaggagtacaccatcaagagccacagcagcgccagccccatcgtggcccctgtggatgcctag

SEQ ID NO: 21406 - DNA, 615 bp, synthetic construct
  source 1..615: mol_type = other DNA; note = Synthetic coding sequence
atgggagacaagaagagccccacccggcccaagaggcagcccaagcccagcagtgatgagggctactgggactgcagcgtgtgcaccttcagaaattctgctgaggccttcaagtgcatgatgtgtgatgtgaggaagggcaccagcaccaggagcaccctgtttgaagtcatcgtgtctgccagcaggaccaaggagcccctgaagttccccatcagcggcaggaagcccaggcctgtgtcccagctggtggcccagcaggtgacccagcagtttgtgccccccacccagagcaagaaggagaagaaggacaaggtggagaaggagaagtctgagaaggagaccaccagcaagaagaacagccacaagaagacccggccccggctgaagaatgtggacaggagcagcgcccagcacctggaggtgacagtgggggacctgaccgtcatcatcacagacttcaaggagaagaccaagagccccccagccagcagcgctgccagcgctgaccagcacagccagagcggcagcagcagtgacaacacagagcggggcatgagccgcagcagcagccccagaggagaggccagcagcctgaatggagagagccactag

SEQ ID NO: 21407 - DNA, 1350 bp, synthetic construct; identical to SEQ ID NO: 19455
  source 1..1350: mol_type = other DNA; note = Synthetic coding sequence

SEQ ID NO: 21408 - DNA, 153 bp, synthetic construct
  source 1..153: mol_type = other DNA; note = Synthetic coding sequence
aagacaggcctgaccggcagccccagcagcctgtgggacctgctgcgggagatgtttgtggtgtgcagcaaggagcagctgcagagcggcggcaagtacagccaccaggtgtgggcccccttcagccccctggccagcggggccgccttctag

SEQ ID NO: 21409 - DNA, 4386 bp, synthetic construct
  source 1..4386: mol_type = other DNA; note = Synthetic coding sequence
atgcagcgggagctggtgtatgcccggggagatggccctggggccccccggcccggcagcacagcccaccccccccacgccatccccaacagcccccccagcacccctgtgccccacagcatgccacccagccccagccgcatcccctacggcggcaccaggtccatggtggtgcctggaaatgccaccatcccccgggaccgcatcagcagcctgcctgtgtcccggcccatcagccccagccccagcgccatcctggagaggagagatgtgaagccagatgaggacatgtctgggaagaacatcgccatgtacagaaatgaaggcttctacgccgacccctacctgtaccacgagggccgcatgagcatcgccagcagccacggcggccaccccctggatgtgcctgaccacatcatcgcctaccacaggacagccatccgcagcgccagcgcctactgcaaccccagcatgcaggccgagatgcacatggagcagagcctgtaccggcagaagagcaggaagtacccagacagccacctgcccaccctgggcagcaagaccccaccagccagcccccaccgggtgtctgacctgaggatgattgacatgcacgcccactacaatgcccacggccccccccacaccatgcagcctgaccgggccagccccagccggcaggccttcaagaaggagcccggcaccctggtgtacatcgagaagcccaggtctgctgctggcctgagcagcctggtggacctgggcccccccctgatggagaagcaggtgtttgcctacagcacagccaccatccccaaggaccgggagaccagcgagaagatgatgaagaccacagccaacagaaaccacacagattctgctggcaccccccacgtgtctgggggcaagatgctgagcgccctggagagcacagtgccccccagccagcccccacctgtgggcaccagcgccatccacatgagcctgctggagatgagaagatctgtggccgagctgcggctgcagctgcagcagatgaggcagctgcagctgcagaaccaggagctgctgcgggccatgatgaagaaggccgagctggagatcagcggcaaggtgatggagaccatgaagaggctggaggaccctgtgcagaggcagagggtgctggtggagcaggagcggcagaagtacctgcacgaggaggagaagatcgtgaagaagctgtgtgagctggaggactttgtggaggacctgaagaaggacagcacagctgccagccggctggtgaccctgaaggatgtggaggatggagccttcctgctgcggcaggtgggggaggccgtggccaccctgaagggggagttccccaccctgcagaacaagatgagggccatcctgcgcatcgaggtggaggccgtgcgcttcctgaaggaggagccccacaagctggacagcctgctgaagagggtgcgctccatgacagatgtgctgaccatgctgcggagacatgtgacagatggcctgctgaagggcacagatgctgcccaggccgcccagtacatggccatggagaaggccacagctgctgaggtgctgaagagccaggaggaggccgcccacaccagcggccagcccttccacagcactggagcccctggagatgccaagtctgaggtggtgcccctgagcggcatgatggtgagacatgcccagagcagccctgtggtgatccagcccagccagcacagcgtggccctgctgaacccagcccagaacctgccccacgtggccagcagccctgctgtgccccaggaggccaccagcaccctgcagatgagccaggccccccagagcccccagatccccatgaatggcagcgccatgcagagcctcttcatcgaggagatccacagcgtgtctgccaagaacagagctgtgtccattgagaaggccgagaagaagtgggaggagaagaggcagaacctggaccactacaacgggaaggagtttgagaagctgctggaggaggcccaggccaacatcatgaagagcatccccaacctggagatgcccccagccaccggccccctgcccagaggagatgcccctgtggacaaggtggagctgtctgaggacagccccaacagcgagcaggacctggagaagctgggcggcaagagccccccacctcctcctcctccaccccggcgcagctacctgcccggcagcggcctgaccaccaccaggtctggagatgtggtgtacacaggcaggaaggagaacatcacagccaaggccagcagtgaagatgctggccccagcccccagacccgggccaccaagtacccagctgaggagcccgccagcgcctggacccccagccccccacctgtgaccaccagcagcagcaaggatgaggaggaggaggaggaggagggggacaagatcatggccgagctgcaggccttccagaagtgcagcttcatggatgtgaacagcaacagccatgctgagcccagcagagctgacagccacgtgaaggacaccaggtctggggccaccgtgccccccaaggagaagaagaacctggagttcttccatgaagatgtgaggaagagtgatgtggagtatgaaaatggcccccagatggagttccagaaggtgaccaccggggctgtgcggcccagcgacccccccaagtgggagcggggcatggagaacagcatcagtgatgccagcaggaccagcgagtacaagacagagatcatcatgaaggagaacagcatcagcaacatgagcctgctgcgggacagcaggaactacagccaggagaccgtgcccaaggccagctttggcttcagcggcatcagccccctggaggatgagatcaacaagggcagcaagatcagcggcctgcagtacagcatcccagacacagagaaccagaccctgaactacggcaagaccaaggagatggagaagcagaacacagacaagtgccacgtgagcagccacacccggctgacagagagctctgtgcatgacttcaagacagaggaccaggaggtgatcaccacagactttggccaggtggtgctgcggcccaaggaggcccggcatgccaacgtgaaccccaatgaagatggagagagcagcagcagcagccccacagaagaaaatgctgccacagacaacatcgccttcatgatcacagagaccaccgtgcaggtgctgagcagcggggaggtgcatgacatcgtgtcccagaagggggaggacatccagacagtgaacattgatgccaggaaggagatgaccccccggcaggagggcacagacaatgaagatcctgtggtgtgcctggacaagaagcctgtgatcatcatctttgatgagcccatggacatccgcagcgcctacaagaggctgagcaccatctttgaagaatgtgatgaggagctggagaggatgatgatggaggagaagattgaggaggaggaggaggaggagaatggagacagcgtggtgcagaacaacaacaccagccagatgagccacaagaaggtggcccctggcaacctgaggacaggccagcaggtggagaccaagagccagccccacagcctggccacagagaccaggaaccctgggggccaggagatgaacagaacagagctgaacaagttcagccacgtggacagccccaacagcgagtgcaagggggaggatgccacagatgaccagtttgagagccccaagaagaagttcaagttcaagttccccaagaagcagctggccgccctgacccaggccatcagaacaggcaccaagacaggcaagaagaccctgcaggtggtggtgtatgaggaggaggaggaggatggcaccctgaagcagcacaaggaggccaagagatttgagatcgcccggagccagcctgaggacaccccagagaacacagtgcggcggcaggagcagcccagcattgagagcaccagccccatcagcaggacagatgagatcaggaagaacacctaccgcaccctggacagcctggagcagaccatcaagcagctggagaacaccatcagcgagatgagccccaaggccctggtggacaccagctgcagcagcaacagagacagcgtggccagcagcagccacatcgcccaggaggccagcccccggcccctgctggtgcctgatgagggccccacagccctggagccccccaccagcatccccagcgccagcaggaagggcagcagcggggccccccagaccagcaggatgcctgtgcccatgtctgccaagaacagacctggcaccctggacaagccaggcaagcagagcaagctgcaggacccccggcagtaccggcagtag

SEQ ID NO: 21410 - DNA, 2118 bp, synthetic construct
  source 1..2118: mol_type = other DNA; note = Synthetic coding sequence
atgctgaccctgctggctgaagatagagctgtgcccagcgcccccaccggccctggccccctgctggagtttgccctgcacgaggacctgctgaccagggtgctgacctggcagctgcagtgggatgagctgggagatggagtggaggagaggagagctgagcagctgaagctgtttgagatgctggtgtctgaggcccggcagcccctgctgcggcacggccctgtgcgggaggccctgctgaccctgctggatgcctgtggccggcctgtgcccagcagccctgccctggatgagggcctggtgctgctgctgagccagctgtgtgtgtgtgtggcccaggagcccagcctgctggagttcttcctgcagcccccacctgagcctggagctgccccccggctgctgctcttcagccggctggtgccctttgtgcaccgggagggcaccctgggccagcaggccagagatgccctgctgctgctgatggccctgtctgctggcagccccaccgtgggccgctacatcgctgaccacagctacttctgccctgtgctggccaccggcctgagcgccctgtacagcagcctgcccaggaagattgaggtgcctggagatgactggcactgcctgcggcgggaggactggctgggcgtgcctgccctggccctcttcatgagcagcctggagttctgcaatgctgtgatccaggtggcccaccccctggtgcagaagcagctggtggactacatccacaacggcttcctggtgcctgtgatgggccctgccctgcacaagacctctgtggaggagatgattgccagcacagcctacctggagctgttcctgcggagcatcagcgagcccgccctgctgcggaccttcctgcgcttcctgctgctgcacagacatgacacccacaccatcctggacaccctggtggccagaattggcagcaacagccggctgtgcatggtgtccctgagcctcttccgcaccctgctgaacctgagctgtgaagatgtgctgctgcagctggtgctgcgctacctggtgccctgcaaccacgtgatgctgagccagaagccagctgtgagagatgtggacctgtatggccgggctgctgacaagttcctgagcctcatcccccgctgctgccgccaccacgcccccagcccccccaggcctgagcacgcctcctgggcccggggccctggcagccccagcgtggacagcagctctgtgaccaccgtgccccggcccagcacccccagccggctggccctcttcctgcggcagcagagcctgggcggcagcgagagccctggccctgccccctgcagccctggcctgagcgccagccctgccagcagccctggaagaagacccaccccagctgaggagcctggagagctggaggacaactacctggagtacctgcgggaggcccggcggggcgtggacagatgtgtgcgggcctgcaggacctggagcgccccctatgatggagagcggcccagccctgagcccagccccttcggcagcaggaccaagaagaggagcctgctgcctgaggaggacaggaacaacgtgggggagggggaggaggaggagctgggcagaagaggccgggccggcggggccggggagggccctggccacctgcccccaccccagctgaatggagtgcccggctcctggccagagggcgccaagaaggtgcggctggtgcccaaggagggcgctggggagctgctggagggcatcagcgagggcatggccggcctggagggcttcggccaggagctgcgggagctggaggtggccctgagcaatggaggcactggaagtgagagccccctggagccccccctgcccctggaggaggaggaggcctatgagagcttcacctgccccccagagcccccaggccccttcctgagcagccccctgcggaccctgaaccagctgcccagccagcccttcaccggccccttcatggctgtgctgtttgccaagctggagaacatgctgcagaacagcgccctgagctgcagcacccccacctggagcagcagccctgtgagcagcccctgctgccgctgctgggccctgtag

SEQ ID NO: 21411 - DNA, 804 bp, synthetic construct
  source 1..804: mol_type = other DNA; note = Synthetic coding sequence
atgatgaggggctacatcaagaaggtgctgaagaacaccagctaccacgtgaaccagtacctgttcatccagcacggctggagcggcagcggggaccagagcgtgctgtacagctgcaacctgatgaggatggtgaccaggaccaagaagatctttgtgggcggcctgagcgccaacacagtggtggaggatgtgaagcagtactttgagcagtttgggaaggtggaggatgccatgctgatgtttgacaagaccaccaacagacaccggggcttcggctttgtgacctttgaaaatgaagatgtggtggagaaggtgtgtgagatccacttccacgagatcaacaacaagatggtggagtgcaagaaggcccagcccaaggaggtgatgttccccccaggcacccggggccgggcccggggcctgccctacaccatggatgccttcatgctgggcatgggcatgctgggctaccccaactttgtggccacctacggccggggctacccaggctttgcccccagctatggctaccagtttcctggcttccctgctgctgcctacggccctgtggccgctgctgctgtggccgccgcccggggcagcggcagcaacccagcccggcctgggggcttccctggggccaacagccctggccctgtggccgacctgtatggccctgccagccaggacagcggcgtgggcaactacatctctgctgccagcccccagcccggcagcggctttggacatggaattgctggccccctcatcgccacagccttcaccaacggctaccactag

SEQ ID NO: 21412 - DNA, 483 bp, synthetic construct
  source 1..483: mol_type = other DNA; note = Synthetic coding sequence
atgagcagccccctggccagcctgagcaagaccaggaaggtgcccctgcccagcgagcccatgaaccctggaagaagaggcatccgcatctatggagatgtgcctgccagccatgacagcgagctgatggccttcatgaccaggaagctgtgggacctggagcagcaggtgaaggcccagacagatgagatcctgagcaaggaccagaagattgctgccctggaggacctggtgcagaccctgcggccccaccctgctgaggccaccctgcagaggcaggaggagctggagaccatgtgtgtgcagctgcagaggcaggtgcgggagatggagcgcttcctgagtgactatggcctgcagtgggtgggggagcccatggaccaggaggacagcgagagcaagacagtgtctgaacatggagagcgggactggatgacagccaagaagttctggaagccaggcggcctgattggagccccctag

SEQ ID NO: 21413 - DNA, 462 bp, synthetic construct
  source 1..462: mol_type = other DNA; note = Synthetic coding sequence
tgaagcgtgcagagccctgcccagcagcaggtgcctgcccggcctggggcccccagcgtgcaggtgcccagccccttcctgctgcagaaccagtatgagcctgtgcagccccactggttctactgcaaggaggtggagtacaagcagctgtggatgcccttctctgtgtttgacagcctgaacctggaggagatctacaacagcgtgcagcctgaccctgagagcgtggtgctgggcacagatggcggccgctatgatgtgtacctgtatgaccgcatcaggaaggccgcctactgggaggaggagcctgctgaggtgcggcgctgcacctggttctacaagggggacacagacagccgcttcatcccctacacagaggagttcagcgagaagctggaggtgcgggtgctgtacttcttcatgtccttcttcaagaagtgccgcagctacatccactggtag

SEQ ID NO: 21414 - DNA, 1062 bp, synthetic construct
  source 1..1062: mol_type = other DNA; note = Synthetic coding sequence
atggagcaggagctggagcagctggcccagctgcccagcagcaagaacagcctgctgaaggatgccatggcccctggcacccccaagagcctgctgctgagcgccagcatcaagcgggagggggagagccccacagccagcccccacagcagcgccacagatgacctgcaccacagcgaccgctaccagaccttcctgcgggtgcgggccaaccggcagacccggctgaatgcccgcatcggcaagatgaagaggaggaagcaggatgagggccaggtgtgccccctgtgcaaccggcccctggccggcagcgagcaggagatgagcagacatgtggagcactgcctgagcaagcgggagggcagctgcatggccgaggatgatgctgtggacatcgagcacgagaacaacaacagatttgaggagtatgagtggtgtggccagaagaggatccgggccaccaccctgctggagggcggcttccggggcagcggcttcatcatgtgcagcggcaaggaaaatccagacagtgatgctgacctggatgtggatggagatgacaccctggagtatggcaagccccagtacacagaagcagatgtgatcccctgcacaggagaggagcctggagaggccaaggagcgggaggccctgcggggagctgtgctgaatggaggcccccccagcacccgcatcaccccagagttcagcaagtgggccagtgatgagatgcccagcaccagcaatggagagagcagcaagcaggaggccatgcagaagacctgcaagaacagcgacatcgagaagatcacagaggacagcgctgtgaccacctttgaggccctgaaggcccgggtgcgggagctggagcggcagctgagcagaggagaccgctacaagtgcctgatctgcatggacagctacagcatgcccctgaccagcatccagtgctggcacgtgcactgtgaggagtgctggctgcggaccctgggcgccaagaagctgtgcccccagtgcaacaccatcacagcccctggggacctgcggcgcatctacctgtag

SEQ ID NO: 21415 - DNA, 1782 bp, synthetic construct; identical to SEQ ID NO: 19420
  source 1..1782: mol_type = other DNA; note = Synthetic coding sequence

SEQ ID NO: 21416 - DNA, 363 bp, synthetic construct
  source 1..363: mol_type = other DNA; note = Synthetic coding sequence
ctggccctgcagatcagtgaaaatctcttcagcaacaaggtgctgaatgccctgaagccagagaaggatgtggatggagtgacagacatcaacctgggcaagctggtgagaggagatgcccacgagtgctttgtgtcccctgtggccaaggctgtgattgagctgctggagaagtctggagtgaacctggatggcaagaagatcctggtggtgggcgcccacggcagcctggaggccgccctgcagtgcctcttccagaggaagggctccatgaccatgagcatccagtggaagacccggcagctgcagagcaagacagagagccgctctgtgacccggctggagtgcagaagagtcatctag

SEQ ID NO: 21417 - DNA, 1167 bp, synthetic construct
  source 1..1167: mol_type = other DNA; note = Synthetic coding sequence
atgagcggcaccttcctgatcaggaagccccagctgctgcagggcgtgtatgccatgggcttcaaccggcccagcaagatccaggagaatgccctgcccatgatgctggccgagcccccccagaacctgattgcccagagccagagcggcaccgggaagacagctgcctttgtgctggccatgctgagccgggtggagcccagcgaccgctacccccagtgcctgtgcctgagccccacctatgagctggccctgcagacaggcaaggtgattgagcagatgggcaagttctacccagagctgaagctggcctatgctgtgcggggcaacaagctggagcggggccagaagatcagcgagcagatcgtcatcggcaccccaggcaccgtgctggactggtgcagcaagctgaagttcatcgaccccaagaagatcaaggtgtttgtgctggatgaagcagatgtgatgattgccacccagggccaccaggaccagagcatccgcatccagaggatgctgcccaggaactgccagatgctgctcttcagcgccacctttgaagattctgtgtggaagtttgcccagaaggtggtgcctgaccccaacgtcatcaagctgaagcgggaggaggagaccctggacaccatcaagcagtactacgtgctgtgcagcagcagagatgagaagttccaggccctgtgcaacctgtatggagccatcaccatcgcccaggccatgatcttctgccacaccaggaagacagcctcctggctggccgctgagctgagcaaggagggccaccaggtggccctgctgtctggagagatgatggtggagcagagagctgctgtgattgagcgcttccgggagggcaaggagaaggtgctggtgaccaccaacgtgtgtgcccggggcattgatgtggagcaggtgtctgtggtgatcaactttgacctgcctgtggacaaggatggcaacccagacaatgagacctacctgcaccgcatcggccgcacaggccgctttgggaagaggggcctggccgtgaacatggtggacagcaagcacagcatgaacatcctgaaccgcatccaggagcacttcaacaagaagattgaaaggctggacacagatgacctggatgaaattgagaagatcgccaactag

SEQ ID NO: 21418 - DNA, 1821 bp, synthetic construct
  source 1..1821: mol_type = other DNA; note = Synthetic coding sequence
ctgcggcagtgctacaactacaactgccccagcttcctggccgccgccctggcccgggccaccagtgatgaggtgctgcagagcgacctgagcgcccactacatccccaaggagacagatggaacagagggcaccgtggagattgagaccgtgaagctggcccggagcgtcttcagcaagctgcacgagatctgctgctcctgggtgaaggacttccccctgcggcggcggccccagctgtactatgagaccagcatccacgccatcaagaacatgaggaagctgttctacaagcacatcagcaagaagaagaagaagaggaagaagagggactgggaccaggaggagcaggcctactttgctgtgtttgatggccacggcggcgtggatgctgccatctatgccagcatccacctgcacgtgaacctggtgcggcaggagatgttcccccatgaccctgctgaggccctgtgccgggccttccgggtgacagatgaaagatttgtgcagaaggccgcccgggagagcctgcgctgtggcaccaccggggtggtgaccttcatccggggcaacatgctgcacgtggcctgggtgggggacagccaggtgatgctggtgaggaagggccaggccgtggagctgatgaagccccacaagccagacagagaagatgagaagcagagaattgaggccctgggcggctgtgtggtgtggtttggagcctggagggtgaatggcagcctgtctgtgtcccgggccatcggagatgctgagcacaagccctacatctgtggagatgctgacagcgccagcacagtgctggatggaacagaggactacctgatcctggcctgtgatggcttctatgacacagtgaacccagatgaagctgtgaaggtggtgtctgaccacctgaaggaaaataatggagacagctccatggtggcccacaagctggtggccagcgccagagatgctggcagcagtgacaacatcaccgtgattgtggtgttcctgcgggacatgaacaaggctgtgaatgtgtctgaggagagtgactggacagagaacagcttccagggcggccaggaggatggaggagatgacaaggaaaatcatggagagtgcaagaggccctggccccagcaccagtgcagcgccccagctgacctgggctatgatggccgggtggacagcttcacagacaggaccagcctgagccctggcagccagatcaacgtgctggaggaccccggctacctggacctgacccagatcgaggccagcaagccccacagcgcccagttcctgctgcctgtggagatgtttggacctggggcccccaagaaggccaacctgatcaatgagctgatgatggagaagaagtctgtgcagagcagcctgcctgagtggagcggggccggggagttccccacagccttcaacctgggcagcactggagagcagatctacaggatgcagagcctgagccctgtgtgcagcggcctggagaatgagcagttcaagagccctggcaacagagtgtcccggctgagccacctgcggcaccactacagcaagaagtggcaccgcttccgcttcaaccccaagttctacagcttcctgagcgcccaggagcccagccacaagattggcaccagcctgagcagcctgactggaagtggcaagaggaaccgcatccgcagcagcctgccctggaggcagaacagctggaagggctacagcgagaacatgaggaagctgaggaagacccatgacatcccctgcccagacctgccctggagctacaagattgaatag

SEQ ID NO: 21419 - DNA, 678 bp, synthetic construct
  source 1..678: mol_type = other DNA; note = Synthetic coding sequence
atggagaacctgctgcaggccaccaagagccacgtggacaaggtgatcatgaagctgggcaagaccaatgccaaggctgtgtctgagatgaggcagaagatctggaacaacatgcccaaggaccacccagaccacgagctgattgaccccttccctgtgcccctggtgatcatcggcagcaaatatgatgtgttccaggactttgagagcgagaagaggaaggtgatctgcaagaccctgcgctttgtggcccactactatggagccagcctgatgttcaccagcaagtctgaggccctgctgctgaagatccggggcgtcatcaaccagctggcctttggaattgacaagagcaagagcatctgtgtggaccagaacaagcccctcttcatcacagctggcctggacagctttggccagatcggcagcccccctgtgcctgaaaatgacatcggcaagctgcacgcccacagccccatggagctgtggaagaaggtgtatgagaagctgttcccccccaagagcatcaacaccctgaaggacatcaaggaccctgcccgggacccccagtatgcagaaaatgaggtggatgagatgaggatccagaaggacctggagctggagcagtacaagaggagcagcagcaagtcctggaagcagatcgagctggacagctag

SEQ ID NO: 21420 - DNA, 621 bp, synthetic construct
  source 1..621: mol_type = other DNA; note = Synthetic coding sequence
atgggcttcagcaacatggaggatgatggccctgaggaggaggagcgggtggccgagccccaggccaacttcaacaccccccaggccctgcgctttgaggagctgctggccaacctgctgaatgagcagcaccagatcgccaaggagctgtttgagcagctgaagatgaagaagcccagcgccaagcagcagaaggaggtggagaaggtgaagccccagtgcaaggaggtgcaccagaccctcatcctggaccctgcccagaggaagaggctgcagcagcagatgcagcagcacgtgcagctgctgacccagatccacctgctggccacctgcaaccccaacctgaaccctgaggccagcagcacccgcatctgcctgaaggagctgggcacctttgcccagagcagcatcgccctgcaccaccagtacaaccccaagttccagaccctcttccagccctgcaacctgatgggcgccatgcagctgattgaggacttcagcacccacgtgtccattgactgcagcccccacaagacagtgaagaagacagccaatgagttcccctgcctgcccaagcaggtggcctggatcctggccaccagcaaggtgttcatgtactag

SEQ ID NO: 21421 - DNA, 468 bp, synthetic construct
  source 1..468: mol_type = other DNA; note = Synthetic coding sequence
atgggcaaggactactacaagatcctgggcatccccagcggggccaatgaagatgagatcaagaaggcctacaggaagatggccctgaagtaccacccagacaagaacaaggagcccaatgctgaggagaagttcaaggagattgctgaggcctatgatgtgctgagtgaccccaagaagaggggcctgtatgaccagtatggagaggagggcctgaagacaggaggcggcaccagcggcggcagcagcggcagcttccactacaccttccatggagacccccacgccacctttgccagcttcttcggcggcagcaacccctttgacatcttctttgccagcagccgcagcacccggcccttcagcggctttgatcctgatgacatggatgtggatgaagatgaggacccctttggagccttcggccgcttcggcttcaacggcctgagccggggccccaggaggtag

SEQ ID NO: 21422 - DNA, 246 bp, synthetic construct
  source 1..246: mol_type = other DNA; note = Synthetic coding sequence
atgagcatcagcagtgatgaggtgaacttcctggtgtaccgctacctgcaggagagcggcttcagccacagcgccttcaccttcggcatcgagagccacatcagccagagcaacatcaacggggccctggtgcccccagctgccctgatcagcatcatccagaagggcctgcagtatgtggaggccgaggtgtccatcaatgaagatggcaccctgtttgatggccggcccatcgagagcctgtag

SEQ ID NO: 21423 - DNA, 1248 bp, synthetic construct
  source 1..1248: mol_type = other DNA; note = Synthetic coding sequence
atggcccctgtgggcgtggagaagaagctgctgctgggccccaatggacctgctgtggccgccgccggggacctgaccagcgaggaggaggagggccagagcctgtggagcagcatcctgtctgaggtgtccacccgggcccggagcaagctgcccagcggcaagaacatcctggtgtttggagaagatggcagcggcaagaccaccctgatgaccaagctgcagggcgctgagcacggcaagaagggccggggcctggagtacctgtacctgtctgtgcatgatgaggacagagatgtggtgaaggacttccaggactacatggagcctgaggagggctgccagggcagcccccagaggcggggccccctgaccagcggcagtgatgaagaaaatgtggccctgcccctgggggacaacgtgctgacccacaacctgggcatccctgtgctggtggtgtgcaccaagtgtgatgctgtgtctgtgctggagaaggagcatgactacagagatgagcacctggacttcatccagagccacctgcggcgcttctgcctgcagtacggggccgccctgatctacacctctgtgaaggaggagaagaacctggacctgctgtacaagtacatcgtgcacaagacctacggcttccacttcaccaccccagccctggtggtggagaaggatgctgtgttcatcccagctggctgggacaatgagaagaagatcgccatcctgcacgagaacttcaccaccgtgaagccagaagatgcctatgaggacttcatcgtgaagccccctgtgaggaagctggtgcatgacaaggagctggccgcagaagatgagcaggtgttcctgatgaagcagcagagcctgctggccaagcagcctgccacccccacccgggccagcgagagccctgcccggggccccagcggcagccccaggacccagggccggggcggccctgcctctgtgcccagcagcagccctggcacctctgtgaagaagccagaccccaacatcaagaacaatgctgccagcgagggcgtgctggccagcttcttcaacagcctgctgagcaagaagacaggcagccctggcagccctggggccggcggcgtgcagagcacagccaagaagagcggccagaagacagtgctgagcaatgtgcaggaggagctggacaggatgaccaggaagccagacagcatggtgaccaacagcagcacagaaaatgaggcctag

SEQ ID NO: 21424 - DNA, 1929 bp, synthetic construct
  source 1..1929: mol_type = other DNA; note = Synthetic coding sequence
atgaggagcatcacccagggcgcctgccgcttcatctgggaggacaagggctacatcagcggggaccacatcaacctggtgagcagcagcctgagcagcttccccatcctgcagaggagcagcgaggagaagatcctgtacagcgaccggctgagcctggagcggcagaagctgactgtgtgccccatcatcaatggagaggaccacctgcggctgctgaacttccagcacaacttcatcacccgcatccagaacatcagcaacctgcagaagctgatcagcctggacctgtatgacaaccagatcgaggagatcagcggcctgagcaccctgcgctgcctgcgggtgctgctgctgggcaagaaccgcatcaagaagatcagcaacctggagaacctgaagagcctggatgtgctggacctgcacggcaaccagatcaccaagattgagaacatcaaccacctgtgtgagctgcgggtgctgaacctggccaggaacttcctgagccacgtggacaacctgaatggcctggacagcctgacagagctgaacctgcggcacaaccagatcacctttgtgagagatgtggacaacctgccctgcctgcagcacctgttcctgtccttcaacaacatcagcagctttgattctgtgtcctgcctggccgacagcagcagcctgagtgacatcacctttgatggcaaccccatcgcccaggagagctggtacaagcacacagtgctgcagaacatgatgcagctgcggcagctggacatgaagaggatcacagaggaggagaggaggatggcctctgtgctggccaagaaggaggaggagaagaagcgggagagccacaagcagagcctgctgaaggagaagaagaggctgaccatcaacaacgtggcccggcagtgggacctgcagcagcagagggtggccaacatcgccaccaatgaagacaggaaggacagcgacagcccccaggacccctgccagattgatggcagcaccctgagcgccttccctgaggagaccggccccctggacagcggcctgaacaatgccctgcagggcctgagcgtcatcgacacctacctggtggaggtggatggagacaccctgagcctgtatggcagcggggccctggagagcctggacaggaactggagcgtgcagacagctggcatgatcaccaccgtgtccttcaccttcattgaatttgatgagatcgtgcaggtgctgcccaagctgaagatcaagttccccaacagcctgcacctgaagttcaaggagaccaacctggtgatgctgcagcagttcaatgccctggcccagctgcggagaattgaccagctgaccatcgacccccagggcaaccctgtggtgaacttcaccctgtggaagtactacgtgctcttccggctgagccacttctccatgcagaagatcaatggaacagaggtgacccagaatgacatgatcatggccgagcggctgtttggcatcctggcccacgtggccagcagcgagctgccccagtaccgcctcatcagcatcctgggagatgccaggaagaagcagttccgctacctgctggagagcaagggcaagaagccaggcatcatcaatgaagaaaataatgacagcaagaggctggtgggggagaacaccaacagagccaccctgaactacaccacccgggacttctacaatgagaagctggaggagatcaaggagaagaagaagttctgcaagacctacatcgaggacctggtgaaggaggccacagagatcaacatgaagaatgaggccctgcagaagctgtggccccagatgttcatcgagctggtgagagatgctgtgattgagatccggaacaagaacagctacatgaagctgtgcctgcagcagatcacagaccagaagtag

SEQ ID NO: 21425 - DNA, 432 bp, synthetic construct
  source 1..432: mol_type = other DNA; note = Synthetic coding sequence
cggctgggccgctatgaggtggagaagagatgtgctgtggagaaggaggactatgacctggccaaggagaagaagcagcagatggagcagtacagagctgaggtgtatgagcagctggagctgcacagcctgctggatgctgagctgcacagcgctgtggaccccctgctgcctgccacagacccccaccccaagatcaatgctgagagcctgccctatgatgagcggcccctgcctgccatcaggaagcactatggagaggccgtggtggagcctgagatgagcaatgctgacatcagtgatgccaggagaggaggcatgctgggggagcctgagcccctgacagagaaggccctgcgggaggccagcagcgccattgatgtgctgggggagaccctggtggccgaggcctactgcaagacctggagctag

SEQ ID NO: 21426 - DNA, 1842 bp, synthetic construct; identical to SEQ ID NO: 18580
  source 1..1842: mol_type = other DNA; note = Synthetic coding sequence

SEQ ID NO: 21427 - DNA, 552 bp, synthetic construct
  source 1..552: mol_type = other DNA; note = Synthetic coding sequence
atgggccccctgcccaggacagtggagctgttctatgatgtgctgagcccctacagctggctgggctttgagatcctgtgccgctaccagaacatctggaacatcaacctgcagctgcggcccagcctcatcaccggcatcatgaaggacagcggcagcctgagcgccatgaggttcctgacagctgtgaacctggagcaccctgagatgctggagaaggccagccgggagctgtggatgagggtgtggagcagaaatgaagacatcacagagccccagagcatcctggccgctgctgagaaggccggcatgtctgctgagcaggcccagggcctgctggagaagatcgccacccccaaggtgaagaaccagctgaaggagaccacagaagctgcctgccgctatggagccttcggcctgcccatcaccgtggcccacgtggatggccagacccacatgctgtttggaagtgacaggatggagctgctggcccacctgctgggggagaagtggatgggccccatccccccagctgtgaatgcccggctgtag

SEQ ID NO: 21428 - DNA, 306 bp, synthetic construct
  source 1..306: mol_type = other DNA; note = Synthetic coding sequence
gagggcaccagcggcaagacagccctgcacctggccgtggagacccaggagcggggcctggtgcagttcctgctgcaggccggggcccaggtggatgccaggatgctgaatggctgcacccccctgcacctggccgccggccggggcctgatgggcatcagcagcaccctgtgcaaggccggggctgacagcctgctgagaaatgtggaggatgagaccccccaggacctgacagaggagagcctggtgctgctgccctttgatgacctgaagatcagcggcaagctgctgctgtgcacagactag

SEQ ID NO: 21429 - DNA, 14586 bp, synthetic construct
  source 1..14586: mol_type = other DNA; note = Synthetic coding sequence
atggccaccatgatcccccctgtgaagctgaagtggctggagcacctgaacagctcctggatcacagaagattctgagagcatcgccacccgggagggcgtggccgtgctgtacagcaagctggtgagcaacaaggaggtggtgcccctgccccagcaggtgctgtgcctgaagggcccccagctgcctgactttgagcgggagagcctgagcagtgatgagcaggaccactacctggatgccctgctgagcagccagctggccctggccaagatggtgtgcagcgacagcccctttgctggggccctgaggaagaggctgctggtgctgcagagggtcttctacgccctgagcaacaagtaccatgacaagggcaaggtgaagcagcagcagcacagccctgagagcagcagcggcagcgcagatgtgcacagcgtgtctgagcggcccaggagcagcacagatgccctgattgagatgggcgtgaggacaggcctgagcctgctgtttgccctgctgcggcagagctggatgatgcctgtgtctggccctggcctgagcctgtgcaatgatgtgatccacacagccatcgaggtggtgagcagcctgccccccctgagcctggccaatgaaagcaagatcccccccatgggcctggactgcctgagccaggtgaccaccttcctgaagggcgtgaccatccccaacagcggggctgacaccctgggccggcggctggccagcgagctgctgctgggcctggccgcccagaggggcagcctgcgctacctgctggagtggattgagatggccctgggcgccagcgctgtggtgcacaccatggagaagggcaagctgctgagcagccaggagggcatgatcagctttgactgcttcatgaccatcctgatgcagatgagaagaagcctgggcagcagcgctgacaggagccagtggagggagcccaccaggaccagtgatggcctgtgcagcctgtatgaagctgccctgtgcctgtttgaggaggtgtgcaggatggccagtgactacagcaggacctgtgccagcccagacagcatccagacaggagatgcccccatcgtgtctgagacctgtgaggtgtatgtgtggggcagcaacagcagccaccagctggtggagggcacccaggagaagatcctgcagcccaagctggcccccagcttcagtgatgcccagaccatcgaggccggccagtactgcaccttcgtcatcagcacagatggctctgtgcgggcctgtgggaagggcagctatggccgcctgggcctgggggacagcaacaaccagagcaccctgaagaagctgacctttgagccccacaggagcatcaagaaggtgagcagcagcaagggcagtgatggccacaccctggccttcaccacagaaggagaggtgttctcctggggagatggagactatggcaagctgggccacggcaacagcagcacccagaagtaccccaagctgatccagggccccctgcagggcaaggtggtggtgtgtgtgtctgctggctaccgccacagcgctgctgtgacagaagatggagagctgtacacctggggcgagggggactttggccgcctgggccatggagacagcaacagcaggaacatccccaccctggtgaaggacatcagcaatgtgggggaggtgtcctgtggcagcagccacaccatcgccctgagcaaggatggccgcacagtgtggagctttggaggaggagacaatggcaagctgggccacggggacaccaacagagtgtacaagcccaaggtgattgaggccctgcagggcatgttcatcaggaaggtgtgtgccggcagccagagcagcctggccctgaccagcacaggccaggtgtatgcctggggctgtggggcctgcctgggctgcggcagcagcgaggccacagccctgcggcccaagctgattgaggagctggccgccaccagaattgtggatgtgtccatcggggacagccactgcctggccctgagccatgacaatgaggtgtatgcctggggcaacaacagcatgggccagtgtggccagggcaacagcacaggccccatcaccaagcccaagaaggtgtctggcctggatggcatcgccatccagcagatctctgctggcaccagccacagcctggcctggacagccctgccccgggaccggcaggtggtggcctggcaccggccctactgtgtggacctggaggagagcaccttcagccacctgcgctccttcctggagcgctactgtgacaagatcaacagcgagatcccccccctgcccttccccagcagccgggagcaccacagcttcctgaagctgtgcctgaagctgctgagcaaccacctggccctggccctggccggcggcgtggccaccagcatcctgggccggcaggccggccccctgaggaacctgctcttccggctgatggacagcacagtgcctgatgagatccaggaggtggtgattgagaccctgtctgtgggcgccaccatgctgctgccccccctgcgggagaggatggagctgctgcacagcctgctgccccagggccctgaccgctgggagagcctgagcaagggccagaggatgcagctggacatcatcctgaccagcctgcaggaccacacccacgtggccagcctgctgggctacagcagccccagtgatgctgctgacctgagctctgtgtgcaccggctacggcaacctgagtgaccagccctacggcacccagagctgccacccagacacccacctggccgagatcctgatgaagaccctgctgaggaacctgggcttctacacagaccaggccttcggggagctggagaagaacagcgacaagttcctgctgggcaccagcagcagcgagaacagccagcctgcccacctgcacgagctgctgtgcagcctgcagaagcagctgctggccttctgccacatcaacaacatcagcgagaacagcagctctgtggccctgctgcacaagcacctgcagctgctgctgccccacgccacagacatctacagccgcagcgccaacctgctgaaggagagcccctggaatggatctgtgggggagaagctgagagatgtgatctacgtgtctgctgctggctccatgctgtgccagatcgtgaacagcctgctgctgctgcctgtgtctgtggcccggcccctgctgagctacctgctggacctgctgccccccctggactgcctgaaccggctgctgcctgctgctgacctgctggaggaccaggagctgcagtggcccctgcatggaggccctgagctgattgatcctgctggcctgcccctgccccagcctgcccagagctgggtgtggctggtggacctggagaggaccatcgccctgctgattggccgctgcctgggcggcatgctgcagggcagccctgtgtccccagaggagcaggacacagcctactggatgaagacccccctcttcagtgatggagtggagatggacaccccccagctggacaagtgcatgagctgcctgctggaggtggccctgtctggaaatgaggagcagaagccctttgactacaagctgcggcctgagattgctgtgtatgtggacctggccctgggctgcagcaaggagcccgcccggagcctgtggatctccatgcaggactatgctgtgtccaaggactgggacagcgccaccctgagcaatgaaagcctgctggacacagtgtccagatttgtgctggccgccctgctgaagcacaccaacctgctgagccaggcctgtggggagagccgctaccagcccgggaagcacctgtctgaggtgtaccgctgtgtgtacaaggtgcgcagccggctgctggcctgcaagaacctggagctgatccagaccaggagcagcagccgggaccgctggatcagcgagaaccaggacagcgcagatgtggacccccaggagcacagcttcaccaggaccattgatgaggaggccgagatggaggagcaggccgagcgggaccgggaggagggccaccctgagccagaagatgaggaggaggagcgggagcacgaggtgatgacagctgggaagatcttccagtgcttcctgagcgcccgggaggtggcccggagccgggaccgggacaggatgaacagcggggccggcagcggggcccgggcagatgatcctccaccccagagccagcaggagaggagagtgtccacagacctgcctgagggccaggatgtgtacacagctgcctgcaacagcgtcatccaccgctgtgccctgctgatcctgggcgtgtcccctgtgattgatgagctgcagaagaggcgggaggagggccagctgcagcagcccagcaccagcgccagcgagggcggcggcctgatgaccaggtctgagagcctgacagctgagagccggctggtgcacaccagccccaactaccgcctcatcaagagccgctctgagagtgacctgagccagcctgagagtgatgaggagggctacgccctgtctggaagaagaaatgtggacctggacctggccgccagccacaggaagaggggccccatgcacagccagctggagagcctgagtgacagctgggcccggctgaagcacagccgggactggctgtgcaacagcagctacagctttgaaagtgactttgacctgaccaagagcctgggcgtgcacaccctgattgaaaatgtggtgtcctttgtgtctggagatgtgggcaatgcccctggcttcaaggagcctgaggagagcatgagcaccagcccccaggccagcatcatcgccatggagcagcagcagctgcgggcagagctgcggctggaggccctgcaccagatcctggtgctgctgagcggcatggaggagaagggcagcatcagcctggccggcagccggctgagcagcggcttccagagcagcaccctgctgacctctgtgcggctgcagttcctggccggctgcttcggcctgggcaccgtgggccacactggaggaaaaggagagagcggccgcctgcaccactaccaggacggcatccgggccgccaagaggaacatccagatcgagatccaggtggccgtgcacaagatctaccagcagctgagcgccaccctggagcgggccctgcaggccaacaagcaccacatcgaggcccagcagaggctgctgctggtgacagtgtttgccctgtctgtgcactaccagcctgtggatgtgtccctggccatcagcacaggcctgctgaatgtgctgagccagctgtgtggcacagacaccatgctgggccagcccctgcagctgctgcccaagacaggagtgtcccagctgagcacagccctgaaggtggccagcacccggctgctgcagatcctggccatcaccaccggcacctacgccgacaagctgagccccaaggtggtgcagagcctgctggacctgctgtgcagccagctgaagaacctgctgagccagacaggagtgctgcacatggccagctttggagagggggagcaggaggatggagaggaggaggagaagaaggtggacagcagcggggagacagagaagaaggacttccgggccgccctgaggaagcagcacgccgctgagctgcacctgggggacttcctggtgttcctgcggcgggtggtgagcagcaaggccatccagagcaagatggccagccccaagtggacagaggtgctgctgaacatcgccagccagaagtgcagcagcggcatccccctggtgggcaacctgcggacccggctgctggccctgcacgtgctggaggccgtgctgcctgcctgtgagagcggcgtggaggatgaccagatggcccagatcgtggagcggctcttcagcctgctgagtgactgcatgtgggagacccccatcgcccaggccaagcacgccatccagatcaaggagaaggagcaggagatcaagctgcagaagcagggcgagctggaggaggaggatgagaacctgcccatccaggaggtgtcctttgatcctgagaaggcccagtgctgcctggtggagaatggccagatcctgacccacggcagcggcggcaagggctacggcctggccagcactggagtgaccagcggctgctaccagtggaagttctacatcgtgaaggaaaatagaggaaatgaaggcacctgtgtgggcgtgagccgctggcctgtgcatgacttcaaccacaggaccaccagtgacatgtggctgtaccgggcctacagcggcaacctgtaccacaatggagagcagaccctgaccctgagcagcttcacccagggcgacttcatcacctgtgtgctggacatggaggcccggaccatcagctttgggaagaatggagaggagcccaagctggcctttgaagatgtggatgctgctgagctgtacccctgtgtgatgttctacagcagcaaccctggagagaaggtgaagatctgtgacatgcagatgaggggcaccccccgggacctgctgcccggggaccccatctgcagccctgtggccgctgtgctggccgaggccaccatccagctgatccgcatcctgcacaggacagaccgctggacctactgcatcaacaagaagatgatggagcggctgcacaagatcaagatctgcatcaaggagagcggccagaagctgaagaagagccgctctgtgcagagccgggaggagaatgagatgagggaggagaaggagagcaaggaggaggagaagggcaagcacaccaggcatggcctggccgacctgtctgagctgcagctgcggaccctgtgcatcgaggtgtggcctgtgctggccgtcatcggcggcgtggatgctggcctgcgggtgggcggccgctgtgtgcacaagcagacaggaagacatgccaccctgctgggcgtggtgaaggagggcagcaccagcgccaaggtgcagtgggatgaggccgagatcaccatctccttccccaccttctggagccccagcgacacccccctgtacaacctggagccctgtgagcccctgccctttgatgtggcccgcttccggggcctgacagcctctgtgctgctggacctgacctacctgactggagtgcatgaggacatgggcaagcagagcaccaagagacatgagaagaagcacagacatgagagcgaggagaagggagatgtggagcagaagccagagagcgagagcgccctggacatgaggacaggcctgaccagtgatgatgtgaagagccagagcaccaccagcagcaagtcagaaaatgaaattgccagcttcagcctggaccccaccctgcccagcgtggagagccagcaccagatcacagagggcaagaggaagaaccacgagcacatgagcaagaaccatgatgtggcccagagcgagatccgggctgtgcagctgagctacctgtacctgggcgccatgaagagcctgagcgccctgctgggctgcagcaaatatgcagagctgctgctgatccccaaggtgctggccgagaatggccacaacagcgactgtgccagcagccctgtggtgcatgaagatgtggagatgagagctgccctgcagttcctgatgaggcacatggtgaagagagctgtgatgaggagccccatcaagagggccctgggcctggccgacctggagcgggcccaggccatgatctacaagctggtggtgcacggcctgctggaggaccagtttggaggcaagatcaagcaggagattgaccagcaggccgaggagagtgaccctgcccagcaggcccagacccctgtgaccaccagccccagcgccagcagcaccaccagcttcatgagcagcagcctggaggacaccaccacagccaccacccctgtgacagacacagagaccgtgcctgccagcgagagccctggggtgatgcccctgagcctgctgcggcagatgttcagcagctaccccaccaccaccgtgctgcccacccggcgggcccagaccccacccatcagcagcctgcccaccagccccagtgatgaggtgggccggcggcagagcctgaccagcccagacagccagagcgcccggcctgccaacagaacagccctgagtgaccccagcagccggctgagcaccagccccccacctccagccatcgctgtgcccctgctggagatgggcttcagcctgcggcagatcgccaaggccatggaggccaccggggcccggggggaggctgatgcccagaacatcaccgtgctggccatgtggatgattgagcaccctggccatgaagatgaggaggagccccagagcggcagcacagctgacagcaggcctggagctgctgtgctgggcagcggcggcaagagcaatgacccctgctacctgcagagccctggggacatccccagcgcagatgctgctgagatggaggagggcttcagcgagagcccagacaacctggaccacacagaaaatgctgccagcggcagcggccccagcgcccggggccgctctgctgtgacccggcggcacaagtttgacctggccgcccggaccctgctggcccgggccgccggcctgtacagatctgtgcaggcccacaggaaccagagccggcgggagggcatcagcctgcagcaggaccccggggccctgtatgacttcaacctggatgaggagctggagattgacctggatgatgaggccatggaggccatgtttggccaggacctgaccagtgacaatgacatcctgggcatgtggatccctgaggtgctggactggcccacctggcacgtgtgtgagagtgaagatcgggaggaggtggtggtgtgtgagctgtgtgaatgttctgtggtgtccttcaaccagcacatgaagaggaaccaccctggctgcggccgcagcgccaaccggcagggctaccgcagcaatggcagctatgtggatggctggtttggaggagaatgtggcagcggcaacccctactacctgctgtgtggcacctgccgggagaagtacctggccatgaagaccaagagcaagagcaccagcagcgagcgctacaagggccaggccccagacctgattggcaagcaggacagcgtgtatgaggaggactgggacatgctggatgtggatgaagatgagaagctgactggagaggaggagtttgagctgctggccggccccctgggcctgaatgaccggcgcatcgtgcctgagcctgtgcagttcccagacagcgaccccctgggcgcctctgtggccatggtgacagccaccaacagcatggaggagaccctgatgcagatcggctgccacggctctgtggagaagagcagcagcggccgcatcaccctgggggagcaggccgccgccctggccaacccccatgacagagtggtggccctgcggcgggtgacagctgctgcccaggtgctgctggcccggaccatggtgatgagggccctgagcctgctgtctgtgtctggcagcagctgcagcctggccgccggcctggagagcctgggcctgacagacatccgcaccctggtgcggctgatgtgcctggccgccgccggccgggccggcctgagcaccagccccagcgccatggccagcaccagcgagaggagcagaggaggccacagcaaggccaacaagcccatcagctgcctggcctacctgagcacagctgtgggctgcctggccagcaatgcccccagcgctgccaagctgctggtgcagctgtgcacccagaacctgatctctgctgccactggagtgaacctgaccaccgtggatgacagcatccagaggaagttcctgcccagcttcctgcggggcattgctgaggagaacaagctggtgaccagccccaactttgtggtgacccaggccctggtggccctgctggccgacaagggggccaagctgcggcccaactatgacaagtctgaggtggagaagaagggccccctggagctggccaatgccctggccgcctgctgcctgagcagccggctgagcagccagcaccggcagtgggccgcccagcagctggtgaggaccctggccgcccatgaccgggacaaccagaccaccctgcagaccctggccgacatgggcggggacctgaggaagtgcagcttcatcaagctggaggcccaccagaacagagtgatgacctgtgtgtggtgcaacaagaagggcctgctggccaccagcggaaatgatggcaccatccgggtgtggaatgtgaccaagaagcagtacagcctgcagcagacctgtgtgttcaaccggctggagggagatgctgaggagagcctgggcagccccagcgaccccagcttcagccctgtgtcctggagcatcagcggcaagtacctggccggggccctggagaagatggtgaacatctggcaggtgaatggaggcaagggcctggtggacatccagccccactgggtgtctgccctggcctggccagaggagggccctgccacagcctggagcggggagagccctgagctgctgctggtgggccgcatggatggcagcctgggcctcatcgaggtggtggatgtgtccaccatgcaccggcgggagctggagcactgctacaggaaggatgtgtctgtgacctgcatcgcctggttctctgaagatcggccctttgctgtgggctactttgatggcaagctgctgctgggcaccaaggagcccctggagaagggcggcatcgtgctgattgatgcccacaaggacaccctcatctccatgaagtgggaccccaccggccacatcctgatgacctgtgccaaggaggacagcgtgaagctgtggggcagcatcagcggctgctggtgctgcctgcacagcctgtgccaccccagcatcgtgaatggaattgcctggtgccgcctgcccgggaagggcagcaagctgcagctgctgatggccaccggctgccagagcggcctggtgtgtgtgtggaggatcccccaggacaccacccagaccaacgtgaccagcgctgagggctggtgggagcaggagagcaactgccaggacggctacaggaagagcagcggggccaagtgtgtgtaccagctgcggggccacatcacccctgtgaggacagtggccttcagcagtgatggcctggccctggtgtctgggggcctgggcggcctgatgaacatctggagcctgagagatggctctgtgctgcagacagtggtgattggcagcggggccatccagaccaccgtgtggatccctgaggtgggcgtggccgcctgcagcaacagaagcaaggatgtgctggtggtgaactgcacagctgagtgggccgccgccaaccacgtgctggccacctgcaggacagccctgaagcagcagggcgtgctgggcctgaacatggccccctgcatgagggccttcctggagcggctgcccatgatgctgcaggagcagtatgcctatgagaagccccacgtggtgtgtggggaccagctggtgcacagcccctacatgcagtgcctggccagcctggccgtgggcctgcacctggaccagctgctgtgcaacccccctgtgcccccccaccaccagaactgcctgcctgaccctgcctcctggaaccccaatgagtgggcctggctggagtgcttcagcaccaccatcaaggctgctgaggccctgaccaacggggcccagtttcctgagagcttcaccgtgcctgacctggagcctgtgcctgaagatgagctggtgttcctgatggacaacagcaagtggatcaatggcatggatgagcagatcatgtcctgggccaccagcaggcctgaggactggcacctgggcggcaaatgtgatgtgtacctgtggggcgccggcagacatggccagctggccgaggccggcagaaatgtgatggtgcctgctgctgcccccagcttcagccaggcccagcaggtgatctgtggccagaactgcaccttcgtcatccaggccaatggaacagtgctggcctgtggggagggcagctatggccgcctgggccagggcaacagtgatgacctgcacgtgctgaccgtcatcagcgccctgcagggctttgtggtgacccagctggtgaccagctgtggcagtgatggccacagcatggccctgacagagagcggggaggtgttctcctggggagatggagactatggcaagctgggccacggcaacagcgaccggcagaggcggccccggcagatcgaggccctgcagggcgaggaggtggtgcagatgagctgtggcttcaagcacagcgctgtggtgaccagtgatggcaagctgttcacctttggaaatggagactatggccgcctgggcctgggcaacaccagcaacaagaagctgcctgagcgggtgacagccctggagggctaccagatcggccaggtggcctgtggcctgaaccacaccctggccgtgtctgcagatggctccatggtgtgggcctttggagatggagactatggcaagctgggcctgggcaacagcacagccaagagcagcccccagaagattgatgtgctgtgtggcatcggcatcaagaaggtggcctgtggcacccagttctctgtggccctgaccaaggatggccacgtgtacaccttcggccaggaccggctgattggcctgcctgagggccgggccaggaaccacaaccggccccagcagatccctgtgctggccggggtcatcattgaagatgtggccgtgggcgctgagcacaccctggccctggccagcaatggagatgtgtatgcctggggcagcaacagcgagggccagctgggcctgggccacaccaaccacgtgcgggagcccaccctggtgacaggcctgcagggcaagaatgtgcggcagatctctgctggccgctgccacagcgctgcctggacagcccctcctgtgcccccccgggcccctggggtgtctgtgcccctgcagctgggcctgcctgacacagtgcccccccagtacggggccctgcgggaggtgtccatccacacagtgcgggcccggctgcggctgctgtaccacttcagtgacctgatgtacagctcctggaggctgctgaacctgagccccaacaaccagaacagcaccagccactacaatgccggcacctggggcatcgtgcagggccagctgcggcccctgctggccccccgggtgtacaccctgcccatggtgcgcagcatcggcaagaccatggtgcagggcaagaactacggcccccagatcaccgtgaagaggatcagcacccggggcaggaagtgcaagcccatctttgtgcagatcgcccggcaggtggtgaagctgaatgccagtgacctgcggctgcccagccgggcctggaaggtgaagctggtgggggagggcgcagatgatgctgggggcgtgtttgatgacaccatcacagagatgtgccaggagctggagactggaattgtggacctgctgatccccagccccaatgccacagctgaggtgggctacaacagagaccgcttcctgttcaaccccagcgcctgcctggatgagcacctgatgcagttcaagttcctgggcatcctgatgggcgtggccatccgcaccaagaagcccctggacctgcacctggcccccctggtgtggaagcagctgtgctgcgtgcccctgaccctggaggacctggaggaggtggacctgctgtatgtgcagaccctgaacagcatcctgcacatcgaggacagcggcatcacagaggagagcttccacgagatgatccccctggacagctttgtgggccagagcgcagatggcaagatggtgcccatcatccctgggggcaacagcatccccctgaccttcagcaacaggaaggagtatgtggagcgggccatcgagtaccgcctgcacgagatggaccggcaggtggccgctgtgcgggagggcatgtcctggatcgtgcctgtgcccctgctgagcctgctgacagccaagcagctggagcagatggtgtgtggcatgcctgagatctctgtggaggtgctgaagaaggtggtgcgctaccgggaggtggatgagcagcaccagctggtgcagtggttctggcacaccctggaggagttcagcaatgaggagcgggtgctcttcatgagatttgtgtctggccgcagccggctgcctgccaacacagctgacatcagccagcgcttccagatcatgaaggtggaccggccctatgacagcctgcccaccagccagacctgcttcttccagctgcggctgcccccctacagcagccagctggtgatggccgagcggctgcgctatgccatcaacaactgccgcagcattgacatggacaactacatgctgagcagaaatgtggacaatgctgagggcagtgacacagactactag

SEQ ID NO: 21430 - DNA, 3633 bp, synthetic construct; identical to SEQ ID NO: 19771
  source 1..3633: mol_type = other DNA; note = Synthetic coding sequence

SEQ ID NO: 21431 - DNA, 579 bp, synthetic construct; identical to SEQ ID NO: 20257
  source 1..579: mol_type = other DNA; note = Synthetic coding sequence

SEQ ID NO: 21432 - DNA, 1803 bp, synthetic construct; identical to SEQ ID NO: 20162
  source 1..1803: mol_type = other DNA; note = Synthetic coding sequence

SEQ ID NO: 21433 - DNA, 1197 bp, synthetic construct
  source 1..1197: mol_type = other DNA; note = Synthetic coding sequence
atgctgcggaggaagcccagcaatgccagcgagaaggagttcaacctggatgacaacatcccagaagatgattctggagtgcccaccccagaagatgctgggaagagcggcaagaagctgggcaagaagtggagggctgtgatcagcaggaccatgaacaggaagatgggcaagatgatggtgaaggccctgtctgaggagatggctgacaccctggaggagggcagcgccagccccaccagcccagactacagcctggacagccctggccctgagaagatggccctggccttcagcgagcaggaggagcacgagctgcctgtgctgagccggcaggccagcactggaagtgagctgtgcagccccagccctggcagcggcagctttggagaggagcccccagccccccagtacacaggccccttctgtggccgggcccgggtgcacacagacttcacccccagcccctatgaccatgacagcctgaagctgcaggtgcgcagcgccagcggcctgctgtggagcctggccggctgtgcccagaagggctcctggacagagcccggctatgacagcgtgtctgggggccagggccccccctaccccctgagcctggcccccttcagcagccccctgccccagcagaagggagatgtgatccagatcatcgagaagccccctgtgggcacctggctgggcctgctgaatggcaaggtgggcagcttcaagttcatctacgtggatgtgctgcctgaggaggccgtgggccacgcccggcccagccggcggcagagcaagggcaagaggcccaagcccaagaccctgcacgagctgctggagcgcatcggcctggaggagcacaccagcaccctgctgctgaatggctaccagaccctggaggacttcaaggagctgcgggagacccacctgaatgagctgaacatcatggacccccagcaccgggccaagctgctgacagctgctgagctgctgctggactatgacaccggcagcgaggaggccgaggagggcgctgagagcagccaggagcctgtggcccacacagtgtctgagcccaaggtggacatcccccgggacagcggctgctttgagggcagcgagagcggcagagatgatgctgagctggccggcacagaggagcagctgcagggcctgagcctggccggggccccctag

SEQ ID NO: 21434 - DNA, 1002 bp, synthetic construct
  source 1..1002: mol_type = other DNA; note = Synthetic coding sequence
atgggcaccaggaagaaggtgcacgcctttgtgcgggtgaagcccacagatgactttgcccacgagatgatccgctatggagatgacaagaggagcattgacatccacctgaagaaggacatccggcggggcgtggtgaacaaccagcagacagactggagcttcaagctggatggagtgctgcatgatgccagccaggacctggtgtatgagaccgtggccaaggatgtggtgtcccaggccctggatggctacaacggcaccatcatgtgctacggccagacaggagctgggaagacctacaccatgatgggcgccacagagaactacaagcaccggggcatcctgccccgggccctgcagcaggtgttcaggatgattgaggagcggcccacccacgccatcaccgtgcgggtgtcctacctggagatctacaatgaaagcctgtttgacctgctgagcaccctgccctacgtgggccccagcgtgacccccatgaccatcgtggagaacccccagggcgtcttcatcaagggcctgtctgtgcacctgaccagccaggaggaggatgccttcagcctgctgtttgaaggagagaccaaccgcatcatcgccagccacaccatgaacaagaacagcagccgcagccactgcatcttcaccatctacctggaggcccacagcaggaccctgtctgaggagaagtacatcaccagcaagatcaacctggtggacctggccggcagcgagcggctgggcaagagcggcagcgagggccaggtgctgaaggaggccacctacatcaacaagagcctgtccttcctggagcaggccatcatcgccctgggggaccagaagagggaccacatccccttccggcagtgcaagctgacccacgccctgaaggacagcctgggcggcaactgcaacatggtgctggtgaccaacatctacggggaggccgcccagctggaggagaccggcagccggctgtggctgtag

SEQ ID NO: 21435 - DNA, 1248 bp, synthetic construct; identical to SEQ ID NO: 19216
  source 1..1248: mol_type = other DNA; note = Synthetic coding sequence

SEQ ID NO: 21436 - DNA, 3108 bp, synthetic construct
  source 1..3108: mol_type = other DNA; note = Synthetic coding sequence
atgtctgagcaggagcgcatccaggagtgcctgaggaaggagatccgcagcctgctgatcagcaccaaggatggcctgagcccccaggagctggagaaggagtacctgctgatggtgggcaaccacctgcccctgcgcatcctgggctaccgcagcaccatggagctggtgctggacatgccagatgtggtgcgggtgtgccctggggccggcggcaccgtcatcctgaaggccatcccagatgagagcaccaagggcatcgccagcctggtggccaagcagaggagcagccacaagctgagaaattccatgcacaagggccggcccagcatctacagcggccccaggagccacagaagagtgccctaccggggccgggtggcccccatcctgcctgctgtggtgaagtctgagctgaaggacctgctggccctgagccctgtgctgctgagtgactttgagaaggcctttgccaagagatttggccgctccttccagtacatgcagtatggcttcctgtccatgtttgaggtgctgaatgctgccagtgatgtgatctctgtggagcagaccagggctggcagcctgctgatgctgaagaagtctgtgacagaggagaagccccggggctgcccagctgggaagatcttcacccagcccttcaggatgaagcagggcagctacagcacaggcttccctgtggccaagccctgcttcagccagcccaccagcaacatggagccccccaagcagatcatgtccatggagaagaccagcaagctgaatgtggtggagaccagccggctgaaccacacagagaagctgaaccagctggagaacaccttcaagagcgtcatcgcccagatcggccctgggggcaccatcagcagcgagctgaagcacaagatcaagtttgtggtgtccaagtttcctgagggcctcttcatcagcaagctgctgggggagtatgaagtcatcttcaaggagcagctgagccccaagaagctgggcttcctgaatgtgacagagctggtgggcgccctgagtgacatcctgcacgtggagttcaggaagggccaccaggacctgctggtgtttgatgctgacaagaagcccctgccccctgtgcagagcgacaagaagattgaggccaaggcctgtgtgagcagccccccaagaaacagcctgagcacagctgctgtgaaggagaccgtgtggaactgccccagcaagaagcagaaggagccccagcagaagatctgcaagaagcccaacctggtggtgaagcccctgcagctgcaggtggagaccaacaagtctgagctgaacctggccatggccaaccacgacatccccccagatgctgtgcccaacaagaagctgtgccgcctgccccccctggacaccagcagcctgattggagtgtttgtggagtacatcatcagccccagccagttctacatccgcatctacagccgggacagcagcgagctgctggaggacatgatgattgagatgaggcgctgctacagcaaccagctggtgtctgacagatatgtgatgcctgagtgcttcatccagcccggccacctgtgctgcgtgcgcatcagcgaggacaagtggtggtacagagtcatcatccaccgggtgctggagaagcaggaggtggaggtgttctacccagactttggaaacatcggcatcgtgcagaagagcagcctgcgcttcctgaagtgctgctacaccaagctgcctgcccaggccatcccctgcagcctggcctgggtgcggcctgtggaggagcactggaccagcaaggccatcctgcagttccagaagctgtgtggcctgaagcccctggtgggcgtggtggatgaatatgtggatggcatcctgaacatcttcctgtgtgacaccagcagcaatgaagatgtgtacttccaccacgtgctgaggacagagggccacgccatcgtgtgccgggagaacatcagcagcaagggcttcagcgagctgaaccccctggccctgtacaccaccagcagcggcggccctgaggacatcgtgctgacagagctgggctaccccagccagcagcactacttcaatgaagacaggaagatcagcccccagagcaaggagagcgagctgcgcatcctgcaggacatcaatgatgagaagagcctgagccacctgaagtctgagagcaaggagcccctgaaggacagcgagtttgagagcctgaagacctgcaacaagagctttgaggaggaccccaagtggagcaaccctgagcccaatgacctgaaggaggagaatgaagatgagatccccaccggcatgccctgcctggagagcgtgaccatcggagatgacatctgggatgagaactggctgcccctgcaggccaagatgggcaaaggaggagatgctgccagccacctgttcaccgccagcctgggcggcaagaaccagtacagcagctgcaaggagatgccccagaaggactggtgcttcagcacccccaaggacacctgggatgacagctggcagcccagcggcctggtgaatggcaccaaggtggaggtgcacaagccagaggtgctgggcgcccaggagaagaacacaggcaccaacagaacccagaagcagctggacatcaatggcagcagtgacagcagcaccctgcccaagctggaggagttctgcaccagcctgacccagagcgagcagagcgcagatggcagccagagcgagcccaacaacagccagacccagcccaagcagatccagctgagcacagctgccccctgcagcaccacagctgtggatgacagcgctgagaagcccagcggctctgtggagagcagccctgagatcctgaagaatgaagacttcagcagcagccgggccatcaccctgtacaaggacaagaggcaggagagcgtggaccagctgagcctcatcctgtcctatgagtgccagatcagccagaagctgtacatccccaggagcacagccacagctgccctgggcgccgccgcccggctggccaccagccgcagcctgctgcactggtaccccagcgtgaagaggatggaggcctag

SEQ ID NO: 21437 - DNA, 660 bp, synthetic construct
  source 1..660: mol_type = other DNA; note = Synthetic coding sequence
atgggcggggcccagctggagctgcccagcggggcccggcctggggtgtgtgtgagaagaagcttccgggcccacgccggggaccagcccaggaggcctcctggccccatccctgtgcccggcaccatgaagcaggagagcgctgcccccaacaccccacccaccagccagagccccacccccagcgcccagttccccagaaatgatggagacccccaggccctgtggatcttcggctacggcagcctggtgtggaggccagactttgcctacagcgacagccgggtgggctttgtgcggggctacagccgccgcttctggcagggcgacaccttccaccggggcagtgacaagatgcctggccgggtggtgaccctgctggaggaccacgagggctgcacctggggcgtggcctaccaggtgcagggcgagcagaaccctggctacctgggccctgcccctgaggaggccatcgccacccagatcctggcctgccggggcttcagcggccacaacctggagtacctgctgcggctggccgacttcatgcagctgtgtggcccccaggcccaggatgagcacctggccgccatcgtggatgctgtgggcaccatgctgccctgcttctgccccacagagcaggccctggccctggtgtag

SEQ ID NO: 21438 - DNA, 2382 bp, synthetic construct; identical to SEQ ID NO: 19207
  source 1..2382: mol_type = other DNA; note = Synthetic coding sequence

SEQ ID NO: 21439 - DNA, 1842 bp, synthetic construct; identical to SEQ ID NO: 18580
  source 1..1842: mol_type = other DNA; note = Synthetic coding sequence

SEQ ID NO: 21440 - DNA, 582 bp, synthetic construct
  source 1..582: mol_type = other DNA; note = Synthetic coding sequence
atggcccgggccggcccccggctggtgctgtctgaggaggccgtgcgggccaagagcggcctgggcccccaccgggacctggccgagctgcagagcctgagcatccctggcacctaccaggagaagatcacccacctgggccacagcctgatgagcctgaccggcctgaagagcctggacctgagcaggaacagcctggtgtccctggagggcatccagtacctgacagccctggagagcctgaacctgtactacaactgcatcagcagcctggccgaggtgttccggctgcacgccctgacagagctggtggatgtggacttccggctgaaccctgtggtgaaggtggagccagactaccgcctgtttgtggtgcacctgctgcccaagctgcagcagctggatgacaggcctgtgcgggccagcgagaggaaggccagccggctgcactttgccagcgaggacagcctggacagcaaggagagcgtgcctgccagcctgaaggagggccgcatccagacctctgtggagcctgctgtgggcaccgtgcctgtgtggggcctgtgggaggccggcccctag

SEQ ID NO: 21441 - DNA, 177 bp, synthetic construct
  source 1..177: mol_type = other DNA; note = Synthetic coding sequence
atgtacttcaactacaagtctgtgtgtggcagctgtggcttcggcagctgctacggctgcggctacggctgcatccacagcacccactgcggctgcaatggctactacggctgctatgagaacaagtacagcgtgattgatgacctgatcttctttgccagcaagaagtgccactag

SEQ ID NO: 21442 - DNA, 585 bp, synthetic construct
  source 1..585: mol_type = other DNA; note = Synthetic coding sequence
atgaatggccgggctgacttccgggagcccaatgctgaggtgccccggcccatcccccacatcggccctgactacatccccacagaggaggagcggcgggtgtttgctgaatgtaatgatgagagcttctggttccgctctgtgcccctggccgccacctccatgctgatcacccagggcctcatcagcaagggcatcctgagcagccaccccaagtatggcagcatccccaagctgatcctggcctgcatcatgggctactttgctgggaagctgtcctatgtgaagacctgccaggagaagttcaagaagctggagaacagccccctgggggaggccctgcggagcggccaggcccggcgcagcagccccccaggccactactaccagaagagcaaatatgacagctctgtgtctggccagagcagctttgtgaccagccctgctgctgacaacatcgagatgctgccccactatgagcccatccccttcagcagctccatgaatgaaagtgcccccaccggcatcacagaccacatcgtgcaggtgaaggtgaacaagtacggggacacctgggatgaatag

SEQ ID NO: 21443 - DNA, 2421 bp, synthetic construct
  source 1..2421: mol_type = other DNA; note = Synthetic coding sequence
atgagcagcagccctgtgaatgtgaagaagctgaaggtgtctgagctgaaggaggagctgaagaagaggcggctgagtgacaagggcctgaaggccgagctgatggagcggctgcaggccgccctggatgatgaggaggccggcggccgcccagccatggagcctggaaatggcagcctggacctgggcggggacagcgctggccgcagcggggccggcctggagcaggaggccgctgctggaggagatgaggaggaggaggaggaggaggaggaggaggagggcatcagcgccctggatggagaccagatggagctgggggaggagaatggagctgctggagctgctgacagcggccccatggaggaggaggaggccgcctctgaagatgaaaatggagatgaccagggcttccaggagggggaggatgagctgggagatgaggaggagggcgctggagatgaaaatggccacggggagcagcagccccagcccccagccacccagcagcagcagccccagcagcagagaggagctgccaaggaggccgccggcaagagcagcggccccaccagcctgtttgctgtgacagtggcccctcctggggcccggcagggccagcagcaggccggaggagatggcaagacagagcagaagggcggggacaagaagaggggcgtgaagaggccccgggaggaccacggccggggctactttgagtacatcgaggagaacaagtacagccgggccaagagcccccagccccctgtggaggaggaggatgagcactttgatgacacagtggtgtgcctggacacctacaactgtgacctgcacttcaagatcagccgggaccggctgagcgccagcagcctgaccatggagagctttgccttcctgtgggccggcggccgggccagctatggagtgtccaagggcaaggtgtgctttgagatgaaggtgacagagaagatccctgtgcgccacctgtacaccaaggacatcgacatccacgaggtgcgcatcggctggagcctgaccaccagcggcatgctgctgggggaggaggagttctcctatggctacagcctgaagggcatcaagacctgcaactgtgaaacagaagattatggagagaagtttgatgaaaatgatgtgatcacctgctttgccaactttgaaagtgatgaggtggagctgtcctatgccaagaatggccaggacctgggcgtggccttcaagatcagcaaggaggtgctggccggccggcccctcttcccccacgtgctgtgccacaactgtgctgtggagttcaactttggccagaaggagaagccctacttccccatccctgaggagtacaccttcatccagaatgtgcccctggaggacagagtgcggggccccaagggccctgaggagaagaaggactgtgaggtggtgatgatgattggcctgcctggagctgggaagaccacctgggtgaccaagcatgctgctgaaaatcctgggaagtacaacatcctgggcaccaacaccatcatggacaagatgatggtggccggcttcaagaagcagatggctgacaccgggaagctgaacaccctgctgcagagggccccccagtgcctgggcaagttcatcgagattgctgccaggaagaagaggaacttcatcctggaccagaccaacgtgtctgctgctgcccagaggaggaagatgtgcctgtttgctggcttccagaggaaggctgtggtggtgtgccccaaggatgaggactacaagcagaggacccagaagaaggccgaggtggagggcaaggacctgcctgagcacgctgtgctgaagatgaagggcaacttcaccctgcctgaggtggccgagtgctttgatgagatcacctacgtggagctgcagaaggaggaggcccagaagctgctggagcagtacaaggaggagagcaagaaggccctgcccccagagaagaagcagaacacaggcagcaagaagagcaacaagaacaagagcggcaagaaccagttcaacagaggaggcggccaccggggccggggcggcttcaacatgagaggaggcaacttccggggcggggcccctggcaacagaggaggctacaacagaagaggcaacatgccccagagaggaggcggcggcggcggcagcggcggcatcggctacccctacccccgggcccctgtgtttcctggccggggcagctacagcaacagaggcaactacaacagaggaggcatgcccaacagaggcaactacaaccagaacttccggggccggggcaacaacagaggctacaagaaccagagccagggctacaaccagtggcagcagggccagttctggggccagaagccctggagccagcactaccaccagggctactactag

SEQ ID NO: 21444 - DNA, 651 bp, synthetic construct
  source 1..651: mol_type = other DNA; note = Synthetic coding sequence
atgagcacagtggacctggcccgggtgggcgcctgcatcctgaagcatgctgtgactggagaggccgtggagctgcggagcctgtggagggagcacgcctgtgtggtggccggcctgcggcgcttcggctgtgtggtgtgccgctggatcgcccaggacctgagcagcctggccggcctgctggaccagcacggcgtgcggctggtgggcgtgggccctgaggccctgggcctgcaggagttcctggatggagactactttgctggggagctgtacctggatgagagcaagcagctgtacaaggagctgggcttcaagaggctgtggacccaggccagccctgagtttggccaggccacctggtgcctgcggcgctacaacagcctgagcatcctgcctgctgccctgggcaagcctgtgagagatgtggccgccaaggccaaggctgtgggcatccagggcaacctgagcggggacctgctgcagagcggcggcctgctggtggtgtccaaaggaggagacaaggtgctgctgcactttgtgcagaagagccctggggactatgtgcccaaggagcacatcctgcaggtgctgggcatctctgctgaggtgtgtgccagtgaccccccccagtgtgaccgggaggtgtag

SEQ ID NO: 21445 - DNA, 1191 bp, synthetic construct
  source 1..1191: mol_type = other DNA; note = Synthetic coding sequence
atgttctggaagtttgacctgcacaccagcagccacctggacaccctgctggagcgggaggacctgagcctgcctgagctgctggatgaagaagatgtgctgcaggagtgcaaggtggtgaacaggaagctgctggacttcctgctgcagcccccccacctgcaggccatggtggcctgggtgacccaggagcccccagacagcggggaggagcggctgcgctacaagtaccccagcgtggcctgtgagatcctgaccagtgatgtgccccagatcaatgatgccctgggcgcagatgagagcctgctgaaccggctgtatggcttcctgcagagcacaggcagcctgaaccccctgctggccagcttcttcagcaaggtgatgggcatcctgatcaacaggaagacagaccagctggtgtccttcctgaggaagaaggatgactttgtggacctgctgctgcagcacatcggcaccagcgccatcatggacctgctgctgcggctgctgacctgtgtggagcggccccagctgcggcaggatgtggtgaactggctgaatgaggagaagatcgtgcagaggctcatcgagcagatccaccccagcaaggatgagaaccagcacagcaatgccagccagagcctgtgtgacatcatccggctgagccgggagcagatgatccaggtgcaggacagccctgtgcccacagatgcccccaccagcccccgggtgtctggagaggaggagctgcacacaggccccccagccccccagggccccctgtctgtgccccagggcctgcccacccagagcctggccagccccccagccagagatgccctgcagctgcggagccaggaccccaccccacccagcgccccccaggaggccacagagggcagcaaggtgacagagcccagcgccccctgccaggccctggtgtccatcggggacctgcaggccaccttccacggcatccgcagcgcccccagcagcagtgacagcgccacccgggaccccagcacctctgtgcctgccagcggggcccaccagcccccccagaccacagaaggagagaagagccctgagcccctgggcctgccccagagccagagcgcccaggccctgaccccaccacccatccccaatggaagtgcccctgagggccctgccagccctggcagccagtag

SEQ ID NO: 21446 - DNA, 2178 bp, synthetic construct
  source 1..2178: mol_type = other DNA; note = Synthetic coding sequence
atgggcaccaggaagaaggtgcacgcctttgtgcgggtgaagcccacagatgactttgcccacgagatgatccgctatggagatgacaagaggagcattgacatccacctgaagaaggacatccggcggggcgtggtgaacaaccagcagacagactggagcttcaagctggatggagtgctgcatgatgccagccaggacctggtgtatgagaccgtggccaaggatgtggtgtcccaggccctggatggctacaacggcaccatcatgtgctacggccagacaggagctgggaagacctacaccatgatgggcgccacagagaactacaagcaccggggcatcctgccccgggccctgcagcaggtgttcaggatgattgaggagcggcccacccacgccatcaccgtgcgggtgtcctacctggagatctacaatgaaagcctgtttgacctgctgagcaccctgccctacgtgggccccagcgtgacccccatgaccatcgtggagaacccccagggcgtcttcatcaagggcctgtctgtgcacctgaccagccaggaggaggatgccttcagcctgctgtttgaaggagagaccaaccgcatcatcgccagccacaccatgaacaagaacagcagccgcagccactgcatcttcaccatctacctggaggcccacagcaggaccctgtctgaggagaagtacatcaccagcaagatcaacctggtggacctggccggcagcgagcggctgggcaagagcggcagcgagggccaggtgctgaaggaggccacctacatcaacaagagcctgtccttcctggagcaggccatcatcgccctgggggaccagaagagggaccacatccccttccggcagtgcaagctgacccacgccctgaaggacagcctgggcggcaactgcaacatggtgctggtgaccaacatctacggggaggccgcccagctggaggagaccctgagcagcctgcgctttgccagcaggatgaagctggtgaccacagagcccgccatcaatgagaagtatgatgctgagaggatggtgaagaacctggagaaggagctggccctgctgaagcaggagctggccatccatgacagcctgaccaacagaacatttgtgacctatgaccccatggatgagatccagattgctgagatcaacagccaggtgcggcgctacctggagggcaccctggatgaaattgacatcatcagcctgcggcagatcaaggaggtgttcaaccagttccgggtggtgctgagccagcaggagcaggaggtggagagcaccctgcggaggaagtacaccctgattgacagaaatgactttgctgccatcagcgccatccagaaggccggcctggtggatgtggatggccacctggtgggggagcctgagggccagaactttggcctgggcgtggcccccttcagcaccaagccaggcaagaaggccaagagcaagaagaccttcaaggagcccctgcggccagacaccccacccagcaagcctgtggcctttgaggagttcaagaatgagcagggcagcgagatcaaccgcatcttcaaggagaacaagagcatcctgaatgaaagaaggaagagggccagcgagaccacccagcacatcaatgccatcaagcgggagattgatgtgaccaaggaggccctgaacttccagaagagcctgcgggagaagcagggcaagtatgagaacaagggcctgatgatcattgatgaggaggagttcctgctgatcctgaagctgaaggacctgaagaagcagtacagaagtgagtaccaggacctgcgggacctgcgggcagagatccagtactgccagcacctggtggaccagtgccgccaccggctgctgatggagtttgacatctggtacaatgaaagctttgtgattcctgaggacatgcagatggccctgaagccaggcggcagcatccggcccggcatggtgcctgtgaacagaattgtgtccctgggggaggatgaccaggacaagttcagccagctgcagcagagggtgctgcctgagggccctgacagcatctccttctacaatgccaaggtgaagattgagcagaagcacaactacctgaagaccatgatgggcctgcagcaggcccacaggaagtag

SEQ ID NO: 21447 - DNA, 282 bp, synthetic construct
  source 1..282: mol_type = other DNA; note = Synthetic coding sequence
atggctgctgccactggagaccccggcctgagcaagctgcagtttgcccccttcagcagcgccctggatgtgggcttctggcatgagctgacccagaagaagctgaatgagtaccgcctggatgaggcccccaaggacatcaagggctactactacaatggagacagcgctggcctgcctgcccggctgaccctggagttcagcgcctttgacatgtctgcccccaccccagcccgctgctgcccagccatcggcaccctgtacaacaccaacaccctgtag

SEQ ID NO: 21448 - DNA, 333 bp, synthetic construct
  source 1..333: mol_type = other DNA; note = Synthetic coding sequence
atgggcaagaagcagaacaagaagaaggtggaggaggtgctggaggaggaggaggaggagtatgtggtggagaaggtgctggacagaagagtggtgaagggcaaggtggagtacctgctgaagtggaagggcttcagtgatgaggacaacacctgggagcctgaggagaacctggactgcccagacctgattgctgagttcctgcagagccagaagacagcccatgaaacagacaagtctgagggcggcaagaggaaggctgacagcgacagcgaggacaagggggaggagagcaagcccaagaagaagaaggaggagagcgagaagccctag

SEQ ID NO: 21449 - DNA, 270 bp, synthetic construct
  source 1..270: mol_type = other DNA; note = Synthetic coding sequence
atgagctactaccagaggcccttcagccccagcgcctacagcctgcctgccagcctgaacagcagcatcgtgatgcagcacggcaccagcctggacagcacagacacctacccccagcacgcccagagcctggatggcaccaccagcagcagcatccccctgtaccgcagcagcgaggaggagaagagggtgaccgtcatcaaggccccccactacccaggcatcggccctgtggatgaaagtggcatccccacagccatccgcacctag

SEQ ID NO: 21450 - DNA, 1269 bp, synthetic construct
  source 1..1269: mol_type = other DNA; note = Synthetic coding sequence
atggagaggaaggactttgagacctggctggacaacatctctgtgaccttcctgagcctgacagacctgcagaagaatgagaccctggaccacctgatcagcctgagcggggctgtgcagctgcggcacctgagcaacaacctggagaccctgctgaagagggacttcctgaagctgctgcccctggagctgtccttctacctgctgaagtggctggacccccagaccctgctgacctgctgcctggtgtccaagcagtggaacaaggtgatcagcgcctgcacagaggtgtggcagacagcctgcaagaacctgggctggcagattgatgacagcgtgcaggatgccctgcactggaagaaggtgtacctgaaggccatcctgaggatgaagcagctggaggaccacgaggcctttgagaccagcagcctgattggccacagcgcccgggtgtatgccctgtactacaaggatggcctgctgtgcaccggcagtgatgacctgagcgccaagctgtgggatgtgtccacaggccagtgtgtgtatggcatccagacccacacctgtgccgctgtgaagtttgatgagcagaagctggtgacaggcagctttgacaacacagtggcctgctgggagtggagcagcggggcccggacccagcacttccggggccacactggagctgtgttttctgtggactacaatgatgagctggacatcctggtgtctggcagcgctgacttcaccgtgaaggtgtgggccctgtctgctggcacctgcctgaacaccctgaccggccacacagagtgggtgaccaaggtggtgctgcagaagtgcaaggtgaagagcctgctgcacagccctggggactacatcctgctgtctgctgacaagtatgagatcaagatctggcccatcggccgggagatcaactgcaagtgcctgaagaccctgtctgtgtctgaggacaggagcatctgcctgcagccccggctgcactttgatggcaagtacatcgtgtgcagcagcgccctgggcctgtaccagtgggactttgccagctatgacatcctgcgggtcatcaagaccccagagatcgccaacctggccctgctgggctttggagacatctttgccctgctgtttgacaaccgctacctgtacatcatggacctgaggacagagagcctcatcagccgctggcccctgcctgagtacaggaagagcaagaggggcagcagcttcctggccggggagcaccctggatag

SEQ ID NO: 21451 - DNA, 1179 bp, synthetic construct
  source 1..1179: mol_type = other DNA; note = Synthetic coding sequence
atgtctgccctggccggagaagatgtgtggcgctgccccggctgtggggaccacatcgcccccagccagatctggtacagaacagtgaatgagacctggcacggcagctgcttcagaagaagcaacagcatcagcaagagccctggccccagcagccccaaggagcccctgctcttcagccgggacatcagccgctctgagagcctgcgctgcagcagcagctacagccagcagatcttccggccctgtgacctgattcatggagaggtgctgggcaagggcttcttcggccaggccatcaaggtgacccacaaggccaccgggaaggtgatggtgatgaaggagctgatccgctgtgatgaggagacccagaagaccttcctgacagaggtgaaggtgatgaggagcctggaccaccccaacgtgctgaagttcatcggcgtgctgtacaaggacaagaagctgaacctgctgacagagtacatcgagggcggcaccctgaaggacttcctgcgctccatggaccccttcccctggcagcagaaggtgcgctttgccaagggcatcgccagcggcatggcctacctgcacagcatgtgcatcatccaccgggacctgaacagccacaactgcctgatcaagctggacaagacagtggtggtggccgactttggcctgagccgcctcatcgtggaggagaggaagagggcccccatggagaaggccaccaccaagaagaggaccctgaggaagaatgacaggaagaagcgctacacagtggtgggcaacccctactggatggcccctgagatgctgaatggcaagagctatgatgagaccgtggacatcttctcctttggcatcgtgctgtgtgagatcatcggccaggtgtatgctgaccctgactgcctgcccaggaccctggactttggcctgaatgtgaagctgttctgggagaagtttgtgcccacagactgccccccagccttcttccccctggccgccatctgctgccgcctggagcctgagagcaggcctgccttcagcaagctggaggacagctttgaggccctgagcctgtacctgggggagctgggcatccccctgcctgctgagctggaggagctggaccacacagtgtccatgcagtatggcctgacccgggacagccccccatag

SEQ ID NO: 21452 - DNA, 480 bp, synthetic construct; identical to SEQ ID NO: 20848
  source 1..480: mol_type = other DNA; note = Synthetic coding sequence

SEQ ID NO: 21453 - DNA, 3585 bp, synthetic construct
  source 1..3585: mol_type = other DNA; note = Synthetic coding sequence
atgttcagcctggacagcttcaggaaggaccgggcccagcaccggcagaggcagtgcaagctgcccccaccccggctgccccccatgtgtgtgaaccccaccccaggcggcaccatcagccgggccagccgggacctgctgaaggagttcccccagcccaagaacctgctgaacagcgtgattggccgggccctgggcatcagccacgccaaggacaagctggtgtatgtgcacaccaacggccccaagaagaagaaggtgaccctgcacatcaagtggcccaagtctgtggaggtggagggctacggcagcaagaagattgatgctgagcggcaggccgctgctgctgcctgccagctgttcaagggctggggcctgctgggccccagaaatgagctgtttgatgctgccaagtacagagtgctggccgaccgcttcggcagccctgctgacagctggtggaggcctgagcccaccatgccacccacctcctggaggcagctgaaccctgagagcatccggcctgggggccctgggggcctgagccgcagcctgggccgggaggaggaggaggatgaggaggaggagctggaggagggcaccattgatgtgacagacttcctgtccatgacccagcaggacagccacgcccccctgcgggacagccggggcagcagctttgagatgacagatgatgacagcgccatccgggccctgacccagttccccctgcccaagaacctgctggccaaggtgatccagatcgccaccagcagcagcacagccaagaacctgatgcagttccacacagtgggcaccaagaccaagctgagcaccctgaccctgctgtggccctgccccatgacctttgtggccaagggccgcaggaaggccgaggccgagaacaaggctgctgccctggcctgcaagaagctgaagagcctgggcctggtggacaggaacaatgagcccctgacccacgccatgtacaacctggccagcctgcgggagctgggggagacccagaggcggccctgcaccatccaggtgcctgagcccatcctgaggaagattgagaccttcctgaaccactaccctgtggagagctcctggatcgcccctgagctgcggctgcagagtgatgacatcctgcccctgggcaaggacagcggccccctgagtgaccccatcaccgggaagccctacgtgcccctgctggaggccgaggaggtgcggctgagccagagcctgctggagctgtggaggagaagaggccctgtgtggcaggaggccccccagctgcctgtggacccccaccgggacaccatcctgaatgccatcgagcagcaccctgtggtggtgatcagcggggacaccggctgcggcaagaccacccgcatcccccagctgctgctggagagatatgtgacagagggccgcggggcccgctgcaacgtcatcatcacccagccccggcgcatctctgctgtgtctgtggcccagagggtgtcccatgagctgggccccagcctgcggagaaatgtgggcttccaggtgcggctggagagcaagccacccagcagaggaggagccctgctcttctgcaccgtgggcatcctgctgaggaagctgcagagcaaccccagcctggagggcgtgagccacgtgattgtggatgaggtgcatgaaagagatgtgaacacagacttcctgctgatcctgctgaagggcctgcagaggctgaacccagccctgcggctggtgctgatgtctgccactggagacaatgaacgcttcagccgctactttggaggctgccctgtgatcaaggtgcccggcttcatgtaccctgtgaaggagcactacctggaggacatcctggccaagctgggcaagcaccagtacctgcaccgccaccgccaccacgagagtgaagatgaatgtgccctggacctggacctggtgacagacctggtgctgcacattgatgcccggggggagcccggcggcatcctgtgcttcctgcccggctggcaggagatcaagggcgtgcagcagaggctgcaggaggccctgggcatgcatgagagcaagtacctgatcctgcctgtgcacagcaacatccccatgatggaccagaaggccatcttccagcagccccctgtgggcgtgaggaagatcgtgctggccaccaacattgctgagaccagcatcaccatcaatgacatcgtgcacgtggtggacagcggcctgcacaaggaggagagatatgacctgaagaccaaggtgtcctgcctggagaccgtgtgggtgtcccgggccaacgtcatccagaggcggggccgggccggccgctgccagagcggctttgcctaccacctgttccccaggagccggctggagaagatggtgcccttccaggtgcctgagatcctgcggacccccctggagaacctggtgctgcaggccaagatccacatgcctgagaagacagctgtggagttcctgagcaaggctgtggacagccccaacatcaaggctgtggatgaagctgtgatcctgctgcaggagattggagtgctggaccagcgggagtacctgaccaccctgggccagaggctggcccacatcagcacagacccccggctggccaaggccatcgtgctggccgccatcttccgctgcctgcaccccctgctggtggtggtgtcctgcctgacccgggaccccttcagcagcagcctgcagaacagagctgaggtggacaaggtgaaggccctgctgagccatgacagcggcagtgaccacctggcctttgtgcgggctgtggccggctgggaggaggtgctgcgctggcaggacaggagcagccgggagaactacctggaggagaacctgctgtatgcccccagcctgcgcttcatccacggcctcatcaagcagttcagcgagaacatctatgaggccttcctggtgggcaagcccagcgactgcaccctggccagcgcccagtgcaatgagtacagcgaggaggaggagctggtgaagggcgtgctgatggccggcctgtaccccaacctgatccaggtgcggcagggcaaggtgacccggcagggcaagttcaagcccaacagcgtgacctaccgcaccaagagcggcaacatcctgctgcacaagagcaccatcaaccgggaggccacccggctgcggagccgctggctgacctacttcatggctgtgaagagcaatggatctgtgtttgtgcgggacagcagccaggtgcaccccctggccgtgctgctgctgacagatggagatgtgcacatcagagatgatggccggcgggccaccatcagcctgagtgacagcgacctgctgcggctggagggggacagcaggacagtgcggctgctgaaggagctgcggcgggccctgggccgcatggtggagaggagcctgcggtctgagctggccgccctgcccccatctgtgcaggaggagcacggccagctgctggccctgctggccgagctgctgcggggcccctgtggcagctttgatgtgaggaagacagcagatgactag

SEQ ID NO: 21454 - DNA, 207 bp, synthetic construct
  source 1..207: mol_type = other DNA; note = Synthetic coding sequence
atgagctactaccagaggcccttcagccccagcgcctacagcctgcctgccagcctgaacagcagcatcgtgatgcagcacggcaccagcctggacagcacagacacctacccccagcacgcccagagcctggatggcaccaccagcagcagcatccccctgtaccgcagcagcgaggaggagaagagggtgaccgtcatcaagtag

SEQ ID NO: 21455 - DNA, 1419 bp, synthetic construct
  source 1..1419: mol_type = other DNA; note = Synthetic coding sequence
atgagcagaagagtggtgcggcagagcaagttcagacatgtgtttggccaggccgccaaggctgaccaggcctatgaggacatccgggtgtccaaggtgacctgggacagcagcttctgtgctgtgaaccccaagttcctggccatcatcgtggaggccggcggcggcggggccttcatcgtgctgcccctggccaagacaggccgggtggacaagaactaccccctggtgacaggccacacagcccctgtgctggacatcgactggtgcccccacaatgacaacgtgattgccagcgccagtgatgacaccaccatcatggtgtggcagatcccagactacacccccatgaggaacatcacagagcccatcatcaccctggagggccacagcaagagggtgggcatcctgtcctggcaccccacagccagaaatgtgctgctgtctgctggaggagacaacgtcatcatcatctggaatgtgggcactggagaggtgctgctgagcctggatgacatgcacccagatgtgatccacagcgtgtgctggaacagcaatggcagcctgctggccaccacctgcaaggacaagaccctgcgcatcatcgaccccaggaagggccaggtggtggccgagcaggcccggccccatgaaggagcccggcccctgcgggctgtgttcaccgcagatggcaagctgctgagcacaggcttcagcaggatgtctgagcggcagctggccctgtgggaccccaacaactttgaggagcctgtggccctgcaggagatggacaccagcaatggagtgctgctgcccttctatgaccctgacagcagcatcgtgtacctgtgtgggaagggggacagcagcatccgctactttgagatcacagatgagcccccatttgtgcactacctgaacaccttcagcagcaaggagccccagaggggcatgggcttcatgcccaagaggggcctggatgtgtccaaatgtgaaattgcccgcttctacaagctgcacgagaggaaatgtgagcccatcatcatgacagtgcccaggaagagtgacctcttccaggatgacctgtacccagacaccccaggccctgagcccgccctggaggctgatgagtggctgagcggccaggatgctgagcctgtgctgatcagcctgagagatggctacgtgccccccaagcaccgggagctgcgggtgaccaagaggaacatcctggatgtgcggcccccatctggcccccggcgcagccagagcgccagtgatgcccccctgagccagcagcacaccctggagaccctgctggaggagatcaaggccctgcgggagcgggtgcaggcccaggagcagaggatcacagccctggagaacatgctgtgtgagctggtggatggaacagactag

SEQ ID NO: 21456 - DNA, 390 bp, synthetic construct
  source 1..390: mol_type = other DNA; note = Synthetic coding sequence
atcctgcacagcctggtgcagacaggcatctgtgtgatcaccctggccgagagccaccctgtgctgcagagcggcaagaccatcaagagcatctcctaccagatcagcaccaactgcagccggctgcagaacaaggtgtctgggaagttcaagagaggagcccagttcctgacagagctggcccccctgtgcaagatctactgcagtgatggagaggagtacacagtgagcagctgtgtgcggggccgcctgatggaggtgaatgaaaacatcctgcacaagcccagcatcctgcaggagaagcccagcacagagggctacatcgctgtggtgctgcccaagtttgaggagagcaagagcatcacagagggcctgctgacccagaagtag

SEQ ID NO: 21457 - DNA, 735 bp, synthetic construct
  source 1..735: mol_type = other DNA; note = Synthetic coding sequence
atggtgcaccaggacaactgcagctaccaggcccagaagaatgaaagagagagcatccggcagaagctggccctgggcagcttctttgatgatggccctggcatctacaccagctgcagcaagagcggcaagcccagcctgagcagccggctgcagagcggcatgaacctgcagatctgctttgtgaatgattctggcagtgacaaggacagtgatgctgatgacagcaagacagagaccagcctggacacccccctgagccccatgagcaagcagagcagcagctacagcgaccgggacaccacagaggaggagagcgagagcctggatgacatggacttcctgacccggcagaagaagctgcaggccgaggccaagatggccctggccatggccaagcccatggccaagatgcaggtggaggtggagaagcagaacaggaagaagagccctgtggccgacctgctgccccacatgccccacatcagcgagtgcctgatgaagaggagcctgaagcccacagacctgcgggacatgaccatcggccagctgcaggtgattgtgaatgacctgcacagccagatcgagagcctgaatgaggagctggtgcagctgctgctgatcagagatgagctgcacacagagcaggatgccatgctggtggacatcgaggacctgaccaggcatgctgagagccagcagaagcacatggccgagaagatgcctgccaagtag

SEQ ID NO: 21458 - DNA, 1620 bp, synthetic construct; identical to SEQ ID NO: 19050
  source 1..1620: mol_type = other DNA; note = Synthetic coding sequence

SEQ ID NO: 21459 - DNA, 441 bp, synthetic construct
  source 1..441: mol_type = other DNA; note = Synthetic coding sequence
atgtttgagatcctgaccagcgagttctcctaccagcacagcctgagcatcctggtggaggagttcctgcagagcaaggagctgcgggccaccgtgacccagatggagcaccaccacctgttcagcaacatcctggatgtgctgggcgccagccagcgcttctttgaggacctggagcagaggcacaaggcccaggtgctggtggaggacatcagtgacatcctggaggagcacgccgagaagcacttccacccctacatcgcctactgcagcaatgaggtgtaccagcagaggaccctgcagaagctgatcagcagcaatgctgccttccgggaggccctgcgggagattgaaagaagacctgcctgtggcggcctgcccatgctgtccttcctgatcctgcccatgcagagggtgacccggctgcccctgctgatgtag

SEQ ID NO: 21460 - DNA, 483 bp, synthetic construct; identical to SEQ ID NO: 20009
  source 1..483: mol_type = other DNA; note = Synthetic coding sequence

SEQ ID NO: 21461 - DNA, 303 bp, synthetic construct
  source 1..303: mol_type = other DNA; note = Synthetic coding sequence
atgagctactaccagaggcccttcagccccagcgcctacagcctgcctgccagcctgaacagcagcatcgtgatgcagcacggcaccagcctggacagcacagacacctacccccagcacgcccagagcctggatggcaccaccagcagcagcatccccctgtaccgcagcagcgaggaggagaagagggtgaccgtcatcaaggccccccactacccaggcatcggccctgtggatgaaagtggcatccccacagccatccgcaccaccgtggaccggcccaaggactggtacaagacctag

SEQ ID NO: 21462 - DNA, 369 bp, synthetic construct; identical to SEQ ID NO: 21112
  source 1..369: mol_type = other DNA; note = Synthetic coding sequence

SEQ ID NO: 21463 - DNA, 633 bp, synthetic construct
  source 1..633: mol_type = other DNA; note = Synthetic coding sequence
atggtgtccatgtctgtgcctgactgcctgagcatcatgacctacgtgtcccagtactacaaccacttctgcagccctggccaggccggcgtgtccccacccaggaagggcctggccccctgcagccccccatctgtggcccccacccctgtggagccagaagatgtggcccagggcgaggagctgagcagcggcagcctgtctgagcagggcaccggccagacccccagcagcacctgtgccgcctgccagcagcacgtgcacctggtgcagcgctacctggctgatggccgcctgtaccaccgccactgcttccgctgccgccgctgcagcagcaccctgctgcccggggcctatgaaaatggacctgaggagggcacctttgtgtgtgccgagcactgtgcccggctgggccctggcaccaggagcggcaccaggcctggccccttcagccagcccaagcagcagcaccagcagcagctggctgaagatgccaaggatgtgcctgggggcggccccagcagcagcgccccagctggagctgaggctgatggccccaaggccagccctgaggcccggccccagatccccaccaagccccgggtgcctgggaagctgcaggagctggcctag

SEQ ID NO: 21464 - DNA, 390 bp, synthetic construct; identical to SEQ ID NO: 19988
  source 1..390: mol_type = other DNA; note = Synthetic coding sequence

SEQ ID NO: 21465 - DNA, 621 bp, synthetic construct
  source 1..621: mol_type = other DNA; note = Synthetic coding sequence
atggccctgaatgtggcccctgtgcgggacaccaagtggctgaccctggaggtgtgccggcagttccagaggggcacctgcagcagaagtgatgaggagtgcaagtttgcccacccccccaagagctgccaggtggagaatggccgggtgattgcctgctttgacagcctgaagggccgctgcagccgggagaactgcaagtacctgcacccccccacccacctgaagacccagctggagatcaatggaagaaacaacctgatccagcagaagacagctgctgccatgctggcccagcagatgcagttcatgtttcctggcacccccctgcaccctgtggccttccccccaggggccctgcaccccctgcccaagaggcaggccctggagaagagcaatggcaccagcgctgtgttcaaccccagcgtgctgcactaccagcaggccctgaccagcgcccagctgcagcagcacgccgccttcatccccacagacaacagcgagatcatcagcagaaatggcatggagtgccaggagagcgccctgcgcatcaccaagcactgctactgcacctactaccctgtgagcagcagcattgagctgccccagacagcctgctag

SEQ ID NO: 21466 - DNA, 978 bp, synthetic construct
  source 1..978: mol_type = other DNA; note = Synthetic coding sequence
atgcagcagcctgtgcgggccggggacatcggcgtgtcccgggtgcagacccaccacaatgccagccccttctctgtgcccaagaagcaggatgagagccccatgattggagatggagaggactacttcctgagcctgtttggagacagcaagaagctgacagcccacagcaactacacccagaagaccctgaagtacttctccatgatcctggaggaggtgggccagttcaccagcagcagcctgggagatgtggagattgctgaggtgaatgtgaagggcctgtttgtgaagctgatcaacagcagcctggacaaggagatggccatcggggaccacatcctgcagcagaatgtgaatggccagaccatcagcctgtaccgcttcctgcccaacatcgtgatgcaggccaacagcacagtgacagtgtgggccgccgccagcgaggccaagcaccagccccccagcgacttcctgtggaaggagcaggacaagttccgggccagcccagactgcatcaccatcctgtgcaagcccaacggccaggccatcgcctggtacacccccatccactggaagcaggcctgggagaagctggatgctgatgtggagttcaaccgctgcagcgtggtgagccccaccttcaggaagagggtcttccagtggacagccagcacagccaccatcaccaaggagaagcaggaccagcccaagaaggacatcagcaactaccaggtggagcaggcccaggtgctgctgaagcgggagaaggagatcccccccaccgtcttccccaacagaagcccctggtgccagaacccctacgtgtctgcccacccctactgccccctgattgagccccacaacaccagcacagctgggggccgcctggaccggcagcccaggaccaggagcacccggcccaacagagccagcggcagcaagaagaagaagaccagcgagagccagaagcagtag

SEQ ID NO: 21467 - DNA, 1257 bp, synthetic construct
  source 1..1257: mol_type = other DNA; note = Synthetic coding sequence
atgagggagatcgtgcacatccaggccggccagtgtggcaaccagatcggcaccaagttctgggaggtgatcagtgatgagcacggcatcgaccctgctgggggctacgtgggggacagcgccctgcagctggagcgcatcaacgtgtactacaatgaaagcagcagccagaagtatgtgcccagggctgccctggtggacctggagcccggcaccatggattctgtgcgcagcggccccttcggccagctgttccggccagacaacttcatcttcggccagacaggagctggcaacaactgcctgcagggcttccagctgacccacagcctgggcggcggcactggaagtggcatgggcaccctgctgatcagcaagatccgggaggagttcccagaccgcatcatgaacaccttctctgtgatgcccagccccaaggtgtctgacacagtggtggagccctacaatgccaccctgtctgtgcaccagctggtggagaacacagatgagacctactgcatcgacaatgaggccctgtatgacatctgcttccgcaccctgaagctgaccacccccacctacggggacctgaaccacctggtgtctgccaccatgtctggagtgaccaccagcctgcgcttccctggccagctgaatgctgacctgaggaagctggccgtgaacatggtgcccttcccccggctgcacttcttcatgcctggctttgcccccctgaccagccggggcagccagcagtaccgggccctgactgtgcctgagctgacccagcagatgtttgatgccaggaacatgatggccgcctgtgaccccaggcatggccgctacctgactgtggccaccgtcttccggggccccatgtccatgaaggaggtggatgagcagatgctggccatccagagcaagaacagcagctactttgtggagtggatccccaacaacgtgaaggtggccgtgtgtgacatccccccccggggcctgaagatggccagcaccttcatcggcaacagcacagccatccaggagctgttcaagaggatcagcgagcagttcagcgccatgttccggaggaaggccttcctgcactggttcaccggggagggcatggatgagatggagttcacagaagctgagagcaacatgaatgacctggtgtctgagtaccagcagtaccaggatgccacagccaatgatggagaggaggcctttgaagatgaggaggaggagattgatggatag

SEQ ID NO: 21468 - DNA, 270 bp, synthetic construct
  source 1..270: mol_type = other DNA; note = Synthetic coding sequence
atggatgtgctgagccccctgtccttcatcaaggtgagccacgtgaggatgcagggcatcctgctgctggtgtttgccaagtaccagcacctgccctacatccagatcctgagcaccaagagcacccccaccggcctgtttggctactggggcaacaagggcggcgtgaacatctgcctgaagctgtatggctactacgtgtccatcatcaactgccacctgcccccccacatcagcaacaactaccagaggctggagcactttgattag

SEQ ID NO: 21469 - DNA, 180 bp, synthetic construct; identical to SEQ ID NO: 18361
  source 1..180: mol_type = other DNA; note = Synthetic coding sequence

SEQ ID NO: 21470 - DNA, 864 bp, synthetic construct
  source 1..864: mol_type = other DNA; note = Synthetic coding sequence
atggatgaaacagagatcggcagctgcttcggccgctatggctctgtgaaggaggtgaagatcatcaccaacagaactggagtgtccaagggctacggctttgtgtcctttgtgaatgatgtggatgtgcagaagatcgtgggcagccagatccacttccacggcaagaagctgaagctgggccctgccatcaggaagcagaagctgtgtgcccggcacgtgcagccccggcccctggtggtgaaccccccacctccaccccagttccagaatgtgtggaggaaccccaacacagagacctacctgcagccccagatcacccccaaccctgtgacccagcacgtgcaggcctacagcgcctacccccacagccctggccaggtgatcaccggctgccagctgctggtgtacaactaccaggagtaccccacctacccagacagcgccttccaggtgaccaccggctaccagctgcctgtgtacaactaccagcccttccctgcctaccccaggagccccttccaggtgacagctggctaccagctgcctgtgtacaactaccaggccttccctgcctaccccaacagccccttccaggtggccaccggctaccagtttcctgtgtacaactaccagcccttccctgcctaccccagcagccccttccaggtgacagctggctaccagctgcctgtgtacaactaccaggccttccctgcctaccccaacagccccttccaggtggccaccggctaccagtttcctgtgtacaactaccaggccttccctgcctaccccaacagccctgtgcaggtgaccaccggctaccagctgcctgtgtacaactaccagaagttcccctag

SEQ ID NO: 21471 - DNA, 1344 bp, synthetic construct; identical to SEQ ID NO: 18737
  source 1..1344: mol_type = other DNA; note = Synthetic coding sequence

SEQ ID NO: 21472 - DNA, 474 bp, synthetic construct
  source 1..474: mol_type = other DNA; note = Synthetic coding sequence
atggccaacattgctgtgcagaggatcaagcgggagttcaaggaggtgctgaagtctgaggagaccagcaagaaccagatcaaggtggacctggtggatgagaacttcacagagctgcggggggagattgctggccccccagacaccccctatgaaggaggccgctaccagctggagatcaagatccctgagacctaccccttcaacccccccaaggtgcgcttcatcaccaagatctggcaccccaacatcagctctgtgactggagccatctgcctggacatcctgaaggaccagtgggccgccgccatgaccctgaggacagtgctgctgagcctgcaggccctgctggccgctgctgagccagatgacccccaggatgctgtggtggccaaccagaatgctgtgattgtggccctgagcagcaagtcctgggatgtggagacagccacagagctgctgctgagcaactag

SEQ ID NO: 21473 - DNA, 582 bp, synthetic construct; identical to SEQ ID NO: 18345
  source 1..582: mol_type = other DNA; note = Synthetic coding sequence

SEQ ID NO: 21474 - DNA, 1188 bp, synthetic construct; identical to SEQ ID NO: 20054
  source 1..1188: mol_type = other DNA; note = Synthetic coding sequence

SEQ ID NO: 21475 - DNA, 624 bp, synthetic construct
  source 1..624: mol_type = other DNA; note = Synthetic coding sequence
atgacagaggacagccagaggaacttccgctctgtgtactatgagaaggtgggcttccggggcgtggaggagaagaagagcctggagatcctgctgaaggatgaccggctgggcatcctgcccccccaccacgagagccacgccaaggtgatgatgtacaggaaggagcagtacctggatgtgctgcacgccctgaaggtggtgcgctttgtgtctgatgccaccccccaggccgaggtgtacctgaggatgtaccagctggagagcggcaagctgcccaggagccccagcttccccctggagccagatgatgaggtgttcctggccatcgccaaggccatggaggagatggtggaggacagcgtggactgctactggatcaccaggagatttgtgaaccagctgaacaccaagtacagagacagcctgccccagctgcccaaggcctttgagcagtacctgaacctggaggatggccgcctgctgacccacctgaggatgtgcagcgctgcccccaagctgccctatgacctgtggttcaagcgctgctttgctggctgcctgcctgagagcagcctgcagagggtgtgggacaaggtggtgtctggcagctgcaagatctag

SEQ ID NO: 21476 - DNA, 1404 bp, synthetic construct
  source 1..1404: mol_type = other DNA; note = Synthetic coding sequence
atggccagcctgctgcagagcgacagagtgctgtacctggtgcagggcgagaagaaggtgcgggcccccctgagccagctgtacttctgccgctactgcagcgagctgcggagcctggagtgtgtgtcccatgaggtggacagccactactgccccagctgcctggagaacatgcccagcgctgaggccaagctgaagaagaacagatgtgccaactgctttgactgccccggctgcatgcacaccctgagcacccgggccaccagcatcagcacccagctgcctgatgatcctgccaagaccaccatgaagaaggcctactacctggcctgtggcttctgccgctggaccagcagagatgtgggcatggctgacaagtctgtggccagcggcggctggcaggagcctgagaacccccacacccagaggatgaacaagctgattgagtactaccagcagctggcccagaaggagaaggtggagcgggacaggaagaagctggccaggagaagaaactacatgcccctggccttcagccagcacaccatccacgtggtggacaagtatggcctgggcacccggctgcagaggccccgggccggggccagcatcagcaccctggccggcctgagcctgaaggagggggaggaccagaaggagatcaagattgaaccagcccaggccgtggatgaggtggagcccctgcctgaggactactacaccaggcctgtgaacctgacagaggtgaccaccctgcagcagaggctgctgcagcctgacttccagcctgtgtgtgccagccagctgtaccccaggcacaagcacctgctgatcaagaggagcctgcgctgcaggaaatgtgagcacaacctgagcaagccagagttcaaccccaccagcatcaagttcaagatccagctggtggccgtgaactacatccctgaggtgcgcatcatgagcatccccaacctgcgctacatgaaggagagccaggtgctgctgaccctgaccaaccctgtggagaacctgacccacgtgaccctgtttgaatgtgaggagggggaccctgatgacatcaacagcacagccaaggtggtggtgccccccaaggagctggtgctggccggcaaggatgctgctgctgaatatgatgagctggccgagccccaggacttccaggatgatcctgacatcatcgccttcaggaaggccaacaaggtgggcatcttcatcaaggtgaccccccagcgggaggagggggaggtgacagtgtgcttcaagatgaagcatgacttcaagaacctggccgcccccatccggcccatcgaggagagtgaccagggcacagaggtgatctggctgacccagcacgtggagctgagcctgggccccctgctgccctag

SEQ ID NO: 21477 - DNA, 435 bp, synthetic construct
  source 1..435: mol_type = other DNA; note = Synthetic coding sequence
gtgcgggagctggaggccgagctggatgctgagcagaagaagcacgccgaggccctgaagggcgtgaggaagcatgaaagaagagtgaaggagctggcctaccaggccgaggaggacaggaagaacctggccaggatgcaggacctggtggacaagctgcagagcaaggtgaagagctacaagaggcagtttgaggaggccgtgtctgccctgggccctggccacctggaccgggccccccagctgtgcccccgggtgtgtggccaggagcagcaggccaacaccaacctggccaagtacaggaaggcccagcacgagctggatgatgctgaggagagagctgacatggccgagacccaggccaacaagctgcgggcccggaccagagatgccctgggccccaagctgagcctgagcccccagcacaaggagtag

SEQ ID NO: 21478 - DNA, 747 bp, synthetic construct; identical to SEQ ID NO: 20797
  source 1..747: mol_type = other DNA; note = Synthetic coding sequence

SEQ ID NO: 21479 - DNA, 3468 bp, synthetic construct
  source 1..3468: mol_type = other DNA; note = Synthetic coding sequence
atggccgccagccgggacctgctgaaggagttcccccagcccaagaacctgctgaacagcgtcatcggccgggccctgggcatcagccacgccaaggacaagctggtgtatgtgcacaccaacggccccaagaagaagaaggtgaccctgcacatcaagtggcccaagtctgtggaggtggagggctacggcagcaagaagattgatgctgagcggcaggccgctgctgctgcctgccagctgttcaagggctggggcctgctgggccccagaaatgagctgtttgatgctgccaagtacagagtgctggccgacagatttggcagccctgctgacagctggtggaggcctgagcccaccatgccacccacctcctggaggcagctgaaccctgagagcatccggcctgggggccctgggggcctgagccgcagcctgggccgggaggaggaggaggatgaggaggaggagctggaggagggcaccattgatgtgacagacttcctgtccatgacccagcaggacagccacgcccccctgcgggacagccggggcagcagctttgagatgacagatgatgattctgccatccgggccctgacccagttccccctgcccaagaacctgctggccaaggtgatccagatcgccaccagcagcagcacagccaagaacctgatgcagttccacacagtgggcaccaagaccaagctgagcaccctgaccctgctgtggccctgccccatgacctttgtggccaagggccgcaggaaggccgaggccgagaacaaggccgccgccctggcctgcaagaagctgaagagcctgggcctggtggacagaaataatgagcccctgacccacgccatgtacaacctggccagcctgcgggagctgggggagacccagaggcggccctgcaccatccaggtgcctgagcccatcctgaggaagattgagaccttcctgaaccactaccctgtggagagctcctggatcgcccctgagctgcggctgcagagtgatgacatcctgcccctgggcaaggacagcggccccctgagtgaccccatcaccgggaagccctacgtgcccctgctggaggccgaggaggtgcggctgagccagagcctgctggagctgtggaggcggcggggccctgtgtggcaggaggccccccagctgcctgtggacccccaccgggacaccatcctgaatgccatcgagcagcaccctgtggtggtgatcagcggggacaccggctgtgggaagaccacccgcatcccccagctgctgctggagcgctacgtgacagagggccgcggggcccgctgcaacgtcatcatcacccagccccggcgcatctctgctgtgtctgtggcccagagggtgtcccatgagctgggccccagcctgcggagaaatgtgggcttccaggtgcggctggagagcaagccacccagccggggcggggccctgctcttctgcaccgtgggcatcctgctgaggaagctgcagagcaaccccagcctggagggcgtgagccacgtgattgtggatgaggtgcatgaaagagatgtgaacacagacttcctgctgatcctgctgaagggcctgcagaggctgaacccagccctgcggctggtgctgatgtctgccaccggggacaatgaacgcttcagccgctactttggaggctgccctgtgatcaaggtgcccggcttcatgtaccctgtgaaggagcactacctggaggacatcctggccaagctgggcaagcaccagtacctgcaccgccaccgccaccatgaaagtgaagatgaatgtgccctggacctggacctggtgacagacctggtgctgcacattgatgcccggggggagcccggcggcatcctgtgcttcctgcccggctggcaggagatcaagggcgtgcagcagaggctgcaggaggccctgggcatgcatgagagcaagtacctgatcctgcctgtgcacagcaacatccccatgatggaccagaaggccatcttccagcagccccctgtgggcgtgaggaagatcgtgctggccaccaacattgctgagaccagcatcaccatcaatgacatcgtgcacgtggtggacagcggcctgcacaaggaggagagatatgacctgaagaccaaggtgtcctgcctggagaccgtgtgggtgtcccgggccaacgtcatccagaggcggggccgggccggccgctgccagagcggctttgcctaccacctgttccccaggagccggctggagaagatggtgcccttccaggtgcctgagatcctgcggacccccctggagaacctggtgctgcaggccaagatccacatgcctgagaagacagctgtggagttcctgagcaaggctgtggacagccccaacatcaaggctgtggatgaggccgtcatcctgctgcaggagattggagtgctggaccagcgggagtacctgaccaccctgggccagaggctggcccacatcagcacagacccccggctggccaaggccatcgtgctggccgccatcttccgctgcctgcaccccctgctggtggtggtgtcctgcctgacccgggaccccttcagcagcagcctgcagaacagagctgaggtggacaaggtgaaggccctgctgagccatgattctggcagtgaccacctggcctttgtgcgggctgtggccggctgggaggaggtgctgcgctggcaggacaggagcagccgggagaactacctggaggagaacctgctgtatgcccccagcctgcgcttcatccacggcctcatcaagcagttcagcgagaacatctatgaggccttcctggtgggcaagcccagcgactgcaccctggccagcgcccagtgcaatgagtacagcgaggaggaggagctggtgaagggcgtgctgatggccggcctgtaccccaacctgatccaggtgcggcagggcaaggtgacccggcagggcaagttcaagcccaacagcgtgacctaccgcaccaagagcggcaacatcctgctgcacaagagcaccatcaaccgggaggccacccggctgcggagccgctggctgacctacttcatggctgtgaagagcaatggatctgtgtttgtgcgggacagcagccaggtgcaccccctggccgtgctgctgctgacagatggagatgtgcacatcagagatgatggaagaagagccaccatcagcctgagtgacagcgacctgctgcggctggagggggacagcaggacagtgcggctgctgaaggagctgcggcgggccctgggccgcatggtggagaggagcctgcggtctgagctggccgccctgccccccagcgtgcaggaggagcacggccagctgctggccctgctggccgagctgctgcggggcccctgtggcagctttgatgtgaggaagacagcagatgactag

SEQ ID NO: 21480 - DNA, 762 bp, synthetic construct
  source 1..762: mol_type = other DNA; note = Synthetic coding sequence
tgagtgggcgtggaggccgcccgggtcatcgccaaggccctggagaagaagtctgagctgaagcgctgccactggagcgacatgttcaccggccgcctgaggacagagatccccccagccctgatcagcctgggggagggcctcatcacagctggggcccagctggtggagctggacctgagtgacaatgcctttggaccagatggagtgcagggctttgaggccctgctgaagagcagcgcctgcttcaccctgcaggagctgaagctgaacaactgtggcatgggcattggaggcggcaaggtgattggcaccctggaggaggtgcacatgccccagaatggcatcaaccaccctggcatcacagccctggcccaggcctttgctgtgaaccccctgctgcgggtcatcaacctgaatgacaacaccttcacagagaagggagctgtggccatggccgagaccctgaagaccctgcggcaggtggaggtgatcaactttggagactgcctggtgcgcagcaaaggagctgtggccatcgcagatgccatccggggcggcctgcccaagctgaaggagctgaacctgtccttctgtgagatcaagagagatgctgccctggccgtggccgaggccatggctgacaaggccgagctggagaagctggacctgaatggaaacaccctgggggaggagggctgtgagcagctgcaggaggtgctggagggcttcaacatggccaaggtgctggccagcctgtag

SEQ ID NO: 21481 - DNA, 3735 bp, synthetic construct
  source 1..3735: mol_type = other DNA; note = Synthetic coding sequence
gatgtgggcggggaccggccctgggacagcggcaacacccagctgccccccaggaaccctgtgaaggccaatgccatgtttggagctggagatgaagatgacacagacttcctgagccccagcggcggggcccggctggccagcctgtttggcctggaccaggccgctgctggccatggaaatgagttcttccagtacacagcccccaagcagcccaagaagggccagggcacagctgccactggaaaccaggccacccccaagacagccccagccaccatgagcacccccaccatcctggtggccacagctgtgcacgcctaccgctacaccaacggccagtatgtgaagcagggcaagtttggagctgctgtgctgggcaaccacacagcccgggagtaccgcatcctgctgtacatcagccagcagcagcctgtgacagtggcccgcatccacgtgaactttgagctgatggtgcggcccaacaactacagcaccttctatgatgaccagaggcagaactggagcatcatgtttgaaagtgagaaggctgctgtggagttcaacaagcaggtgtgcatcgccaagtgcaacagcaccagcagcctggatgctgtgctgagccaggacctgattgtggctgatggccctgctgtggaggtgggggacagcctggaggtggcctacacaggctggctgttccagaaccacgtgctgggccaggtgtttgacagcacagccaacaaggacaagctgctgcggctgaagctgggcagcggcaaggtgatcaagggctgggaggatggcatgctgggcatgaagaagggcggcaagaggctgctgattgtgcccccagcctgtgctgtgggcagcgagggcgtgattggctggacccaggccacagacagcatcctggtgtttgaggtggaggtgcggcgggtgaagtttgcccgggacagcggcagtgatggccacagcgtgagcagccgggacagcgctgcccccagccccatccctggagctgacaacctgtctgctgaccctgtggtgagcccccccaccagcatccccttcaagagcggggagcccgccctgcggaccaagagcaacagcctgtctgagcagctggccatcaacaccagcccagatgctgtgaaggccaagctgatcagcaggatggccaagatgggccagcccatgctgcccatcctgcccccccagctggacagcaatgattctgaaattgaagatgtgaacaccctgcagggcggcggccagcctgtggtgacccccagcgtgcagcccagcctgcacccagcccacccagccctgccccagatgaccagccaggccccccagcccagcgtgacaggcctgcaggcccccagcgctgccctgatgcaggtgagcagcctggacagccacagcgctgtgtctggaaatgcccagagcttccagccctatgccggcatgcaggcctatgcctacccccaggccagcgctgtgaccagccagctgcagcctgtgcggcccctgtacccagcccccctgagccagcccccccacttccagggcagcggggacatggccagcttcctgatgacagaggcccggcagcacaacacagagatccgcatggctgtgtccaaggtggccgacaagatggaccacctgatgaccaaggtggaggagctgcagaagcacagcgctggcaacagcatgctgatccccagcatgtctgtgaccatggagacctccatgatcatgagcaacatccagaggatcatccaggagaatgaaaggctgaagcaggagatcctggagaagagcaacagaattgaggagcagaatgacaagatcagcgagctgattgaaagaaaccagcgctacgtggagcagagcaacctgatgatggagaagaggaacaacagcctgcagacagccacagagaacacccaggcccgggtgctgcatgctgagcaggagaaggccaaggtgacagaggagctggccgccgccacagcccaggtgagccacctgcagctgaagatgacagcccaccagaagaaggagacagagctgcagatgcagctgacagagagcctgaaggagacagacctgctgcggggccagctgaccaaggtgcaggccaagctgtctgagctgcaggagaccagcgagcaggcccagagcaagttcaagtctgagaagcagaacaggaagcagctggagctgaaggtgaccagcctggaggaggagctgacagacctgcgggtggagaaggagagcctggagaagaacctgtctgagaggaagaagaagagcgcccaggagaggagccaggccgaggaggagattgatgagatcaggaagagctaccaggaggagctggacaagctgcggcagctgctgaagaagaccagggtgtccacagaccaggccgctgctgagcagctgagcctggtgcaggccgagctgcagacccagtgggaggccaagtgtgagcacctgctggccagcgccaaggatgagcacctgcagcagtaccaggaggtgtgtgcccagagagatgcctaccagcagaagctggtgcagctgcaggagaagtgcctggccctgcaggcccagatcacagccctgaccaagcagaatgagcagcacatcaaggagctggagaagaacaagagccagatgtctggagtggaggccgccgccagtgaccccagcgagaaggtgaagaagatcatgaaccaggtgttccagagcctgcggcgggagtttgagctggaggagagctacaacggccgcaccatcctgggcaccatcatgaacaccatcaagatggtgaccctgcagctgctgaaccagcaggagcaggagaaggaggagagcagcagcgaggaggaggaggagaaggccgaggagcggccccggcggcccagccaggagcagagcgccagcgccagcagcggccagccccaggcccccctgaaccgggagaggcctgagagccccatggtgcccagcgagcaggtggtggaggaggccgtgcccctgcccccccaggccctgaccaccagccaggacggccacaggaggaagggggacagcgaggccgaggccctgtctgagatcaaggatggcagcctgcccccagagctgagctgcatccccagccaccgggtgctgggcccccccaccagcatccccccagagcccctgggccctgtgtccatggattctgaatgtgaggagagcctggccgccagccccatggccgccaagccagacaaccccagcggcaaggtgtgtgtgcgggaggtggccccagatggccccctgcaggagagcagcacccggctgagcctgaccagtgaccctgaggagggggaccccctggccctgggccctgagagccctggagagccccagcccccccagctgaagaaggatgatgtgaccagcagcacaggcccccacaaggagctgagcagcacagaggccggcagcacagtggccggggccgccctgcggcccagccaccacagccagaggagcagcctgtctggagatgaagaagatgagctgttcaagggggccaccctgaaggccctgcggcccaaggcccagcctgaggaggaggatgaagatgaggtgtccatgaagggccggcccccacccacccccctgtttggagatgatgatgatgatgatgacatcgactggctgggctag

SEQ ID NO: 21482 - DNA, 1653 bp, synthetic construct
  source 1..1653: mol_type = other DNA; note = Synthetic coding sequence
atgaagtgggaggagtatgaggagctgctgcactacgccatcgtgacccccaacatcgagccctgtgccagccagagcagccaccccaagggggagctggtgcctgatgtgcgcatcagcaccatccatgacatcctgcacagccagggcaacaacagcgaggtgcgggagacagccatcgaggtgggcaagggctgtgacttccacatcagcagccacagcaagacagatgagagcagccctgtgctgagccccaggaagcccagccaccctgtgatggacttcttcagcagccacctgctggccgacagcagcagccctgccaccaacagcagccacacagatgcccacgagatcctggtgtctgacttcctggtgtctgatgagaacctgcagaagatggagaatgtgctggacctgtggagcagcggcctgaagaccaacatcatcagcgagctgagcaagtggaggctgaacttcatcgactggcacaggatggagatgaggaaggagaaggagaagcacgccgcccacctgaagcagctgtgcaaccagatcaatgagctgaaggagctgcagaagacctttgagatcagcatcggcaggaaggatgaggtgatcagcagcctgagccacgccatcggcaagcagaaggagaagattgagctgatgaggaccttcttccactggagaattggccacgtgcgggcccggcaggatgtgtatgagggcaagctggccgaccagtactaccagaggaccctgctgaagaaggtgtggaaggtgtggaggtctgtggtgcagaagcagtggaaggatgtggtggagcgggcctgccaggcccgggcagaggaggtgtgcatccagatcagcaatgactatgaggccaaggtggccatgctgagcggggccctggagaatgccaaggccgagatccagaggatgcagcacgagaaggagcactttgaagattccatgaagaaggccttcatgagaggagtgtgtgccctgaacctggaggccatgaccatcttccagaacagaaatgatgctggcatcgacagcaccaacaacaagaaggaggagtatggccctggggtgcagggcaaggagcacagcgcccacctggaccccagcgccccacccatgcccctgcctgtgaccagccccctgctgcccagccccccagctgctgtgggcggggccagcgccacagctgtgcccagcgctgcctccatgaccagcacccgggccgccagcgccagctctgtgcacgtgcctgtgtctgccctgggcgccggcagcgctgccacagctgccagcgaggagatgtatgtgccccgggtggtgaccagcgcccagcagaaggccggccgcaccatcacagcccgcatcaccggccgctgtgactttgccagcaagaaccgcatcagcagcagcctggccatcatgggcgtgagcccccccatgagctctgtggtggtggagaagcaccaccctgtgacagtgcagaccatcccccaggccacagctgccaagtaccccaggaccatccaccctgagagcagcaccagcgccagccgcagcctgggcaccaggtctgcccacacccagagcctgacctctgtgcacagcatcaaggtggtggactag

SEQ ID NO: 21483 - DNA, 402 bp, synthetic construct
  source 1..402: mol_type = other DNA; note = Synthetic coding sequence
atgagccccagccagatgatcatgcccaacgtgatggagatgattgctgccctgggccctggccccagcccctaccccctgcccccacctcctgggggcaccaacagcaatgactacagcagccagggcaacaactaccagggccacggcaactttgacttcccccacggcaaccctgggggcacctccatgaatgacttcatgcacggccccccccagctgagccaccccccagacatgcccaacaacatggccgccctggagaagcccctgagccaccccatgcaggagaccctgctgcctgagctgaccaacccagatgagctgctgagctacctggaccccccagacctgcccagcaacagcaatgatgacctgctgagcctgtttgagaacaactag

SEQ ID NO: 21484 - DNA, 1473 bp, synthetic construct
  source 1..1473: mol_type = other DNA; note = Synthetic coding sequence
atgagcagctgtgtgagcagccagcccagcagcaacagagctgccccccaggatgagctgggcggccggggcagcagcagcagcgagagccagaagccctgtgaggccctgcggggcctgagcagcctgagcatccacctgggcatggagagcttcatcgtggtgacagaatgtgagcccggctgtgctgtggacctgggcctggcccgggaccggcccctggaggctgatggccaggaggtgcccctggacaccagcggcagccaggcccggccccacctgagcggcaggaagctgagcctgcaggagaggagccagggcggcctggccgccggcggcagcctggacatgaatggccgctgcatctgccccagcctgccctacagccctgtgagcagcccccagagcagcccccggctgccccggcggcccaccgtggagagccaccacgtgtccatcaccggcatgcaggactgtgtgcagctgaaccagtacaccctgaaggatgaaattggcaagggcagctatggagtggtgaagctggcctacaatgaaaatgacaacacctactatgccatgaaggtgctgagcaagaagaagctgatccggcaggccggcttcccccggcggcccccaccccggggcaccaggcctgcccctgggggctgcatccagccccggggccccatcgagcaggtgtaccaggagatcgccatcctgaagaagctggaccaccccaacgtggtgaagctggtggaggtgctggatgaccccaatgaagaccacctgtacatggtgtttgagctggtgaaccagggccctgtgatggaggtgcccaccctgaagcccctgtctgaggaccaggcccgcttctacttccaggacctgatcaagggcatcgagtacctgcactaccagaagatcatccaccgggacatcaagcccagcaacctgctggtgggggaggatggccacatcaagattgctgactttggagtgtccaatgagttcaagggcagtgatgccctgctgagcaacacagtgggcaccccagccttcatggcccctgagagcctgtctgagaccaggaagatcttcagcggcaaggccctggatgtgtgggccatgggcgtgaccctgtactgctttgtgtttggccagtgccccttcatggatgagcgcatcatgtgcctgcacagcaagatcaagagccaggccctggagttcccagaccagcctgacattgctgaggacctgaaggacctgatcaccaggatgctggacaagaaccctgagagcagaattgtggtgcctgagatcaagatcctggtgaagaccatgatcaggaagaggagctttggaaacccctttgagggcagcagaagagaggagaggagcctgagcgcccctggcaacctgctgaccaagaagcccaccagagaatgtgagagcctgtctgagctgaagacctag

SEQ ID NO: 21485 - DNA, 1872 bp, synthetic construct
  source 1..1872: mol_type = other DNA; note = Synthetic coding sequence
atggctgctgccactggagaccccggcctgagcaagctgcagtttgcccccttcagcagcgccctggatgtgggcttctggcatgagctgacccagaagaagctgaatgagtaccgcctggatgaggcccccaaggacatcaagggctactactacaatggagacagcgctggcctgcctgcccggctgaccctggagttcagcgcctttgacatgtctgcccccaccccagcccgctgctgcccagccatcggcaccctgtacaacaccaacaccctggagagcttcaagacagctgacaagaagctgctgctggagcaggccgccaatgagatctgggagagcatcaagagcggcacagccctggagaaccctgtgctgctgaacaagttcctgctgctgacctttgccatcgaggccctggagtgtgcctatgacaacctgtgccagacagaaggagtgacagccctgccctacttcctgatcaagtatgatgagaacatggtgctggtgtccctgctgaagcactacagcgacttcttccagggccagaggaccaagatcaccatcggcgtgtatgacccctgcaacctggcccagtacccaggctggcccctgaggaacttcctggtgctggccgcccaccgctggagcagcagcttccagagcgtggaggtggtgtgcttccgggacaggaccatgcagggcgccagagatgtggcccacagcatcatctttgaggtgaagctgcctgagatggccttctccccagactgccccaaggctgtgggctgggagaagaaccagaagggcggcatgggccccaggatggtgaacctgtctgagtgcatggaccccaagaggctggccgagagctctgtggacctgaacctgaagctgatgtgctggaggctggtgcccaccctggacctggacaaggtggtgtctgtgaagtgcctgctgctgggcgccggcaccctgggctgcaatgtggcccggaccctgatgggctggggcgtgcgccacatcacctttgtggacaatgccaagatctcctacagcaaccctgtgcggcagcccctgtatgaatttgaggactgcctgggcggcggcaagcccaaggccctggccgctgctgaccggctgcagaagatcttccctggggtgaatgcccggggcttcaacatgagcatccccatgcctggccaccctgtgaacttcagctctgtgaccctggagcaggccaggagagatgtggagcagctggagcagctgattgagagccatgatgtggtgttcctgctgatggacacccgggagagccgctggctgcctgctgtgattgctgccagcaagaggaagctggtgatcaatgctgccctgggctttgacacctttgtggtgatgagacatggcctgaagaagcccaagcagcagggcgctggggacctgtgccccaaccaccctgtggccagcgctgacctgctgggcagcagcctgtttgccaacatccctggctacaagctgggctgctacttctgcaatgatgtggtggcccctggggacagcacccgggacaggaccctggaccagcagtgcaccgtgtcccggcccggcctggccgtgattgctggggccctggccgtggagctgatggtgtctgtgctgcagcaccctgagggcggctacgccatcgccagcagcagtgatgacaggatgaatgagccccccaccagcctgggcctggtgccccaccagatccggggcttcctgagcagatttgacaacgtgctgcctgtgtccctggcctttgacaagtgcacagcctgcagcagcaagatctgggacatgtctgatgatgagaccatctag

SEQ ID NO: 21486 - DNA, 966 bp, synthetic construct
  source 1..966: mol_type = other DNA; note = Synthetic coding sequence
agaagaaatgtggagctgatcaatgaggaggccgccatgtttgacagcctgctgatggacagctatgtgagcagcaccactggagagagcgtcatcacccgggagatggtggagatgctgttcagtgatgacagcgacctgcagctggccaccacccagaagttcaggaagctgctgagcaaggagcccagcccccccattgatgaggtgatcaacaccccccgggtggtggacagatttgtggagttcctgaagagaaatgaaaactgcaccctgcaggccgtgtgggccctgggcaacattgctggggacagctctgtgtgccgggactatgtgctgaactgcagcatcctgaaccccctgctgaccctgctgaccaagagcacccggctgaccatgaccagaaatgctgtgtgggccctgagcaacctgtgccggggcaagaaccccccacctgagtttgccaaggtgagcccctgcctgcctgtgctgagccggctgctcttcagcagtgacagcgacctgctggctgatgcctgctgggccctgagctacctgagtgatggccccaatgagaagatccaggccgtcatcgacagcggcgtgtgccggcggctggtggagctgctgatgcacaatgactacaaggtggccagccctgccctgcgggctgtgggcaacatcgtgactggagatgacatccagacccaggtgatcctgaactgcagcgccctgccctgcctgctgcacctgctgagcagccccaaggagagcatcaggaaggaggcctgctggaccatcagcaacatcacagctggcaacagagcccagatccaggccgtgattgatgccaacatcttccctgtgctgattgagatcctgcagaaggccgagttccgcaccaggaaggaggccgcctgggccatcaccaatgccaccagcggcggcaccccagagcagatctag

SEQ ID NO: 21487 - DNA, 795 bp, synthetic construct
  source 1..795: mol_type = other DNA; note = Synthetic coding sequence
atgggcggggcccagctggagctgcccagcggggcccggcctggggtgtgtgtgagaagaagcttccgggcccacgccggggaccagcccaggaggcctcctggccccatccctgtgcccggcaccatgaagcaggagagcgctgcccccaacaccccacccaccagccagagccccacccccagcgcccagttccccagaaatgatggagacccccaggccctgtggatcttcggctacggcagcctggtgtggaggccagactttgcctacagcgacagccgggtgggctttgtgcggggctacagccgccgcttctggcagggcgacaccttccaccggggcagtgacaagatgcctggccgggtggtgaccctgctggaggaccacgagggctgcacctggggcgtggcctaccaggtgcagggcgagcaggtgtccaaggccctgaagtacctgaatgtgcgggaggccgtgctgggcggctatgacaccaaggaggtgaccttctacccccaggatgccccagaccagcccctgaaggccctggcctacgtggccaccccccagaaccctggctacctgggccctgcccctgaggaggccatcgccacccagatcctggcctgccggggcttcagcggccacaacctggagtacctgctgcggctggccgacttcatgcagctgtgtggcccccaggcccaggatgagcacctggccgccatcgtggatgctgtgggcaccatgctgccctgcttctgccccacagagcaggccctggccctggtgtag

SEQ ID NO: 21488 - DNA, 747 bp, synthetic construct; identical to SEQ ID NO: 20797
  source 1..747: mol_type = other DNA; note = Synthetic coding sequence

SEQ ID NO: 21489 - DNA, 768 bp, synthetic construct
  source 1..768: mol_type = other DNA; note = Synthetic coding sequence
atgagcagctccatgtggtacatcatgcagagcatccagagcaagtacagcctgtctgagcggctcatccgcaccatcgccgccatccgctccttcccccatgacaacgtggaggacctgatccggggcggcgcagatgtgaactgcacccacggcaccctgaagcccctgcactgtgcctgcatggtgtctgatgctgactgtgtggagctgctgctggagaagggagctgaggtgaatgccctggatggctacaacagaacagccctgcactatgctgctgagaaggatgaggcctgtgtggaggtgctgctggagtatggagccaaccccaatgccctggactacaacaatgacacccccctgtcctgggccgccatgaagggcaacctggagagcgtgtccatcctgctggactatggagctgaggtgcgggtcatcaacctgattggccagacccccatcagccggctggtggccctgctggtgcggggcctgggcacagagaaggaggacagctgctttgagctgctgcacagagctgtgggccactttgagctgaggaagaatggcaccatgccccgggaggtggcccgggacccccagctgtgtgagaagctgactgtgctgtgcagcgcccctggcaccctgaagaccctggcccgctatgctgtgcggcgcagcctgggcctgcagtacctgcctgatgctgtgaagggcctgcccctgcctgccagcctgaaggagtacctgctgctgctggagtag

SEQ ID NO: 21490 - DNA, 585 bp, synthetic construct
  source 1..585: mol_type = other DNA; note = Synthetic coding sequence
gagcctgtgcagccccactggttctactgcaaggaggtggagtacaagcagctgtggatgcccttctctgtgtttgacagcctgaacctggaggagatctacaacagcgtgcagcctgaccctgagagcgtggtgctgggcacagatggcggccgctatgatgtgtacctgtatgaccgcatcaggaaggccgcctactgggaggaggagcctgctgaggtgcggcgctgcacctggttctacaagggggacacagacagccgcttcatcccctacacagaggagttcagcgagaagctggaggtgattgtgcagttccagcccagctctgtgcctgatgagtggggcaccacccaggacggccagacccggccccgggtggtgaagaggggcattgatgacaacctggatgagatcccagatggagagatgccccaggtggaccacctggtgtttgtggtgcatggaattggccctgtgtgtgacctgcgcttccgcagcatcattgaatgtgtggatgacttccgggtggtgtccctgaagctgctgcggacccacttcaagaagagcctggatgatggatag

SEQ ID NO: 21491 - DNA, 981 bp, synthetic construct; identical to SEQ ID NO: 20766
  source 1..981: mol_type = other DNA; note = Synthetic coding sequence

SEQ ID NO: 21492 - DNA, 990 bp, synthetic construct
  source 1..990: mol_type = other DNA; note = Synthetic coding sequence
atggccggggccctggagggggacatcttcatcggccccaaggccgaggagcaccggggcctgctgagcatccgctaccccatggagcacggcatcgtgaaggactggaatgacatggagcgcatctggcagtatgtgtacagcaaggaccagctgcagaccttcagcgaggagcaccctgtgctgctgacagaggcccccctgaaccccaggaagaaccgggagagagctgctgaggtgttctttgagaccttcaacgtgcctgccctcttcatctccatgcaggccgtgctgagcctgtatgccactggaagaaccactggagtggtgctggacagcggagatggagtgacccatgctgtgcccatctatgagggctttgccatgccccacagcatcatgagaattgatattgctggaagagatgtgagccgcttcctgcggctgtacctgaggaaggagggctatgacttccacagcagcagcgagtttgagatcgtgaaggccatcaaggagcgggcctgctacctgagcatcaacccccagaaggatgagaccctggagacagagaaggcccagtactacctgcctgatggcagcaccatcgagatcggccccagccgcttccgggcccctgagctgctcttccggccagacctgattggagaggagagcgagggcatccacgaggtgctggtgtttgccatccagaagagtgacatggacctgcggaggaccctcttcagcaacatcgtgctgagcggcggcagcaccctcttcaagggctttggagaccggctgctgtctgaggtgaagaagctggcccccaaggatgtgaagatccgcatcagcgccccccaggagcggctgtacagcacctggattggaggcagcatcctggccagcctggacaccttcaagaagatgtgggtgtccaagaaggagtatgaggaggatggagcccggagcatccacaggaagaccttctag

SEQ ID NO: 21493 - DNA, 450 bp, synthetic construct
  source 1..450: mol_type = other DNA; note = Synthetic coding sequence
atggagaagacagagctgatccagaaggccaagctggccgagcaggccgagagatatgatgacatggccacctgcatgaaggctgtgacagagcagggcgctgagctgagcaatgaggagaggaacctgctgtctgtggcctacaagaatgtggtgggcggcagaagaagtgcctggagggtcatcagcagcattgagcagaagacagacaccagtgacaagaagctgcagctgatcaaggactaccgggagaaggtggagagcgagctgcggagcatctgcaccaccgtgctggagctgctggacaagtacctgattgccaatgccaccaaccctgagagcaaggtgttctacctgaagatgaagggggactacttccgctacctggccgaggtggcctgtggagatgacaggaagcagaccatcgacaacagccagggcgcctactag

SEQ ID NO: 21494 - DNA, 735 bp, synthetic construct
  source 1..735: mol_type = other DNA; note = Synthetic coding sequence
atgctgagtgacaggaagcgggagctggagcaccggctgagcgccaccctggaggagaatgacctgctgcagggcaccgtggaggagctgcaggacagagtgctgatcctggagcggcagggccatgacaaggacctgcagctgcaccagagccagctggagctgcaggaggtgcggctgagctgccggcagctgcaggtgaaggtggaggagctgacagaggagaggagcctgcagagcagcgctgccaccagcaccagcctgctgtctgaaattgagcagagcatggaggccgaggagctggagcaggagcgggagcaggtgaccctgctgtctgtggagatgacagccctgaaggaggagcgggaccggctgcgggtgaccagcgaggacaaggagcccaaggagcagctgcagaaggccatccgggacagagatgaggccatcgccaagaagaatgctgtggagctggagctggccaagtgcaggatggacatgatgagcctgaacagccagctgctggatgccatccagcagaagctgaacctgagccagcagctggaggcctggcaggatgacatgcacagggtcatcgaccggcagctgatggacacccacctgaaggagaggagccagcctgctgctgccctgtgccggggccacagcgctggaagaggagatgagcccagcattgctgagggcaagaggctcttctccttcttcaggaagatctag

SEQ ID NO: 21495 - DNA, 603 bp, synthetic construct
  source 1..603: mol_type = other DNA; note = Synthetic coding sequence
tgacacatgctgagcaaggtgggcatgtgggactttgacatcttcctgtttgaccggctgaccaacggcaacagcctggtgaccctgctgtgccacctgttcaacacccacggcctcatccaccacttcaagctggacatggtgaccctgcaccgcttcctggtgatggtgcaggaggactaccacagccagaacccctaccacaatgctgtgcatgctgctgatgtgacccaggccatgcactgctacctgaaggagcccaagctggccagcttcctgacccccctggacatcatgctgggcctgctggccgccgccgcccatgatgtggaccaccctggggtgaaccagcccttcctgatcaagaccaaccaccacctggccaacctgtaccaggtgcgggagcccaacctggagcccgccaccgtgtggagcatcgccctgggccctgtgctgaagccagagagctgcccctggaggaagccctgcttccgggtgctggaggtgcagaggaggatgaagcacaacctgtgcccccagaagtttgtgcagacccagatgctgaagatgagcaagatccaggccaacctgatccctgtgtag

SEQ ID NO: 21496 - DNA, 1728 bp, synthetic construct; identical to SEQ ID NO: 18827
  source 1..1728: mol_type = other DNA; note = Synthetic coding sequence

SEQ ID NO: 21497 - DNA, 3036 bp, synthetic construct; identical to SEQ ID NO: 20061
  source 1..3036: mol_type = other DNA; note = Synthetic coding sequence

SEQ ID NO: 21498 - DNA, 3786 bp, synthetic construct
  source 1..3786: mol_type = other DNA; note = Synthetic coding sequence
atggctgctgctgctgccagcggggccggcggcgctgctggagctggcactggaggagctggccctgctggccgcctgctgcccccaccagcccctggcagccctgctgccccagctgctgtgtccccagctgctggccagccccggcccccagccccagccagccggggccccatgcctgccagaattggctactatgaaattgacaggaccatcggcaagggcaactttgctgtggtgaagagggccacccacctggtgaccaaggccaaggtggccatcaagatcatcgacaagacccagctggatgaggagaacctgaagaagatcttccgggaggtgcagatcatgaagatgctgtgccacccccacatcatccggctgtaccaggtgatggagacagagaggatgatctacctggtgacagaatatgccagcggcggggagatctttgaccacctggtggcccacggccgcatggccgagaaggaggcccggaggaagttcaagcagatcgtgacagctgtgtacttctgccactgcaggaacatcgtgcaccgggacctgaaggccgagaacctgctgctggatgccaacctgaacatcaagattgctgactttggcttcagcaacctcttcaccccaggccagctgctgaagacctggtgtggcagccccccctatgctgcccctgagctgtttgagggcaaggagtatgatggccccaaggtggacatctggagcctgggcgtggtgctgtatgtgctggtgtgtggggccctgccctttgatggcagcaccctgcagaacctgcgggcccgggtgctgagcggcaagttccgcatccccttcttcatgagcacagaatgtgagcacctgatccgccacatgctggtgctggaccccaacaagaggctgtccatggagcagatctgcaagcacaagtggatgaagctgggagatgctgaccccaactttgaccggctgattgctgagtgccagcagctgaaggaggagcggcaggtggaccccctgaatgaagatgtgctgctggccatggaggacatgggcctggacaaggagcagaccctgcaggccgagcaggccggcacagccatgaacatctctgtgccccaggtgcagctgatcaaccctgagaaccagatcgtggagccagatggcaccctgaacctggacagtgatgaaggagaggagcccagccctgaggccctggtgcgctacctgtccatgaggaggcacacagtgggcgtggccgaccccaggacagaggtgatggaggacctgcagaagctgctgcccggcttccctggggtgaacccccaggcccccttcctgcaggtggccccaaatgtgaacttcatgcacaacctgctgcccatgcagaacctgcagcccaccggccagctggagtacaaggagcagagcctgctgcagccccccaccctgcagctgctgaatggcatgggccccctgggccggcgggccagtgatggaggagccaacatccagctgcacgcccagcagctgctgaagaggccccggggccccagccccctggtgaccatgaccccagctgtgcctgctgtgacccctgtggatgaggagagcagtgatggagagccagaccaggaggccgtgcagcgctacctggccaacagaagcaagaggcacaccctggccatgaccaaccccacagctgagatccccccagacctgcagaggcagctgggccagcagcccttccgcagccgggtgtggccaccccacctggtgcctgaccagcacaggagcacctacaaggacagcaacaccctgcacctgcccacagagcgcttcagccctgtgcggcgcttcagtgatggagctgccagcatccaggccttcaaggcccacctggagaagatgggcaacaacagcagcatcaagcagctgcagcaggagtgtgagcagctgcagaagatgtatggaggccagattgatgagaggaccctggagaagacccagcagcagcacatgctgtaccagcaggagcagcaccaccagatcctgcagcagcagatccaggacagcatctgccccccccagcccagcccccccctgcaggccgcctgtgagaaccagcctgccctgctgacccaccagctgcagaggctgcgcatccagcccagcagccccccacccaaccaccccaacaaccacctgttccggcagcccagcaacagccccccacccatgagcagcgccatgatccagccccacggggccgccagcagcagccagttccagggcctgcccagccgcagcgccatcttccagcagcagcctgagaactgcagcagcccccccaacgtggccctgacctgcctgggcatgcagcagcctgcccagagccagcaggtgaccatccaggtgcaggagcctgtggacatgctgagcaacatgcctggaacagctgctggcagcagcggccggggcatcagcatcagccccagcgctggccagatgcagatgcagcacaggaccaacctgatggccaccctgtcctatggccaccggcccctgagcaagcagctgtctgctgacagcgctgaggcccacagcgcccaccagcagcccccccactacaccaccagcgccctgcagcaggccctgctgagccccaccccaccagactacaccaggcaccagcaggtgccccacatcctgcagggcctgctgagccccaggcacagcctgaccggccacagcgacatccggctgcccccaacagaatttgcccagctgatcaagaggcagcagcagcagaggcagcagcagcagcagcagcagcagcagcaggagtaccaggagctgttccgccacatgaaccagggagatgctggcagcctggcccccagcctgggcggccagagcatgacagagcggcaggccctgagctaccagaatgctgacagctaccaccaccacaccagcccccagcacctgctgcagatccgggcccaggagtgtgtgtcccaggccagcagccccaccccacctcatggctacgcccaccagcctgccctgatgcacagcgagagcatggaggaggactgcagctgtgagggcgccaaggatggcttccaggacagcaagagcagcagcaccctgaccaagggctgccacgacagccccctgctgctgagcactggaggccctggggaccctgagagcctgctgggcaccgtgtcccatgcccaggagctgggcatccacccctacggccaccagcccacagctgccttcagcaagaacaaggtgcccagccgggagcccgtcatcggcaactgcatggacaggagcagccctggccaggccgtggagctgcctgaccacaacggcctgggctacccagcccggcccagcgtgcatgagcaccaccggccccgggccctgcagaggcaccacaccatccagaacagtgatgatgcctacgtgcagctggacaacctgcccggcatgagcctggtggccggcaaggccctgagcagcgccaggatgtctgatgctgtgctgagccagagcagcctgatgggcagccagcagttccaggatggagaaaatgaggagtgtggggccagcctgggcggccacgagcacccagacctgagtgatggcagccagcacctgaacagcagctgctaccccagcacctgcatcacagacatcctgctgagctacaagcaccctgaggtgtccttctccatggagcaggccggcgtgtag

SEQ ID NO: 21499 - DNA, 519 bp, synthetic construct
  source 1..519: mol_type = other DNA; note = Synthetic coding sequence
atgagcagcaatgaatgcttcaagtgtggccgcagcggccactgggcccgggagtgccccactggaggcggccggggccggggcatgaggagccggggccggggcttccagtttgtgagcagcagcctgcctgacatctgctaccgctgtggggagagcggccacctggccaaggactgtgacctgcaggaggatgtggaggcctgctacaactgtggccggggcggccacatcgccaaggactgcaaggagcccaagcgggagcgggagcagtgctgctacaactgtgggaagccaggccacctggcccgggactgtgaccatgctgatgagcagaagtgctacagctgtggggagtttggccacatccagaaggactgcaccaaggtgaagtgctaccgctgtggggagaccggccacgtggccatcaactgcagcaagaccagcgaggtgaactgctaccgctgtggggagagcggccacctggccagagaatgtaccatcgaggccacagcctag

SEQ ID NO: 21500 - DNA, 471 bp, synthetic construct
  source 1..471: mol_type = other DNA; note = Synthetic coding sequence
atgctggccgagaagctgcccaacctgacccacctgaacctgagcggcaacaagctgaaggacatcagcaccctggagcccctgaagaagctggagtgcctgaagagcctggacctcttcaactgtgaggtgaccaacctgaatgactaccgggagagcgtcttcaagctgctgccccagctgacctacctggatggctatgaccgggaggaccaggaggccccagacagtgatgctgaggtggatggagtggatgaggaggaggaggatgaggagggggaggatgaagaagatgaagatgatgaagatggagaggaggaggagtttgatgaggaggatgatgaagatgaagatgtggagggagatgaagatgatgatgaggtgtctgaggaggaggaggagtttggcctggatgaggaggatgaagatgaagatgaagatgaggaggaggaggagggcggcaaaggatag

SEQ ID NO: 21501 - DNA, 516 bp, synthetic construct; identical to SEQ ID NO: 21041
  source 1..516: mol_type = other DNA; note = Synthetic coding sequence

SEQ ID NO: 21502 - DNA, 111 bp, synthetic construct
  source 1..111: mol_type = other DNA; note = Synthetic coding sequence
atgattgagaagatgcagggcagcaggatggatgagcagcgctgcagcttccccccacccctgaagacagaggaggactacatcccctaccccagcgtgcatgaggtgtag

SEQ ID NO: 21503 - DNA, 639 bp, synthetic construct
  source 1..639: mol_type = other DNA; note = Synthetic coding sequence
atgagcagcaagggcagcagcacagatggccgcacagacctggccaacggcagcctgagcagcagccctgaggagatgtctggagctgaggagggccgggagaccagcagcggcatcgaggtggaggccagtgacctgagcctgagcctgactggagatgatggcggccccaacagaaccagcacagagagccggggcacagacacagagagcagcggggaggacaaggacagcgacagcatggaggacaccggccactacagcatcaatgatgagaacagagtgcatgacagaagtgaggaggaggaggaggaggaggaggaggaggaggaggagcagccccggcggcgggtgcagaggaagagggccaacagagaccaggacagcagtgatgatgagcgggccctggaggactgggtgagcagcgagaccagcgccctgccccggccccgctggcaggccctgcctgccctgcgggagcgggagctgggcagcagcgccaggtttgtgtatgaggcctgtggggcccgggtgtttgtgcagcgcttccggctgcagcacggcctggagggccacacaggctgtgtgaacaccctgcacttcaaccagaggggcacctggctggccagcggcagctag

SEQ ID NO: 21504 - DNA, 726 bp, synthetic construct
  source 1..726: mol_type = other DNA; note = Synthetic coding sequence
atgacctctgtgaccaggtctgagatcattgatgagaagggccctgtgatgagcaagacccatgaccaccagctggagagcagcctgagccctgtggaggtgtttgccaagaccagcgccagcctggagatgaaccagggcgtgtctgaggagcgcatccacctgggcagcagccccaagaagggcggcaactgtgacctgagccaccaggagcggctgcagagcaagagcctgcacctgagcccccaggagcagagcgccagctaccaggaccggcggcagagctggaggcgggcctccatgaaggagaccaacagaaggaagagcctgcaccccatccaccagggcatcacagagctgagccgcagcatctctgtggacctggccgagagcaagaggctgggctgcctgctgctgagcagcttccagttcagcatccagaagctggagcccttcctgcgggacaccaagggcttcagcctggagagcttccgggccaaggccagcagcctgtctgaggagctgaagcactttgctgatggcctggagacagatggcaccctgcagaagtgctttgaggacagcaatggcaaggccagtgacttcagcctggaggcctctgtggccgagatgaaggagtacatcaccaagttcagcctggagcggcagacctgggaccagctgctgctgcactaccagcaggaggccaaggagatcctgtcctag

SEQ ID NO: 21505 - DNA, 1188 bp, synthetic construct; identical to SEQ ID NO: 20054
  source 1..1188: mol_type = other DNA; note = Synthetic coding sequence

SEQ ID NO: 21506 - DNA, 1887 bp, synthetic construct
  source 1..1887: mol_type = other DNA; note = Synthetic coding sequence
atgtctgacaagagtgacctgaaggccgagctggagaggaagaagcagaggctggcccagatccgggaggagaagaagaggaaggaggaggagaggaagaagaaggaggccgacatgcagcagaagaaggagcctgtgcaggatgacagcgacctggacaggaagaggcgggagacagaggccctgctgcagagcatcggcatcagccctgagccccccctggtgcccacccccatgagccccagcagcaagtctgtgtccacccccagcgaggccggcagccaggacagcggggacctgggccccctgaccaggaccctgcagtgggacacagaccccagcgtgctgcagctgcagagcgacagcgagctgggccggcggctgcacaagctgggcgtgtccaaggtgacccaggtggacttcctgccccgggaggtggtgtcctacagcaaggagacccagacccccctggccacccaccagagcgaggaggatgaagaagatgaggagatggtggagagcaaggtgggccaggacagcgagctggagaaccaggacaagaagcaggaggtgaaggaggccccaccccgggagctgacagaggaggagaagcagcagatcctgcacagcgaggagttcctgatcttctttgacaggaccatccgggtcatcgagcgggccctggccgaggacagcgacatcttctttgactacagcggccgggagctggaggagaaggatggagatgtgcaggccggggccaacctgtccttcaaccggcagttctatgatgagcactggagcaagcaccgggtggtgacctgcatggactggagcctgcagtacccagagctgatggtggccagctacaacaacaatgaagatgcccctcatgagccagatggagtggccctggtgtggaacatgaagttcaagaagaccaccccagaatatgtgttccactgccagagctctgtgatgtctgtgtgctttgcccgcttccaccccaacctggtggtgggcggcacctacagcggccagatcgtgctgtgggacaacagaagccacaggaggacccctgtgcagaggacccccctgtctgctgctgcccacacccaccctgtgtactgtgtgaatgtggtgggcacccagaatgcccacaacctgatcaccgtgtccacagatggcaagatgtgctcctggagcctggacatgctgagcaccccccaggagagcatggagctggtgtacaacaagagcaagcctgtggccgtgacaggcatggccttccccactggagatgtgaacaactttgtggtgggcagcgaggagggcaccgtgtacacagcctgcagacatggcagcaaggccggcattggagaggtgtttgagggccaccagggccctgtgacaggcatcaactgccacatggctgtgggccccatcgacttcagccacctgtttgtgaccagcagctttgactggacagtgaagctgtggaccaccaagcacaacaagcccctgtacagctttgaggacaatgctgactatgtgtatgatgtgatgtggagccctgtgcacccagccctgtttgcctgtgtggatggcatgggccgcctggacctgtggaacctgaacaatgacacagaggtgcccacagcctctgtggccatcgagggcgccagcgccctgaacagagtgcgctgggcccaggccggcaaggaggtggccgtgggggacagcgagggccgcatctgggtgtatgatgtgggggagctggccgtgccccacaatgatgagtggaccaggtttgcccggaccctggtggagatccgggccaacagagctgacagcgaggaggagggcaccgtggagctgagcgcctag

SEQ ID NO: 21507 - DNA, 1644 bp, synthetic construct; identical to SEQ ID NO: 19587
  source 1..1644: mol_type = other DNA; note = Synthetic coding sequence

SEQ ID NO: 21508 - DNA, 747 bp, synthetic construct
  source 1..747: mol_type = other DNA; note = Synthetic coding sequence
atggccttcagcggccgggcccggccctgcatcatcccagaaaatgaggagatccccagggctgccctgaacacagtgcatgaggccaacggcacagaagatgaaagagctgtgtccaagctgcagaggaggcacagtgatgtgaaggtgtacaaggagttctgtgacttctacgccaagttcaacatggccaatgccctggccagcgccacctgtgagcgctgcaagggcggctttgccccagctgagaccatcgtgaacagcaatggagagctgtaccacgagcagtgctttgtgtgtgcccagtgcttccagcagtttcctgagggcctcttctatgaatttgagggcaggaagtactgtgaacatgacttccagatgctgtttgccccctgctgccaccagtgtggggagttcatcatcggccgggtcatcaaggccatgaacaacagctggcaccctgagtgcttccgctgtgacctgtgccaggaggtgctggccgacattggatttgtgaagaatgccggccgccacctgtgccggccctgccacaaccgggagaaggcccggggcctgggcaagtacatctgccagaagtgccacgccatcattgatgagcagcccctcatcttcaagaatgacccctaccacccagaccacttcaactgtgccaactgtggccaggagggcagtgactgccgctgcaccggggctgagcggggggccatcctgcctgccatgccctag

SEQ ID NO: 21509 - DNA, 621 bp, synthetic construct
  source 1..621: mol_type = other DNA; note = Synthetic coding sequence
atggagagcaacttcaaccaggagggcgtgccccggcccagctatgtgttttctgctgaccccatcgcccggcccagcgagatcaactttgatggcatcaagctggacctgagccatgagttcagcctggtggcccccaacacagaggccaacagctttgagagcaaggactacctgcaggtgtgcctgcgcatccggcccttcacccagagcgagaaggagctggagagcgagggctgtgtgcacatcctggacagccagacagtggtgctgaaggagccccagtgcatcctgggccgcctgtctgagaagagcagcggccagatggcccagaagttctccttcagcaaggtgtttggacctgccaccacccagaaggagttcttccagggctgcatcatgcagcctgtgaaggacctgctgaagggccagagccgcctcatcttcacctacggcctgaccaacagcggcaagacctacaccttccagggcacagaagaaaatattggcatcctgcccaggaccctgaatgtgctgtttgacagcctgcaggagcggctgtacaccaagatgaacctgaagccccacaggagccgggagtacctgcggctgagcagctag

SEQ ID NO: 21510 - DNA, 990 bp, synthetic construct
  source 1..990: mol_type = other DNA; note = Synthetic coding sequence
atggaggtggccgagcccagcagccccacagaggaggaggaggaggaggaggagcacagcgctgagccccggcccaggaccaggagcaaccctgagggcgcagaagatagagctgtgggcgcccaggcctctgtgggcagccgctctgagggggagggggaggccgccagcgcagatgatggcagcctgaacaccagcggggccggccccaagtcctggcaggtgcccccaccagcccctgaggtgcagatccgcaccccccgggtgaactgcccagagaaggtgatcatctgcctggacctgtctgaggagatgagcctgcccaagctggagagcttcaacggcagcaagaccaatgccctgaatgtgtcccagaagatgattgagatgtttgtgaggaccaagcacaagattgacaagagccatgaatttgccctggtggtggtgaatgatgacacagcctggctgagcggcctgaccagtgacccccgggagctgtgcagctgcctgtatgacctggagacagccagctgcagcaccttcaacatcagcggggccagccctgcccggcagcagaagacagagctgcctgtgacagaaaatgtgcagaccatccccccaccctacgtggtgaggaccatcctggtgtacagccggcccccctgccagccccagttcagcctgacagagcccatgaagaagatgttccagtgcccctacttcttctttgatgtggtgtacatccacaacggcacagaggagaaggaggaggagatgtcctggaaggacatgtttgccttcatgggcagcctggacaccaagggcaccagctacaagtatgaggtggccctggccggccctgccctggagctgcacaactgcatggccaagctgctggcccaccccctgcagaggccctgccagagccacgccagctacagcctgctggaggaggaggatgaggccatcgaggtggaggccaccgtgtag

SEQ ID NO: 21511 - DNA, 1620 bp, synthetic construct; identical to SEQ ID NO: 19050
  source 1..1620: mol_type = other DNA; note = Synthetic coding sequence

SEQ ID NO: 21512 - DNA, 3558 bp, synthetic construct
  source 1..3558: mol_type = other DNA; note = Synthetic coding sequence
atgtgtgaggtgatgcccaccatcaatgaaggagaccggctgggccccccccacggggctgatgctgatgccaactttgagcagctgatggtgaacatgctggatgagcgggagaagctgctggagagcctgcgggagagccaggagaccctggccgccacccagagccggctgcaggatgccatccacgagcgggaccagctgcagaggcacctgaacagcgccctgccccaggagtttgccaccctgacccgggagctgtccatgtgccgggagcagctgctggagcgggaggaggagatcagcgagctgaaggccgagaggaacaacacccggctgctgctggagcacctggagtgcctggtgtccagacatgagaggagcctgaggatgacagtggtgaagaggcaggcccagagccccagcggcgtgagcagcgaggtggaggtgctgaaggccctgaagagcctgtttgagcaccacaaggccctggatgagaaggtgcgggagcggctgcgggccgccctggagcgggtgaccaccctggaggagcagctggccggggcccaccagcaggtgtctgccctgcagcagggcgctggggtgagagatggagctgctgaggaggagggcaccgtggagctgggccccaagaggctgtggaaggaggacaccggccgggtggaggagctgcaggagctgctggagaagcagaactttgagctgagccaggcccgggagcggctggtgaccctgaccaccaccgtgacagagctggaggaggacctgggcacagcccggcgggacctgatcaagtctgaggagctgagcagcaagcaccagagggacctgcgggaggccctggcccagaaggaggacatggaggagcgcatcaccaccctggagaagcgctacctggccgcccagcgggaggccaccagcatccatgacctgaatgacaagctggagaatgagctggccaacaaggagagcctgcaccggcagtgtgaggagaaggcccggcacctgcaggagctgctggaggtggccgagcagaagctgcagcagaccatgaggaaggccgagaccctgcctgaggtggaggccgagctggcccagagaattgctgccctgaccaaggccgaggagagacatggcaacatcgaggagcacctgcggcagctggagggccagctggaggagaagaaccaggagctggccaggacagctgtgcaggtgcggcagcgggagaagatgaatgaagaccacaacaagaggctgagtgacacagtggaccggctgctgtctgagagcaatgaaaggctgcagctgcacctgaaggagaggatggccgccctggaggagaagaacaccctcatccaggagctggagagcagccagaggcagatcgaggagcagcaccaccacaagggccgcctgtctgaggagattgagaagctgcggcaggaggtggaccagctgaagggccggggcggcccctttgtggatggagtgcacagccgcagccacatgggcagcgctgctgatgtgcgcttcagcctgggcaccaccacccacgcccctcctggggtgcaccggcgctacagcgccctgcgggaggagagcgccaagctggccctgcccctgactgtgaccctgcggagccccacctggatgaggatgagccagggcgtgtgctgcaacctggagtaccacagcagcggcaccctgtgtggcagcagcggccccctgcctgtgcctgagatgatccaggaggagaaggagagcacagagctgcgggcagaggagattgagaccagggtgaccagcggctccatggaggccctgaacctgaagcagctgaggaagaggggcagcatccccaccagcctgacagccctgagcctggccagcgccagcccccccctgagcggccgcagcacccccaagctgaccagccgctctgctgcccaggacctggacaggatgggcgtgatgaccctgcccagcgacctgaggaagcacaggaggaagctgctgagccctgtgtcccgggaggagaaccgggaggacaaggccaccatcaagtgtgagaccagcccccccagcagccccaggaccctgcggctggagaagctgggccacccagccctgagccaggaggagggcaagagcgccctggaggaccagggcagcaaccccagcagcagcaacagcagccaggacagcctgcacaagggggccaagaggaagggcatcaagagcagcatcggccgcctgtttgggaagaaggagaagggccgcctcatccagctgagcagagatggagccaccggccacgtgctgctgacagacagcgagttctccatgcaggagcccatggtgcctgccaagctgggcacccaggccgagaaggaccggcggctgaagaagaagcaccagctgctggaggatgcccggaggaagggcatgccctttgcccagtgggatggccccaccgtggtgtcctggctggagctgtgggtgggcatgcctgcctggtacgtggccgcctgccgggccaacgtgaagagcggggccatcatgtctgccctgagtgacacagagatccagcgggagatcggcatcagcaatgccctgcaccggctgaagctgcggctggccatccaggagatggtgtccctgaccagccccagcgccccacccaccagcaggaccagcagtggaaatgtgtgggtgacccatgaggagatggagaccctggagaccagcaccaagacagattctgaggagggctcctgggcccagaccctggcctacggggacatgaaccacgagtggattggaaatgagtggctgcccagcctgggcctgccccagtaccgcagctacttcatggagtgcctggtggatgccaggatgctggaccacctgaccaagaaggacctgcgggtgcacctgaagatggtggacagcttccacaggaccagcctgcagtatggcatcatgtgcctgaagaggctgaactatgacaggaaggagctggagaagaggcgggaggagagccagcacgagatcaaggatgtgctggtgtggaccaatgaccaggtggtgcactgggtgcagagcatcggcctgcgggactatgccggcaacctgcacgagagcggcgtgcatggagccctgctggccctggatgaaaattttgaccacaacaccctggccctgatcctgcagatccccacccagaacacccaggcccggcaggtgatggagcgggagttcaacaacctgctggccctgggcacagacaggaagctggatgatggagatgacaaggtgttccggcgggcccccagctggaggaagcgcttccggccccgggagcaccacggccggggcggcatgctgagcgccagcgctgagaccctgcctgctggcttccgggtgtccaccctgggcaccctgcagcccccaccagccccacccaagaagatcatgcctgaggcccacagccactacctgtatggccacatgctgagcgccttccgggactag

SEQ ID NO: 21513 - DNA, 1383 bp, synthetic construct
  source 1..1383: mol_type = other DNA; note = Synthetic coding sequence
atggagatctgtgacatcatcaatgaaacagaggagggccccaaggatgccctgcgggctgtgaagaagagaattgtgggcaacaagaacttccacgaggtgatgctggccctgactgtgctggagacctgtgtgaagaactgtggccaccgcttccacgtgctggtggccagccaggactttgtggagagcgtgctggtgaggaccatcctgcccaagaacaacccccccaccatcgtgcatgacaaggtgctgaacctgatccagagctgggcagatgccttccgcagcagcccagacctgactggagtggtgaccatctatgaggacctgcggaggaagggcctggagttccccatgacagacctggacatgctgagccccatccacaccccccagaggacagtgttcaacagcgagacccagagcggccaggacagcgtgggcacagacagcagccagcaggaggacagcggccagcacgccgcccccctgcctgccccacccatcctgagcggggacacccccatcgcccccaccccagagcagatcggcaagctgcggtctgagctggagatggtgtctggaaatgtgcgggtgatgtctgagatgctgacagagctggtgcccacccaggccgagcctgctgacctggagctgctgcaggagctgaacagaacctgccgggccatgcagcagagggtgctggagctgatcccccagatcgccaatgagcagctgacagaggagctgctgattgtgaatgacaacctgaacaacgtgttcctgcggcatgaaagatttgagcgcttcagaacaggccagaccaccaaggcccccagcgaggccgagcctgctgctgacctgattgacatgggccctgaccctgctgccactggaaacctgagcagccagctggccggcatgaacctgggcagcagctctgtgcgggccggcctgcagagcctggaggccagcggccgcctggaggatgaatttgacatgtttgccctgacccggggcagcagcctggccgaccagaggaaggaggtgaagtatgaggccccccaggccacagatggcctggccggggccctggatgcccggcagcagagcactggagccatccctgtgacccaggcctgcctgatggaggacatcgagcagtggctgagcacagatgtgggcaatgatgctgaggagcccaagggcgtgaccagcgagggcaagtttgacaagttcctggaggagcgggccaaggctgctgaccggctgcccaacctgagcagccccagcgctgagggccccccaggccccccatctggccctgcccccaggaagaagacccaggagaaggatgatgacatgctgtttgccctgtag

SEQ ID NO: 21514 - DNA, 180 bp, synthetic construct
  source 1..180: mol_type = other DNA; note = Synthetic coding sequence
atgatgatgaagatgatgatgaggatgaagatcaggaagatccgctaccactgccagaggaagcagaacctgatccacaacaatggaaatggcctgggctctgtgcctgtggagaagctggtgctgcaccccagccccatccagaacccccagcagagcgctgtggtgtcctgtgagtag

SEQ ID NO: 21515 - DNA, 537 bp, synthetic construct
  source 1..537: mol_type = other DNA; note = Synthetic coding sequence
atgctgggcctggatgcctgtgagctgggcgcccagctgctggagctgctgcggctggccctgtgtgcccgggtgctgctggccgacaaggagggcggccccccagctgtggatgaggtgctggatgaggccgtgcctgagtaccgggcccctggcaggaagagcctgctggagatccggcagctggaccctgatgacaggagcctggccaagtacaagagggtgctgctgggccccctgcccccagctgtggaccccagcctgcccaacgtgcaggtgacccggctgaccctgctgtctgagcaggcccctggccctgtggtgatggacctgaccggggacctggccgtgctgaaggaccaggtgtttgtgctgaaggagggcgtggactacagagtgcaccgggagatcgtgtctggcctgaagtgcctgcaccacacctacagaagaggcctgcgggtggacaagacagtgtacatggtgggcagctatggccccagcgcccaggagtatgaatttgtgacccctgtggagtag

SEQ ID NO: 21516 - DNA, 1119 bp, synthetic construct
  source 1..1119: mol_type = other DNA; note = Synthetic coding sequence
atggattctgtgcgcagcggccccttcggccaggtgttccggccagacaacttcatcttcggccagtgtggggccggcaacaactgggccaagggccactacacagaaggagctgagctgatggagagcgtgatggatgtggtgaggaaggaggccgagagctgtgactgcctgcagggcttccagctgacccacagcctgggcggcggcactggaagtggcatgggcaccctgctgctgagcaagatccgggaggagtacccagaccgcatcatcaacaccttcagcatcctgcccagccccaaggtgtctgacacagtggtggagccctacaatgccaccctgtctgtgcaccagctgattgaaaatgctgatgagaccttctgcatcgacaatgaggccctgtatgacatctgcagcaagaccctgaagctgcccacccccacctacggggacctgaaccacctggtgtctgccaccatgtctggagtgaccacctgcctgcgcttccctggccagctgaatgctgacctgaggaagctggccgtgaacatggtgcccttcccccggctgcacttcttcatgcctggctttgcccccctgaccagccggggcagccagcagtaccgggccctgactgtggccgagctgacccagcagatgtttgatgccaagaacatgatggccgcctgtgaccccaggcatggccgctacctgacagctgctgccatcttccggggccgcatgcccatgagggaggtggatgagcagatgttcaacatccaggacaagaacagcagctactttgctgactggctgcccaacaacgtgaagacagctgtgtgtgacatccccccccggggcctgaagatgtctgccaccttcatcggcaacaacacagccatccaggagctgttcaagagggtgtctgagcagttcaccgccatgttccggaggaaggccttcctgcactggtacacaggagagggcatggatgagatggagttcacagaagctgagagcaacatgaatgacctggtgtctgagtaccagcagtaccaggatgccacagctgaggaggaggaggatgaggagtatgcagaggaggaggtggcctag

SEQ ID NO: 21517 - DNA, 576 bp, synthetic construct
  source 1..576: mol_type = other DNA; note = Synthetic coding sequence
atggctgctgccaaggacacccatgaagatcatgacaccagcacagagaacacagatgagagcaaccacgacccccagtttgagcccatcgtgtccctgcctgagcaggagatcaagaccctggaggaggatgaggaggagctgttcaagatgagggccaagctgttccgctttgcctctgaaaatgacctgcctgagtggaaggagcggggcactggagatgtgaagctgctgaagcacaagaccctgaagatctgtgccaaccactacatcacccccatgatggagctgaagcccaatgccggcagtgaccgggcctgggtgtggaacacccatgctgactttgctgatgagtgccccaagccagagctgctggccatccgcttcctgaatgctgagagcgagccccgggccctgggcacctgcctgacctggggcagccctgcctggcagagaggaggcctgtgtgccaccaatgctgtggccttctggggcgagggcgctgtgactggaaaatgtgtggtgtgggccgccctgccctgctgcctgggcgccatgccccggctgaagccctag

SEQ ID NO: 21518 - DNA, 369 bp, synthetic construct; identical to SEQ ID NO: 21112
  source 1..369: mol_type = other DNA; note = Synthetic coding sequence

SEQ ID NO: 21519 - DNA, 1383 bp, synthetic construct
  source 1..1383: mol_type = other DNA; note = Synthetic coding sequence
atggccagcctgctgcagagcgacagagtgctgtacctggtgcagggcgagaagaaggtgcgggcccccctgagccagctgtacttctgccgctactgcagcgagctgcggagcctggagtgtgtgtcccatgaggtggacagccactactgccccagctgcctggagaacatgcccagcgctgaggccaagctgaagaagaacagatgtgccaactgctttgactgccccggctgcatgcacaccctgagcacccgggccaccagcatcagcacccagctgcctgatgatcctgccaagaccaccatgaagaaggcctactacctggcctgtggcttctgccgctggaccagcagagatgtgggcatggctgacaagtctgtggccagcggcggctggcaggagcctgagaacccccacacccagaggatgaacaagctgattgagtactaccagcagctggcccagaaggagaaggtggagcgggacaggaagaagctggccaggagaagaaactacatgcccctggccttcagtgacaagtatggcctgggcacccggctgcagaggcccagggctggggccagcatcagcaccctggccggcctgagcctgaaggagggggaggaccagaaggagatcaagattgagcccgcccaggccgtggatgaggtggagcccctgcctgaggactactacaccaggcctgtgaacctgacagaggtgaccaccctgcagcagaggctgctgcagcctgacttccagcctgtgtgtgccagccagctgtaccccaggcacaagcacctgctgatcaagaggagcctgcgctgcaggaaatgtgagcacaacctgagcaagccagagttcaaccccaccagcatcaagttcaagatccagctggtggccgtgaactacatccctgaggtgcgcatcatgagcatccccaacctgcgctacatgaaggagagccaggtgctgctgaccctgaccaaccctgtggagaacctgacccacgtgaccctgtttgaatgtgaggagggggaccctgatgacatcaacagcacagccaaggtggtggtgccccccaaggagctggtgctggccggcaaggatgctgctgctgaatatgatgagctggccgagccccaggacttccaggatgatcctgacatcatcgccttcaggaaggccaacaaggtgggcatcttcatcaaggtgaccccccagcgggaggagggggaggtgacagtgtgcttcaagatgaagcatgacttcaagaacctggccgcccccatccggcccatcgaggagagtgaccagggcacagaggtgatctggctgacccagcacgtggagctgagcctgggccccctgctgccctag

SEQ ID NO: 21520 - DNA, 3336 bp, synthetic construct
  source 1..3336: mol_type = other DNA; note = Synthetic coding sequence
atggagatggatgccccccggccccccagcctggccgtgcctggggccgccagccggcccggccgcctgctggatggcggccacggccggcagcaggtgcaggccctgagcagccagctgctggaggtgatcccagacagcatgaggaagcaggaggtgaggacaggccgggaggccggccagggccatggaacaggcagccctgctgagcaggtgaaggccctgatggacctgctggccggcaagggcagccagggcagccaggccccccaggccctggacaggaccccagatgcccccctgggcccctgcagcaatgacagccgcatccagaggcacaggaaggccctgctgagcaaggtgggcggcggccctgagctgggcggcccctggcaccggctggccagcctgctgctggtggagggcctgacagacctgcagctgcgggagcatgacttcacccaggtggaggccacccggggcggcggccacccagccaggacagtggccctggacaggctcttcctgcccctgagccgggtgtctgtgcccccccgggtgtccatcaccatcggcgtggccggcatgggcaagaccaccctggtgcgccactttgtgcggctgtgggcccacggccaggtgggcaaggacttcagcctggtgctgcccctgaccttccgggacctgaacacccatgagaagctgtgtgccgacaggctcatctgcagcgtcttcccccacgtgggggagcccagcctggccgtggccgtgcctgcccgggccctgctgatcctggatggcctggatgagtgcaggacccccctggacttcagcaacacagtggcctgcacagaccccaagaaggagatccctgtggaccacctgatcaccaacatcatccggggcaacctcttccctgaggtgtccatctggatcaccagccggcccagcgccagcggccagatccctgggggcctggtggacaggatgacagagatccggggcttcaatgaggaggagatcaaggtgtgcctggagcagatgtttcctgaggaccaggccctgctgggctggatgctgagccaggtgcaggccgaccgggccctgtacctgatgtgcaccgtgcctgccttctgccgcctgaccggcatggccctgggccacctgtggaggagcaggacaggcccccaggatgctgagctgtggccacccaggaccctgtgtgagctgtacagctggtacttcaggatggccctgagcggggagggccaggagaagggcaaggccagccccagaattgagcaggtggcccacggcggcaggaagatggtgggcaccctgggccgcctggccttccacggcctgctgaagaagaagtatgtgttctatgagcaggacatgaaggccttcggcgtggacctggccctgctgcagggcgccccctgcagctgcttcctgcagcgggaggagaccctggccagctctgtggcctactgcttcacccacctgagcctgcaggagtttgtggccgccgcctactactatggagccagcagaagagccatctttgacctcttcacagaaagtggagtgtcctggccccggctgggcttcctgacccacttccgctctgctgcccagagggccatgcaggctgaagatggccgcctggatgtgttcctgcgcttcctgagcggcctgctgagcccccgggtgaatgccctgctggccggcagcctgctggcccagggcgagcaccaggcctaccgcacccaggtggccgagctgctgcagggctgcctgcggccagatgctgctgtgtgtgcccgggccatcaacgtgctgcactgcctgcacgagctgcagcacacagagctggcccggtctgtggaggaggccatggagagcggggccctggcccggctgactggacctgcccacagagctgccctggcctacctgctgcaggtgtctgatgcctgtgcccaggaggccaacctgagcctgagcctgagccagggcgtgctgcagagcctgctgccccagctgctgtactgcaggaagctgcggctggacaccaaccagttccaggaccctgtgatggagctgctgggctctgtgctgagcggcaaggactgccgcatccagaagatcagcctggccgagaaccagatcagcaacaagggggccaaggccctggcccggagcctgctggtgaacagaagcctgaccagcctggacctgcggggcaacagcatcggcccccagggcgccaaggccctggctgatgccctgaagatcaacagaaccctgaccagcctgagcctgcagggcaacacagtgagagatgatggagcccgctccatggccgaggccctggccagcaacagaaccctgtccatgctgcacctgcagaagaacagcatcggccccatgggcgcccagaggatggctgacctgaagcagaacagaagcctgaaggagctgatgttcagcagcaacagcattggagatggaggagccaaggccctggccgaggccctgaaggtgaaccagggcctggagagcctggacctgcagagcaacagcatcagtgatgctggggtggccgccctgatgggcgccctgtgcaccaaccagaccctgctgagcctgagcctgagagaaaattccatcagccctgagggcgcccaggccatcgcccacgccctgtgtgccaacagcaccctgaagaacctggacctgacagccaacctgctgcatgaccagggcgcccgggccatcgctgtggccgtgcgggagaacagaaccctgaccagcctgcacctgcagtggaacttcatccaggccggggccgcccaggccctgggccaggccctgcagctgaacagaagcctgaccagcctggacctgcaggagaatgccatcggagatgatggagcctgtgctgtggcccgggccctgaaggtgaacacagccctgacagccctgtacctgcaggtggccagcatcggggccagcggggcccaggtgctgggggaggccctggccgtgaacagaaccctggagatcctggacctgcggggaaatgccatcggcgtggccggggccaaggccctggccaatgccctgaaggtgaacagcagcctgcggcggctgaacctgcaggagaacagcctgggcatggatggagccatctgcatcgccacagccctgagcggcaaccaccggctgcagcacatcaacctgcagggcaaccacatcggggacagcggggccaggatgatcagcgaggccatcaagaccaatgcccccacctgcaccgtggagatgtag

SEQ ID NO: 21521 - DNA, 2424 bp, synthetic construct
  source 1..2424: mol_type = other DNA; note = Synthetic coding sequence
atgctggagcggcgggccctgctgtggcagcgggaggccggccctggctggggagaccgggcccgggccggcactggaggagctgggggcggctgcggcggggccatggccgagcggggccctgccttctgtggcctgtatgacaccagcagcctgctgcgctactgcaatgatgacaacctgagcggcaccagcggcatggaggtggatgacagagtgtctgccctggagcagaggctgcagctgcaggaggatgagctggccgtgctgaaggccgccctggctgatgccctgcggcggctgcgggcctgtgaggagcagggcgccgccctgcgggcccggggcacccccaagggccgggccccaccccggctgggcaccacagcctctgtgtgccagctgctgaagggcctgcccaccaggacccccctgaatggaagtggccccccaagaagagtgggcggctacgccaccagccccagcagccccaagaaggaggccaccagcggccgcagctctgtgcggcgctacctgagccctgagcggctggcctctgtgagaagagaggaccccaggagcaggaccaccagcagcagcagcaactgcagcgccaagaaggagggcaagaccaaggaggtgatcttctctgtggaggatggctctgtgaagatgttcctgcggggccggcctgtgcccatgatgatcccagatgagctggcccccacctacagcctggacaccaggtctgagctgcccagctgccgcctgaagctggagtgggtgtatggctaccggggccgggactgccgggccaacctgtacctgctgcccaccggggagatcgtgtactttgtggcctctgtggccgtgctgtacagcgtggaggagcagaggcagaggcactacctgggccacaatgatgacatcaagtgcctggccatccacccagacatggtgaccatcgccaccggccaggtggccggcaccaccaaggagggcaagcccctgccccctcatgtgcgcatctgggacagcgtgtccctgagcaccctgcacgtgctgggcctgggcgtgtttgacagagctgtgtgctgcgtgggcttcagcaagagcaatggaggcaacctgctgtgtgctgtggatgagagcaatgaccacatgctgtctgtgtgggactgggccaaggagaccaaggtggtggatgtgaagtgcagcaatgaggccgtgctggtggccaccttccaccccacagaccccaccgtgctgatcacctgtgggaagagccacatctacttctggaccctggagggcggcagcctgagcaagaggcagggcctgtttgagaagcatgagaagcccaagtatgtgctgtgtgtgaccttcctggagggcggagatgtggtgactggagacagcggcggcaacctgtatgtgtggggcaaaggaggcaaccgcatcacccaggccgtgctgggcgcccatgatggaggagtgtttggcctgtgtgccctgagagatggcaccctggtgtctgggggcggcagaaattccatcctgcagggctctgtgcacacaggcttcagcctgctggtgcagggccacgtggaggagctgtggggcctggccacccaccccagccgggcccagtttgtgacctgtggccaggacaagctggtgcacctgtggagcagtgacagccaccagcccctgtggagccgcatcatcgaggaccctgcccggtctgctggcttccaccccagcggctctgtgctggccgtgggcaccgtgacaggccgctggctgctgctggacacagagacccatgacctggtggccatccacacagatggaaatgagcagatctctgtggtgtccttctccccagatggagcctacctggccgtgggcagccatgacaacctggtgtatgtgtacacagtggaccagggcggcaggaaggtgtcccggctgggcaaatgttctggccacagcagcttcatcacccacctggactgggcccaggacagcagctgctttgtgaccaacagcggggactatgagatcctgtactgggaccctgccacctgcaagcagatcaccagcgcagatgctgtgaggaacatggagtgggccacagccacctgtgtgctgggctttggagtgtttggcatctggagcgagggcgcagatggaacagacatcaatgctgtggcccggagccatgatggcaagctgctggccagcgcagatgactttgggaaggtgcacctgttctcctacccctgctgccagccccgggccctgagccacaagtatggaggccacagcagccacgtgaccaacgtggccttcctgtgggatgacagcatggccctgaccaccggcggcaaggacacctctgtgctgcagtggagggtggtgtag

SEQ ID NO: 21522 - DNA, 1413 bp, synthetic construct
  source 1..1413: mol_type = other DNA; note = Synthetic coding sequence
atggaggagaccatcaaggacccccccaccagcgctgtgctgctggaccactgccacttcagccaggtgatcttcaacagcgtggagaagttctacatccctggaggagatgtgacctgccactacaccttcacccagcacttcatccccaggaggaaggactggattggcatcttccgggccttcaagtgcttccaggacaagctggagcaggagctgctgaagtggaggagccagggccagaagctgcaggtgggctggaagaccacccgggagtactacaccttcatgtgggtgaccctgcccatcgacctgaacaacaagagcgccaagcagcaggaggtgcagttcaaggcctactacctgcccaaggatgatgagtactaccagttctgctacgtggatgaagatggagtggtgcggggggccagcatccccttccagttccggccagaaaatgaggaggacatcctggtggtgaccacccagggcgaggtggaggagattgagcagcacaacaaggagctgtgcaaggagaaccaggagctgaaggacagctgcatcagcctgcagaagcagaacagcgacatgcaggccgagctgcagaagaagcaggaggagctggagaccctgcagagcatcaacaagaagctggagctgaaggtgaaggagcagaaggactactgggagacagagctgctgcagctgaaggagcagaaccagaagatgagcagtgaaaatgagaagatgggcatccgggtggaccagctgcaggcccagctgagcacccaggagaaggagatggagaagctggtgcagggcgaccaggacaagacagagcagctggagcagctgaagaaggaaaatgaccacctgttcctgagcctgacagagcagaggaaggaccagaagaagctggagcagacagtggagcagatgaagcagaatgagaccacagccatgaagaagcagcaggagctgatggatgagaactttgacctgagcaagaggctgtctgaaaatgagatcatctgcaatgccctgcagaggcagaaggagcggctggagggggagaatgacctgctgaagcgggagaacagccggctgctgagctacatgggcctggacttcaacagcctgccctaccaggtgcccaccagtgatgagggcggggcccggcagaaccctggcctggcctacggcaacccctacagcggcatccaggagagcagcagccccagccccctgagcatcaagaagtgccccatctgcaaggcagatgacatctgtgaccacaccctggagcagcagcagatgcagcccctgtgcttcaactgccccatctgtgacaagatcttccctgccacagagaagcagatctttgaggaccacgtgttctgccacagcctgtag

SEQ ID NO: 21523 - DNA, 1023 bp, synthetic construct
  source 1..1023: mol_type = other DNA; note = Synthetic coding sequence
atgagcaagacccatgaccaccagctggagagcagcctgagccctgtggaggtgtttgccaagaccagcgccagcctggagatgaaccagggcgtgtctgaggagcgcatccacctgggcagcagccccaagaagggcggcaactgtgacctgagccaccaggagcggctgcagagcaagagcctgcacctgagcccccaggagcagagcgccagctaccaggaccggcggcagagctggaggcgggcctccatgaaggagaccaacagaaggaagagcctgcaccccatccaccagggcatcacagagctgagccgcagcatctctgtggacctggccgagagcaagaggctgggctgcctgctgctgagcagcttccagttcagcatccagaagctggagcccttcctgcgggacaccaagggcttcagcctggagagcttccgggccaaggccagcagcctgtctgaggagctgaagcactttgctgatggcctggagacagatggcaccctgcagaagtgctttgaggacagcaatggcaaggccagtgacttcagcctggaggcctctgtggccgagatgaaggagtacatcaccaagttcagcctggagcggcagacctgggaccagctgctgctgcactaccagcaggaggccaaggagatcctgagccggggcagcacagaggccaagatcacagaggtgaaggtggagcccatgacctacctgggcagcagccagaatgaggtgctgaacaccaagccagactaccagaagatcctgcagaaccagagcaaggtgtttgactgcatggagctggtgatggatgagctgcagggctctgtgaagcagctgcaggccttcatggatgagagcacccagtgcttccagaaggtgtctgtgcagctgggcaagaggtccatgcagcagctggaccccagccctgccaggaagctgctgaagctgcagctgcagaaccccccagccatccacggcagcggcagcggcagctgccagtag

SEQ ID NO: 21524 - DNA, 522 bp, synthetic construct
  source 1..522: mol_type = other DNA; note = Synthetic coding sequence
atgacccacgtggccagccagtttgccagcagctatgtgttctactggagggactactttgaggaccagcccctgctgtacccacctggctttgatggccgggtggtggtgtaccccagcaaccagaccctgaaggactacctgtcctggaggcaggccgactgccacatcaacaacctgtacaacacagtgttctgggccctgatccagcagagcggcctgacccctgtgcaggcccagggccgcctgcagggcaccctggccgctgacaagaatgagatcctcttcagcgagttcaacatcaactacaacaatgagctgcccatgtacaggaagggcaccgtgctgatctggcagaaggtggatgaggtgatgaccaaggagatcaagctgcccacagagatggagggcaagaagatggctgtgaccaggaccaggaccaagcctgtgcccctgcactgtgacatcattggagatgccttctggaaggagcaccctgagatcctggatgaggacagctag

SEQ ID NO: 21525 - DNA, 285 bp, synthetic construct
  source 1..285: mol_type = other DNA; note = Synthetic coding sequence
atggagatggagagcgctgctgccagcacccgcttccaccagccccacatggagaggaagatgtctgccatggcctgtgagatcttcaatgagctgcggctggagggcaagctgtgtgatgtggtgatcaaggtgaatggatttgagttcagcgcccacaagaacatcctgtgcagctgcagcagctacttccgggccctcttcaccagcggctggaacaacacagagaagaaggtgtacaacatccctggcatcagcccagacatgatgaagctgatcatctag

SEQ ID NO: 21526 - DNA, 1572 bp, synthetic construct; identical to SEQ ID NO: 18903
  source 1..1572: mol_type = other DNA; note = Synthetic coding sequence

SEQ ID NO: 21527 - DNA, 372 bp, synthetic construct
  source 1..372: mol_type = other DNA; note = Synthetic coding sequence
atgggcactggagacttcatctgcatctccatgactggaggagccccctggggcttccggctgcagggcggcaaggagcagaagcagcccctgcaggtggccaagatccggaaccagagcaaggccagcggcagcggcctgtgtgaaggagatgaggtggtgtccatcaatggaaacccctgtgccgacctgacctacccagaggtgatcaagctgatggagagcatcacagacagcctgcagatgctgatcaagagaagagtgggcgcccccttcctgttcctggaggaccagagccacccccccttcctgcacctgctgggctacaccagcctgctgattgtgaccctggtgaaccagcccatggactag

SEQ ID NO: 21528 - DNA, 1146 bp, synthetic construct; identical to SEQ ID NO: 20186
  source 1..1146: mol_type = other DNA; note = Synthetic coding sequence

SEQ ID NO: 21529 - DNA, 615 bp, synthetic construct
  source 1..615: mol_type = other DNA; note = Synthetic coding sequence
atggtgatggccgagggcacagctgtgctgcggaggaacagacctggcaccaaggcccagtacatccagcagaacatccgggctgactgcagcaacatcgacaagatcctggagcccccagagggccaggatgagggcgtgtggaagtatgagcacctgcggcagttctgcctggagctgaatggcctggccgtgaagctgcagagcgagtgccacccagacacctgcacccagatgacagccacagagcagtggatcttcctgtgtgccgcccacaagacccccaaggaatgtcctgccatcgactacaccaggcacaccctggatggagctgcctgcctgctgaacagcaacaagtacttccccagccgggtgtccatcaaggagagctctgtggccaagctgggctctgtgtgccgccgcatctaccgcatcttcagccacgcctacttccaccaccggcagatctttgatgaatatgaaaatgagaccttcctgtgccaccgcttcaccaagtttgtgatgaagtacaacctgatgagcaaggacaacctgattgtgcccatcctggaggaggaggtgcagaacagcgtgtctggagagagcgaggcctag

SEQ ID NO: 21530 - DNA, 1293 bp, synthetic construct
  source 1..1293: mol_type = other DNA; note = Synthetic coding sequence
atggccgccaacctgagcagaaatggacctgccctgcaggaggcctacgtgcgggtggtgacagagaagagccccacagactgggccctcttcacctatgagggcaacagcaatgacatccgggtggccggcactggagagggcggcctggaggagatggtggaggagctgaacagcggcaaggtgatgtatgccttctgccgggtgaaggaccccaacagcggcctgcccaagtttgtgctgatcaactggacaggagagggcgtgaatgatgtgaggaagggggcctgtgccagccacgtgtccaccatggccagcttcctgaagggggcccacgtgaccatcaatgcccgggcagaagaagatgtggagcctgagtgcatcatggagaaggtggccaaggccagcggggccaactacagcttccacaaggagagcggccgcttccaggatgtgggcccccaggcccctgtgggctctgtgtaccagaagaccaatgctgtgtctgagatcaagagggtgggcaaggacagcttctgggccaaggccgagaaggaggaggagaacagaaggctggaggagaagagaagagctgaggaggcccagaggcagctggagcaggagcggcgggagcgggagctgcgggaggccgcccggcgggagcagcgctaccaggagcagggcggggaggccagcccccagaggacctgggagcagcagcaggaggtggtgtccaggaacagaaatgagcaggagagcgctgtgcacccccgggagatcttcaagcagaaggagcgggccatgagcaccaccagcatcagcagcccccagcccgggaagctgcggagccccttcctgcagaagcagctgacccagcctgagacccacttcggccgggagcctgctgctgccatcagccggcccagggctgacctgcctgctgaggagcccgcccccagcaccccaccctgcctggtgcaggccgaggaggaggccgtgtatgaggagcccccagagcaggagaccttctatgagcagccccccctggtgcagcagcagggcgccggcagcgagcacatcgaccaccacatccagggccagggcctgagcggccagggcctgtgtgcccgggccctgtatgactaccaggccgcagatgacacagagatcagctttgatcctgaaaatctcatcactggaattgaggtgattgatgagggctggtggaggggctacggcccagatggccacttcggcatgtttcctgccaactacgtggagctgattgaatag

SEQ ID NO: 21531 - DNA, 3189 bp, synthetic construct
  source 1..3189: mol_type = other DNA; note = Synthetic coding sequence
atggtgagcagcgcccagatgggcttcaacctgcaggccctgctggagcagctgagccaggatgagctgagcaagttcaagtacctgatcaccaccttcagcctggcccacgagctgcagaagatcccccacaaggaggtggacaaggcagatggcaagcagctggtggagatcctgaccacccactgtgacagctactgggtggagatggccagcctgcaggtgtttgagaagatgcacaggatggacctgtctgagcgggccaaggatgaggtgcgggaggccgccctgaagagcttcaacaagaggaagcccctgagcctgggcatcaccaggaaggagcggccccccctggatgtggatgagatgctggagcgcttcaagacagaggcccaggccttcacagagaccaagggaaatgtcatctgcctgggcaaggaggtgttcaagggcaagaagccagacaaggacaaccgctgccgctacatcctgaagaccaagttccgggagatgtggaagtcctggccaggggacagcaaggaggtgcaggtgatggccgagcgctacaagatgctgatccccttcagcaacccccgggtgctgcccggccccttctcctacacagtggtgctgtatggccctgctggcctgggcaagaccaccctggcccagaagctgatgctggactgggccgaggacaacctgatccacaagttcaagtatgccttctacctgagctgccgggagctgagccggctgggcccctgcagctttgctgagctggtgttccgggactggccagagctgcaggatgacatcccccacatcctggcccaggccaggaagatcctgtttgtgattgatggctttgatgagctgggcgccgcccctggggccctgattgaggacatctgtggggactgggagaagaagaagcctgtgcctgtgctgctgggcagcctgctgaacagagtgatgctgcccaaggccgccctgctggtgaccacccggccccgggccctgcgggacctgcgcatcctggccgaggagcccatctacatccgggtggagggcttcctggaggaggaccggcgggcctacttcctgcggcactttggagatgaggaccaggccatgagggcctttgagctgatgaggagcaatgctgccctcttccagctgggcagcgccccagctgtgtgctggatcgtgtgcaccaccctgaagctgcagatggagaagggggaggaccctgtgcccacctgcctgaccaggacaggcctcttcctgcgcttcctgtgcagccgcttcccccagggcgcccagctgcggggggccctgcggaccctgagcctgctggccgcccagggcctgtgggcccagacctctgtgctgcaccgggaggacctggagcggctgggcgtgcaggagagtgacctgcggctcttcctggatggagacatcctgcggcaggacagagtgtccaagggctgctacagcttcatccacctgtccttccagcagttcctgacagccctcttctacaccctggagaaggaggaggaggaggacagagatggccacacctgggacattggagatgtgcagaagctgctgagcggcgtggagcggctgaggaacccagacctgatccaggccggctactacagctttggcctggccaatgagaagagggccaaggagctggaggccaccttcggctgcaggatgagcccagacatcaagcaggagctgctgcgctgtgacatcagctgcaagggcggccacagcacagtgacagacctgcaggagctgctgggctgcctgtatgagagccaggaggaggagctggtgaaggaggtgatggcccagttcaaggagatcagcctgcacctgaatgctgtggatgtggtgcccagcagcttctgtgtgaagcactgcaggaacctgcagaagatgagcctgcaggtgatcaaggagaacctgcctgaaaatgtgacagccagcgagagtgatgctgaggtggagaggagccaggatgaccagcacatgctgcccttctggacagacctgtgcagcatcttcggcagcaacaaggacctgatgggcctggccatcaatgacagcttcctgagcgccagcctggtgcgcatcctgtgtgagcagatcgccagtgacacctgccacctgcagagggtggtgttcaagaacatcagccctgcagatgcccacaggaacctgtgcctggccctgcggggccacaagacagtgacctacctgaccctgcagggcaatgaccaggatgacatgtttcctgccctgtgtgaggtgctgcggcaccctgagtgcaacctgcgctacctgggcctggtgtcctgcagcgccaccacccagcagtgggccgacctgagcctggccctggaggtgaaccagagcctgacctgtgtgaacctgagtgacaatgagctgctggatgaaggagccaagctgctgtacaccaccctgcggcaccccaagtgcttcctgcagaggctgagcctggagaactgccacctgacagaggccaactgcaaggacctggccgctgtgctggtggtgtcccgggagctgacccacctgtgcctggccaagaaccccatcggcaacacaggagtgaagttcctgtgtgagggcctgcgctacccagagtgcaagctgcagaccctggtgctgtggaactgtgacatcaccagtgatggctgctgtgacctgaccaagctgctgcaggagaagagcagcctgctgtgcctggacctgggcctgaaccacatcggcgtgaagggcatgaagttcctgtgtgaggccctgaggaagcccctgtgcaacctgcgctgcctgtggctgtggggctgcagcatcccccccttcagctgtgaggacctgtgcagcgccctgagctgcaaccagagcctggtgaccctggacctgggccagaaccccctgggcagcagtggagtgaagatgctgtttgagaccctgacctgcagcagcggcaccctgcggaccctgcggctgaagattgatgacttcaatgatgagctgaacaagctgctggaggagattgaggagaagaacccccagctgatcatcgacacagagaagcaccacccctgggccgagcggcccagcagccatgacttcatgatctag

SEQ ID NO: 21532 - DNA, 390 bp, synthetic construct; identical to SEQ ID NO: 19988
  source 1..390: mol_type = other DNA; note = Synthetic coding sequence

SEQ ID NO: 21533 - DNA, 516 bp, synthetic construct
  source 1..516: mol_type = other DNA; note = Synthetic coding sequence
atggaggtggccgagcccagcagccccacagaggaggaggaggaggaggaggagcacagcgctgagccccggcccaggaccaggagcaaccctgagggcgcagaagatagagctgtgggcgcccaggcctctgtgggcagccgctctgagggggagggggaggccgccagcgcagatgatggcagcctgaacaccagcggggccggccccaagtcctggcaggtgcccccaccagcccctgaggtgcagatccgcaccccccgggtgaactgcccagagaaggtgatcatctgcctggacctgtctgaggagatgagcctgcccaagctggagagcttcaacggccagcagaagacagagctgcctgtgacagaaaatgtgcagaccatccccccaccctacgtggtgaggaccatcctggtgtacagcaggcctccctgccagccccagttcagcctgacagagcccatgaaggtgggggaggcctgggagcgggagggctgcctgcagccctag

SEQ ID NO: 21534 - DNA, 1446 bp, synthetic construct; identical to SEQ ID NO: 21094
  source 1..1446: mol_type = other DNA; note = Synthetic coding sequence

SEQ ID NO: 21535 - DNA, 1986 bp, synthetic construct
  source 1..1986: mol_type = other DNA; note = Synthetic coding sequence
atgaacacaggccgggacagccagagcccagacagcgcctggaggagctacaatgatggcaaccaggagaccctgaatggagatgccacctacagcagcctggccgccaagggcttccgctctgtgcggcccaacctgcaggacaagaggagccccacccagagccagatcaccgtgaatggaaattctggaggagctgtgagccccatgagctactaccagaggcccttcagccccagcgcctacagcctgcctgccagcctgaacagcagcatcgtgatgcagcacggcaccagcctggacagcacagacacctacccccagcacgcccagagcctggatggcaccaccagcagcagcatccccctgtaccgcagcagcgaggaggagaagagggtgaccgtcatcaaggccccccactacccaggcatcggccctgtggatgagagcggcatccccacagccatccgcaccaccgtggaccggcccaaggactggtacaagaccatgttcaagcagatccacatggtgcacaagccagatgatgacacagacatgtacaacaccccctacacctacaatgccggcctgtacaaccccccctacagcgcccagagccaccctgctgccaagacccagacctaccggcccctgagcaagagccacagcgacaacagccccaatgccttcaaggatgccagcagccctgtgcccccacctcatgtgcccccacctgtgccccccctgcggccccgggacaggagcagcacagagaagcatgactgggaccccccagacaggaaggtggacaccaggaagttccgctctgagcccaggagcatctttgaatatgagcccgggaagagcagcatcctgcagcacgagcggcccccacccaagaagcccctggactatgtgcaggaccacagcagtggagtcttcaatgaggccagcctgtaccagagcagcattgacaggagcctggagcggcccatgagcagcgcctccatggccagtgacttcaggaagaggaggaagtctgagcctgctgtgggccccccccggggcctgggggaccagagcgccagcaggaccagccctggccgggtggacctgcccggcagcagcaccaccctgaccaagagcttcaccagcagcagccccagcagccccagccgggccaaggaccgggagagccccaggagctacagcagcaccctgacagacatgggccgcagcgccccccgggagcggcggggcaccccagagaaggagaagctgcctgccaaggctgtgtatgacttcaaggcccagaccagcaaggagctgtccttcaagaagggggacacagtgtacatcctgaggaagattgaccagaactggtatgaaggagagcaccacggccgggtgggcatcttccccatctcctatgtggagaagctgaccccacctgagaaggcccagcctgcccggcccccacctccagcccagcccggggagattggagaggccatcgccaagtacaacttcaatgctgacaccaacgtggagctgagcctgaggaagggggacagagtcatcctgctgaagagggtggaccagaactggtatgagggcaagatccctggcaccaaccggcagggcatcttccctgtgtcctatgtggaggtggtgaagaagaacaccaagggagctgaggactacccagacccccccatcccccacagctacagcagtgaccgcatccacagcctgagcagcaacaagccccagaggcctgtgttcacccatgagaacatccagggcggcggggagcccttccaggccctgtacaactacaccccaagaaatgaagatgagctggagctgcgggagagtgatgtgattgatgtgatggagaagtgtgatgatggctggtttgtgggcaccagcaggaggaccaagttcttcggcaccttccctggcaactacgtgaagaggctgtag

SEQ ID NO: 21536 - DNA, 483 bp, synthetic construct; identical to SEQ ID NO: 20009
  source 1..483: mol_type = other DNA; note = Synthetic coding sequence

SEQ ID NO: 21537 - DNA, 717 bp, synthetic construct
  source 1..717: mol_type = other DNA; note = Synthetic coding sequence
atggactgccgggagatggacctgtatgaggactaccagagcccctttgattttgatgctggggtgaacaagagctacctgtacctgagccccagcggcaacagcagccccccaggcagccccaccctgcagaagtttggcctgctgaggacagatcctgtgcctgaggagggagaagatgtggccgccaccatcagcgccacagagaccctgtctgaggaggagcaggaggagctgcggcgggagctggccaaggtggaggaggagatccagaccctgagccaggtgctggccgccaaggagaagcacctggccgagatcaagaggaagctgggcatcaacagcctgcaggagctgaagcagaacatcgccaagggctggcaggatgtgacagccaccagcgcctacaagaagaccagcgagaccctgagccaggccggccagaaggccagcgctgccttcagctctgtgggcagcgtcatcaccaagaagctggaggatgtgaacatccgcagcatccagcacagcatctccatgcctgccatgaggaacagccccaccttcaagagctttgaggagaaggtggagaacctgaagagcaaggtgggcggcaccaagccagctggaggagactttggagaggtgctgaacagcgctgccaatgccagcgccaccaccacagagcccctgcctgagaagacccaggagagcctgtag

SEQ ID NO: 21538 - DNA, 108 bp, synthetic construct
  source 1..108: mol_type = other DNA; note = Synthetic coding sequence
atgcagaccagcagcagccgctctgtgcacctgtctgagtggcagaagaactactttgccatcaccagcggcatctgcaccggccccaaggcagatgcctacagatag

SEQ ID NO: 21539 - DNA, 327 bp, synthetic construct
  source 1..327: mol_type = other DNA; note = Synthetic coding sequence
atgacccggggcaaccagcgggagctggcccggcagaagaacatgaagaagcagagcgacagcgtgaagggcaagagaagagatgatggcctgtctgctgctgccaggaagcagagcgccatcaccagcagcaggaacttcctgtacccagcctacgtgtacttccccagctctgtgcccagcccccccaggaagtacacccagacctactatgctgctgtgcctgctggctggtggggcagcggcggcggccctgccacccagcctgctgctgggggccgctggaggttcctgcacatcctgggcacccagccccagagccactag

SEQ ID NO: 21540 - DNA, 846 bp, synthetic construct
  source 1..846: mol_type = other DNA; note = Synthetic coding sequence
atgggcgccggcaacctgccccccatcacccaggaggaggccctgcacatcctgggcttccagcccccatttgaggacatccgcttcggccccttcaccggcaacaccaccctgatgcgctggttccggcagatcaatgaccacttccacgtgaagggctgcagctatgtgctgtacaagccccacggcaagaacaagacagctggggagacagccagcggggccctgagcaagctgacccggggcctgaaggatgagagcctggcctacatctaccactgccagaaccactacttctgccccatcggctttgaggccacccctgtgaaggccaacaaggccttcagccggggccccctgagcccccaggaggtggagtactggatcctgattggagagagcagcaggaagcacccagccatccactgcaagaagtgggccgacatcgtgacagacctgaacacccagaaccctgagtacctggacatccgccacctggagcggggcctgcagtacaggaagaccaagaagcccaccttcttcagcagccaggtgggcggcaacctgcactgcatcatcgccttccagaggctgaactggcagagatttggcctgtggaacttccccttcggcaccatccggcaggagagccagccccccacccacgcccagggcatcgccaagtctgagagcgaggacaacatcagcaagaagcagcacggccgcctgggccgctccttcagcgccagcttccaccaggacagcgcctggaagaagatgagcagcatccacgagaggagaaattctggctaccagggctacagcgactatgatggaaatgactag

SEQ ID NO: 21541 - DNA, 213 bp, synthetic construct
  source 1..213: mol_type = other DNA; note = Synthetic coding sequence
atgagggccctgactgtgcagagggtgaagtttgccatggacctgcccctgctgaagagagctggccaggacctggccgagaagaccaagaactttgtgagccgcagcctggtgattggagaggtgctgtccatggctgacatggccaccggggtgaagtgtggcatcatctactggctgtttggaggagccatccggaacctgggcagctag

SEQ ID NO: 21542 - DNA, 1644 bp, synthetic construct; identical to SEQ ID NO: 19587
  source 1..1644: mol_type = other DNA; note = Synthetic coding sequence

SEQ ID NO: 21543 - DNA, 489 bp, synthetic construct
  source 1..489: mol_type = other DNA; note = Synthetic coding sequence
atgagctacaactgctgcagcaggaacttcagcagctgcagccatggaggctacctgcactacccaggcagcagctgtggcagcagctaccccagcaacctggtgtacagcacagacctgtgcagccccagcacctgccagctgggcagcagcctgtaccggggctgccaggagacctgctggaggcccaacagctgccagaccttctgctactaccccaggacccacatgctgtgcaacagctgcctgaccatgcacgtgggcagccggggcttcggcagcaacagctgctgcagcctgagctgtggcagccgcagctgcagcagcctgggctgcggcagcaatggcttccgctacctgaactaccgcatccacaccagccccagccagagctaccgcagccgcttctgccaccccatctacttccccccccggcgctggttccacagcagctgctaccagcccttctgccgcagcggcttctactag

SEQ ID NO: 21544 - DNA, 495 bp, synthetic construct
  source 1..495: mol_type = other DNA; note = Synthetic coding sequence
atgttcatctccttctatgacttcaagaacatcccccaggacagccgctgtgatggccagctgttcatcaatggaagaaacaacaagaacaacagcatcagcctgtacttccagggcggcctgcggcatgccagcgccagcatcggcggcagcgaggcctaccgccacatgaagtttgaaggaggagtgcaccgggtgcagagggtgcccaagacagagaagcagggccgggtgcacaccagcaccatgacagtggccatcctgccccagcccacagagatcaacctggtgatcaaccccaaggacctgagaattgacaccaagagggccagcggggccggcggccagcacgtgaacaccacagattctgctgtgagaattgtgcacctgcccaccggggtggtgtctgagtgccagcaggagaggagccagctgaagaacaaggagctggccatgaccaagctgcgggccaagctgtacagcatgcacctgtag

SEQ ID NO: 21545 - DNA, 2166 bp, synthetic construct
  source 1..2166: mol_type = other DNA; note = Synthetic coding sequence
atggaggaggagctgaagtgccctgtgtgtggcagcctcttccgggagcccatcatcctgccctgcagccacaacgtgtgcctgccctgtgcccggaccatcgctgtgcagaccccagatggcggcagcgctgctgggggcctgggcggcggggccggcggcggcggggaccatgctgacaagctgagcctgtacagcgagacagacagcggctacggcagctacacccccagcctgaagagccccaatggagtgcgggtgctgcccatggtgcctgcccctcctggcagcagcgctgctgctgcccggggagctgcctgcagcagcctgagcagcagcagcagcagcatcacctgcccccagtgccacaggtctgccagcctggaccaccggggcctgcggggcttccagaggaaccggctgctggaggccatcgtgcagcgctaccagcagggcagaggagctgtgcccggcaccagcgctgctgctgctgtggccatctgccagctgtgtgacaggaccccacctgagcctgctgccaccctgtgtgagcagtgtgatgtgctgtactgcagcgcctgccagctgaagtgccaccccagccggggcccctttgccaagcaccggctgggcgcccccagcggcggcggcggctgcaagagccctgggggcgctggggccggggccaccggcggcagcacagccaggaagttccccacctgcccagagcacgagatggagaactacagcatgtactgtgtgtcctgcaggacccctgtgtgctacctgtgcctggaggagggcagacatgccaagcatgaggtgaagcccctgggcgccatgtggaagcagcacaaggcccagctgagccaggccctgaatggagtgtctgacaaggccaaggaggccaaggagttcctggtgcagctgaagaacatcctgcagcagatccaggagaatggcctggactatgaggcctgcctggtggcccagtgtgatgccctggtggatgccctgacccggcagaaggccaagctgctgaccaaggtgaccaaggagcgggagcacaagctgaagatggtgtgggaccagatcaaccactgcaccctgaagctgcggcagagcacaggcctgatggagtactgcctggaggtgatcaaggaaaatgaccccagcggcttcctgcagatcagtgatgccctgatcaagagggtgcaggtgtcccaggagcagtgggtgaagggggccctggagcccaaggtgtctgctgagtttgacctgaccctggacagcgagcccctgctgcaggccatccaccagctggacttcatccagatgaagtgccgggtgccccctgtgcccctgctgcagctggagaagtgctgcaccaggaacaacagcgtgaccctggcctggaggatgccacccttcacccacagccctgtggatggctacatcctggagctggatgatggagctgggggccagttccgggaggtgtatgtgggcaaggagaccctgtgcaccattgatggcctgcacttcaacagcacctacaatgcccgggtgaaggccttcaacagcagtggagtgggcccctacagcaagacagtggtgctgcagaccagtgatgtggcctggttcacctttgaccccaacagcggccaccgggacatcatcctgagcaatgacaaccagacagccacctgcagcagctatgatgacagagtggtgctgggcacagctgccttcagcaagggcgtgcactactgggagctgcacgtggacagatatgacaaccacccagaccctgccttcggcgtggcccgggcctctgtggtgaaggacatgatgctgggcaaggatgacaaggcctgggccatgtatgtggacaacaacagatcctggttcatgcactgcaacagccacaccaacagaacagaaggaggagtgtgcaagggggccaccgtgggcgtgctgctggacctgaacaagcacaccctgaccttcttcatcaatggccagcagcagggccccacagccttcagccacgtggatggagtcttcatgcctgccctgagcctgaacagaaatgtgcaggtgaccctgcacacaggcctggaggtgcccaccaacctgggccggcccaagctgagcggcaactag

SEQ ID NO: 21546 - DNA, 1479 bp, synthetic construct
  source 1..1479: mol_type = other DNA; note = Synthetic coding sequence
atggacttcctgctgggcaaccccttcagcagccctgtgggccagagaattgagaaggccacagatggcagcctgcagagcgaggactgggccctgaacatggagatctgtgacatcatcaatgaaacagaggagggccccaaggatgccctgcgggctgtgaagaagagaattgtgggcaacaagaacttccacgaggtgatgctggccctgactgtgctggagacctgtgtgaagaactgtggccaccgcttccacgtgctggtggccagccaggactttgtggagagcgtgctggtgaggaccatcctgcccaagaacaacccccccaccatcgtgcatgacaaggtgctgaacctgatccagagctgggcagatgccttccgcagcagcccagacctgactggagtggtgaccatctatgaggacctgcggaggaagggcctggagttccccatgacagacctggacatgctgagccccatccacaccccccagaggacagtgttcaacagcgagacccagagcggccaggacagcgtgggcacagacagcagccagcaggaggacagcggccagcacgccgcccccctgcctgccccacccatcctgagcggggacacccccatcgcccccaccccagagcagatcggcaagctgcggtctgagctggagatggtgtctggaaatgtgcgggtgatgtctgagatgctgacagagctggtgcccacccaggccgagcctgctgacctggagctgctgcaggagctgaacagaacctgccgggccatgcagcagagggtgctggagctgatcccccagatcgccaatgagcagctgacagaggagctgctgattgtgaatgacaacctgaacaacgtgttcctgcggcatgaaagatttgagcgcttcagaacaggccagaccaccaaggcccccagcgaggccgagcctgctgctgacctgattgacatgggccctgaccctgctgccaccggcaacctgagcagccagctggccggcatgaacctgggcagcagctctgtgcgggccggcctgcagagcctggaggccagcggccgcctggaggatgaatttgacatgtttgccctgacccggggcagcagcctggccgaccagaggaaggaggtgaagtatgaggccccccaggccacagatggcctggccggggccctggatgcccggcagcagagcactggagccatccctgtgacccaggcctgcctgatggaggacatcgagcagtggctgagcacagatgtgggcaatgatgctgaggagcccaagggcgtgaccagcgaggagtttgacaagttcctggaggagcgggccaaggctgctgaccggctgcccaacctgagcagccccagcgctgagggccccccaggccccccatctggccctgcccccaggaagaagacccaggagaaggatgatgacatgctgtttgccctgtag

SEQ ID NO: 21547 - DNA, 747 bp, synthetic construct; identical to SEQ ID NO: 20797
  source 1..747: mol_type = other DNA; note = Synthetic coding sequence

SEQ ID NO: 21548 - DNA, 21 bp, synthetic construct
  source 1..21: mol_type = other DNA; note = Synthetic coding sequence
atgagcagaagacgcttctag

SEQ ID NO: 21549 - DNA, 165 bp, synthetic construct
  source 1..165: mol_type = other DNA; note = Synthetic coding sequence
atgtctgagcagggcgacctgaaccaggccatcgccgaggagggcggcacagagcaggagacagccaccccagaaaatggcatcgtgaagtctgagagcctggatgaggaggagaagctggagctgcagaggcggctggaggcccagaaccaggagaggaggtag

SEQ ID NO: 21550 - DNA, 1446 bp, synthetic construct; identical to SEQ ID NO: 21094
  source 1..1446: mol_type = other DNA; note = Synthetic coding sequence

SEQ ID NO: 21551 - DNA, 312 bp, synthetic construct; identical to SEQ ID NO: 19804
  source 1..312: mol_type = other DNA; note = Synthetic coding sequence

SEQ ID NO: 21552 - DNA, 2919 bp, synthetic construct
  source 1..2919: mol_type = other DNA; note = Synthetic coding sequence
atggagaggatgaactggctgagccggctggccagccggggccctggccaccgcatcccccagggcgccaacctgcagacccctgtgatggctgaccctgagacctgcctgatggtgttcaagaaccactggagccaggtggtgcgcatcctggagcggcagggcccccgggccgcccctgggggcgcagatgacctgtctgctgtgaggaaccacacctaccagatgctgaccctgctggccgaggacagagctgtgcccagcgcccccactggacctggccccctgctggagtttgccctgcacgaggacctgctgaccagggtgctgacctggcagctgcagtgggatgagctgggagatggagtggaggagcggcgggcagagcagctgaagctgtttgagatgctggtgtctgaggcccggcagcccctgctgcggcacggccctgtgcgggaggccctgctgaccctgctggatgcctgtggccggcctgtgcccagcagccctgccctggatgagggcctggtgctgctgctgagccagctgtgtgtgtgtgtggcccaggagcccagcctgctggagttcttcctgcagcccccacctgagcccggggccgccccccggctgctgctcttcagccggctggtgccctttgtgcaccgggagggcaccctgggccagcaggccagagatgccctgctgctgctgatggccctgtctgctggcagccccaccgtgggccgctacatcgctgaccacagctacttctgccctgtgctggccaccggcctgagcgccctgtacagcagcctgcccaggaagattgaggtgcctggagatgactggcactgcctgcggcgggaggactggctgggcgtgcctgccctggccctcttcatgagcagcctggagttctgcaatgctgtgatccaggtggcccaccccctggtgcagaagcagctggtggactacatccacaacggcttcctggtgcctgtgatgggccctgccctgcacaagacctctgtggaggagatgattgccagcacagcctacctggagctgttcctgcggagcatcagcgagcccgccctgctgcggaccttcctgcgcttcctgctgctgcacagacatgacacccacaccatcctggacaccctggtggcccgcatcggcagcaacagccggctgtgcatggtgtccctgagcctcttccgcaccctgctgaacctgagctgtgaagatgtgctgctgcagctggtgctgcgctacctggtgccctgcaaccacgtgatgctgagccagaagccagctgtgagagatgtggacctgtatggccgggctgctgacaagttcctgagcctcatcccccgctgctgccgccaccacgcccccagcccccccaggcctgagcacgcctcctgggcccggggccctggcagccccagcgtggacagcagctctgtgaccaccgtgccccggcccagcacccccagccggctggccctcttcctgcggcagcagagcctgggcggcagcgagagccctggccctgccccctgcagccctggcctgagcgccagccctgccagcagccctggccggcggcccaccccagctgaggagcccggggagctggaggacaactacctggagtacctgcgggaggccaggagaggagtggacagatgtgtgcgggcctgcaggacctggagcgccccctatgatggagagcggcccagccctgagcccagccccttcggcagcaggaccaagaagaggagcctgctgcctgaagaagatagaaataatgtgggggagggggaggaggaggagctgggccggcggggccgggccggcggggccggggagggccctggccacctgcccccaccccagctgaatggagtgcccggctcctggccagagggcgccaagaaggtgcggctggtgcccaaggagggcgctggggagctgctggagggcatcagcgagggcatggccggcctggagggcttcggccaggagctgcgggagctggaggtggccctgagcaatggaggcaccggcagcgagagccccctggagccccccctgcccctggaggaggaggaggcctatgagagcttcacctgccccccagagcccccaggccccttcctgagcagccccctgcggaccctgaaccagctgcccagccagcccttcaccggccccttcatggctgtgctgtttgccaagctggagaacatgctgcagaacagcgtgtatgtgaacttcctgctgaccggcctggtggcccagctggcctgccacccccagcccctgctgcggagcttcctgctgaacaccaacatggtgttccagcccagcgtgaagagcctgctgcaggtgctgggctctgtgaagaacaagattgagaactttgctgccagccaggaggacttccctgccctgctgagcaaggccaagaagtacctgattgcccggggcaagctggactgggccgagggccctgctgctggccctgcccccaggagaagtgaccccctggtgaagagccggcggcccagcctgggggagctgctgctgcggcatgcccacagccccacccgggcccggcaggccgcccagctggtgctgcagcccggcagagatggagctggcctgggcctgagcggcggcagccctggggccagcacccctgtgctgctgacccggggcggggcccctgagcggcagggcgaggccctgcgggtgaagaatgctgtgtactgtgccgtcatcttccctgagttcctgaaggagctggccgccatcagccaggcccatgctgtgaccagccccttcctgctggagaccagcgaggagggcagcggccccctcatcagcggctgcggccccctgaacccctag

SEQ ID NO: 21553 - DNA, 1929 bp, synthetic construct; identical to SEQ ID NO: 21382
  source 1..1929: mol_type = other DNA; note = Synthetic coding sequence

SEQ ID NO: 21554 - DNA, 1935 bp, synthetic construct
  source 1..1935: mol_type = other DNA; note = Synthetic coding sequence
atgtctgtgaccctgacctctgtgaagagggtgcagagcagccccaacctgctggccgccggccgggacagccagagcccagattctgcctggaggagctacaatgatggcaaccaggagaccctgaatggagatgccacctacagcagcctggccgccaagggcttccgctctgtgcggcccaacctgcaggacaagaggagccccacccagagccagatcaccgtgaatggaaacagcggcggcgctgtgagccccatgagctactaccagaggcccttcagccccagcgcctacagcctgcctgccagcctgaacagcagcatcgtgatgcagcacggcaccagcctggacagcacagacacctacccccagcacgcccagagcctggatggcaccaccagcagcagcatccccctgtaccgcagcagcgaggaggagaagagggtgaccgtcatcaaggccccccactacccaggcatcggccctgtggatgaaagtggcatccccacagccatccgcaccaccgtggaccggcccaaggactggtacaagaccatgttcaagcagatccacatggtgcacaagccaggcctgtacaaccccccctacagcgcccagagccaccctgctgccaagacccagacctaccggcccctgagcaagagccacagcgacaacagccccaatgccttcaaggatgccagcagccctgtgcccccacctcatgtgcccccacctgtgccccccctgcggccccgggacaggagcagcacagagaagcatgactgggaccccccagacaggaaggtggacaccaggaagttccgctctgagcccaggagcatctttgaatatgagcccgggaagagcagcatcctgcagcacgagaggcctgccagcctgtaccagagcagcattgacaggagcctggagcggcccatgagcagcgcctccatggccagtgacttcaggaagaggaggaagtctgagcctgctgtgggccccccccggggcctgggggaccagagcgccagcaggaccagccctggccgggtggacctgcccggcagcagcaccaccctgaccaagagcttcaccagcagcagccccagcagccccagccgggccaaggaccgggagagccccaggagctacagcagcaccctgacagacatgggccgcagcgccccccgggagcggcggggcaccccagagaaggagaagctgcctgccaaggctgtgtatgacttcaaggcccagaccagcaaggagctgtccttcaagaagggggacacagtgtacatcctgaggaagattgaccagaactggtatgaaggagagcaccacggccgggtgggcatcttccccatctcctatgtggagaagctgaccccacctgagaaggcccagcctgcccggcccccacctccagcccagcctggagagatcggggaggccatcgccaagtacaacttcaatgctgacaccaacgtggagctgagcctgaggaaaggagacagagtcatcctgctgaagagggtggaccagaactggtatgagggcaagatccctggcaccaaccggcagggcatcttccctgtgtcctatgtggaggtggtgaagaagaacaccaagggagctgaggactacccagacccccccatcccccacagctacagcagtgaccgcatccacagcctgagcagcaacaagccccagaggcctgtgttcacccatgagaacatccagggcggcggggagcccttccaggccctgtacaactacaccccaagaaatgaagatgagctggagctgcgggagagtgatgtgattgatgtgatggagaagtgtgatgatggctggtttgtgggcaccagcaggaggaccaagttcttcggcaccttccctggcaactacgtgaagaggctgtag

SEQ ID NO: 21555 - DNA, 294 bp, synthetic construct
  source 1..294: mol_type = other DNA; note = Synthetic coding sequence
atgggcaagagctgcaaggtggtggtgtgtggccaggcctctgtgggcaagaccagcatcctggagcagctgctgtatggcaaccacgtggtgggcagcgagatgattgagacccaggaggacatctacgtgggcagcattgaaacagaccggggcgtgcgggagcagattgctgagagcctcttctctgtgtggagctgcagcagaagaaggctgaccaaccccaggaccaggagaagaagccccagctggagcctggccacctctgtgacctaccgcagcagtggagtgtag

SEQ ID NO: 21556 - DNA, 915 bp, synthetic construct
  source 1..915: mol_type = other DNA; note = Synthetic coding sequence
atgagcaagacccatgaccaccagctggagagcagcctgagccctgtggaggtgtttgccaagaccagcgccagcctggagatgaaccagggcgtgtctgaggagcgcatccacctgggcagcagccccaagaagggcggcaactgtgacctgagccaccaggagcggctgcagagcaagagcctgcacctgagcccccaggagcagagcgccagctaccaggaccggcggcagagctggaggcgggcctccatgaaggagaccaacagaaggaagagcctgcaccccatccaccagggcatcacagagctgagccgcagcatctctgtggacctggccgagagcaagaggctgggctgcctgctgctgagcagcttccagttcagcatccagaagctggagcccttcctgcgggacaccaagggcttcagcctggagagcttccgggccaaggccagcagcctgtctgaggagctgaagcactttgctgatggcctggagacagatggcaccctgcagaagtgctttgaggacagcaatggcaaggccagtgacttcagcctggaggcctctgtggccgagatgaaggagtacatcaccaagttcagcctggagcggcagacctgggaccagctgctgctgcactaccagcaggaggccaaggagatcctgagccggggcagcacagaggccaagatcacagaggtgaaggtggagcccatgacctacctgggcagcagccagaatgaggtgctgaacaccaagccagactaccagaagatcctgcagaaccagagcaaggtgtttgactgcatggagctggtgatggatgagctgcagggctctgtgaagcagctgcaggccttcatggatgagagcacccagtgcttccagaaggtgtctgtgcagctgtag

SEQ ID NO: 21557 - DNA, 1842 bp, synthetic construct; identical to SEQ ID NO: 18580
  source 1..1842: mol_type = other DNA; note = Synthetic coding sequence

SEQ ID NO: 21558 - DNA, 1560 bp, synthetic construct
  source 1..1560: mol_type = other DNA; note = Synthetic coding sequence
atggagggcgtgctgtacaagtggaccaactacctgagcggctggcagccccgctggttcctgctgtgtggcggcatcctgagctactatgacagcccagaagatgcctggaagggctgcaagggcagcatccagatggctgtgtgtgagatccaggtgcacagcgtggacaacaccaggatggacctgatcatccctggagagcagtacttctacctgaaggcccggtctgtggccgagcggcagcgctggctggtggccctgggcagcgccaaggcctgcctgacagacagcaggacccagaaggagaaggagtttgctgagaacacagagaacctgaagaccaagatgtctgagctgcggctgtactgtgacctgctggtgcagcaggtggacaagaccaaggaggtgaccaccaccggggtgagcaacagcgaggagggcattgatgtgggcaccctgctgaagagcacctgcaacaccttcctgaagaccctggaggagtgcatgcagatcgccaatgctgccttcaccagcgagctgctgtaccgcaccccacctggcagcccccagctggccatgctgaagagcagcaagatgaagcaccccatcatccccatccacaacagcctggagcggcagatggagctgagcacctgtgaaaatggcagcctgaacatggagatcaacggggaggaggagatcctgatgaagaacaagaacagcctgtacctgaagtctgctgagattgactgcagcatcagcagcgaggagaacacagatgacaacatcaccgtgcagggcgagatcagaaaagaagatggcatggagaacctgaagaaccacgacaacaacctgacccagagcggcagtgacagcagctgcagccctgagtgcctgtgggaggagggcaaggaggtgatccccaccttcttcagcaccatgaacaccagcttcagtgacatcgagctgctggaggacagcggcatccccacagaggccttcctggccagctgctatgctgtggtgcctgtgctggacaagctgggccccaccgtgtttgcccctgtgaagatggacctggtgggcaacatcaagaaggtgaaccagaagtacatcaccaacaaggaggagttcaccaccctgcagaagatcgtgctgcacgaggtggaggctgatgtggcccaggtgaggaacagcgccacagaggccctgctgtggctgaagaggggcctgaagttcctgaagggcttcctgacagaggtgaagaatggagagaaggacatccagacagccctgaacaatgcctacggcaagaccctgcggcagcaccacggctgggtggtgcggggcgtgtttgccctggccctgcgggccgcccccagctatgaggactttgtggccgccctgactgtgaaggagggggaccaccagaaggaggccttcagcatcggcatgcagagggacctgagcctgtacctgcctgccatggagaagcagctggccatcctggacaccctgtatgaggtgcacggcctggagagtgatgaggtggtgtag

SEQ ID NO: 21559 - DNA, 1446 bp, synthetic construct; identical to SEQ ID NO: 21094
  source 1..1446: mol_type = other DNA; note = Synthetic coding sequence

SEQ ID NO: 21560 - DNA, 1173 bp, synthetic construct
  source 1..1173: mol_type = other DNA; note = Synthetic coding sequence
atgtctgctgccaaccctgagacccccaacagcaccatcagccgggaggccagcacccagagcagcagcgctgctgccagccagggctgggtgctgcctgagggcaagatcgtgcccaacacagtgtttgtgggcggcattgatgccaggatggatgaaacagagatcggcagctgcttcggccgctatggctctgtgaaggaggtgaagatcatcaccaacagaactggagtgtccaagggctacggctttgtgtcctttgtgaatgatgtggatgtgcagaagatcgtgggcagccagatccacttccacggcaagaagctgaagctgggccctgccatcaggaagcagaagctgtgtgcccggcacgtgcagccccggcccctggtggtgaaccccccacctccaccccagttccagaatgtgtggaggaaccccaacacagagacctacctgcagccccagatcacccccaaccctgtgacccagcacgtgcaggcctacagcgcctacccccacagccctggccaggtgatcaccggctgccagctgctggtgtacaactaccaggagtaccccacctacccagacagcgccttccaggtgaccaccggctaccagctgcctgtgtacaactaccagcccttccctgcctaccccaggagccccttccaggtgacagctggctaccagctgcctgtgtacaactaccaggccttccctgcctaccccaacagccccttccaggtggccaccggctaccagtttcctgtgtacaactaccagcccttccctgcctaccccagcagccccttccaggtgacagctggctaccagctgcctgtgtacaactaccaggccttccctgcctaccccaacagccccttccaggtggccaccggctaccagtttcctgtgtacaactaccaggccttccctgcctaccccaacagccctgtgcaggtgaccaccggctaccagctgcctgtgtacaactaccaggccttccctgcctaccccaacagcgctgtgcaggtgaccaccggctaccagttccacgtgtacaactaccagatgccaccccagtgccctgtgggggagcagaggaggaacctgtggacagaggcctacaagtggtggtacctggtgtgcctgatccagaggcgggactag

SEQ ID NO: 21561 - DNA, 1143 bp, synthetic construct
  source 1..1143: mol_type = other DNA; note = Synthetic coding sequence
atggagaagaagaagatggtgacccagggcaaccaggagcccaccaccaccccagatgccatggtgcagcccttcaccaccatccccttccccccaccaccccagaatggcatccccacagaatatggagtgccccacacccaggactatgccggccagacaggagagcacaacctgaccctgtatggcagcacccaggcccacggggagcagagcagcaacagccccagcacccagaatggcagcctgaccacagaaggaggagcccagacagatggccagcagagccagacccagagcagcgagaacagcgagagcaagagcacccccaagaggctgcacgtgagcaacatccccttccgcttccgggaccctgacctgcggcagatgtttggccagtttgggaagatcctggatgtggagatcatcttcaatgaaagaggcagcaagggcttcggctttgtgacctttgagaacagcgcagatgctgaccgggcccgggagaagctgcatggaacagtggtggagggcaggaagattgaggtgaacaatgccacagcccgggtgatgaccaacaagaagatggtgaccccctatgccaacggctggaagctgagccctgtggtgggcgctgtgtatggccctgagctgtatgctgccagcagcttccaggctgatgtgtccctgggcaatgatgctgctgtgcccctgagcggccggggcggcatcaacacctacatccccctcatcagcctgcccctggtgcccggcttcccctaccccacagctgccaccacagctgctgccttccggggggcccacctgcggggccggggccgcacagtgtatggagctgtgcgggctgtgcccccaacagccatcccagcctacccaggagtggtgtaccaggacggcttctatggagctgacctgtatggaggctacgccgcctaccgctatgcccagcctgccacagccacagctgccacagctgctgctgctgctgctgctgcctacagtgatggctacggccgggtgtacacagctgacccctaccacgccctggccccagctgccagctatggagtgggcgctgtggccagcctgtaccggggcggctacagcagatttgccccctactag

SEQ ID NO: 21562 - DNA, 1614 bp, synthetic construct
  source 1..1614: mol_type = other DNA; note = Synthetic coding sequence
atggaccctggagatgctgccatcctggagagcagcctgcgcatcctgtaccgcctgtttgagagcgtgctgccccccctgcctgctgccctgcagagcaggatgaatgtcatcgaccacgtgcgggacatggctgctgctggcctgcacagcaatgtgcggctgctgagcagcctgctgctgaccatgagcaacaacaaccctgagctgttcagccccccccagaagtaccagctgctggtgtaccacgccgacagcctcttccatgacaaggagtacagaaatgctgtgtccaagtacaccatggccctgcagcagaagaaggccctgagcaagaccagcaaggtgcggcccagcacaggcaacagcgccagcaccccccagagccagtgcctgcccagcgagattgaggtgaagtacaagatggccgagtgctacaccatgctgaagcaggacaaggatgccatcgccatcctggatggcatccccagccggcagaggacccccaagatcaacatgatgctggccaacctgtacaagaaggccggccaggagcggcccagcgtgaccagctacaaggaggtgctgcggcagtgccccctggccctggatgccatcctgggcctgctgagcctgtctgtgaagggagctgaggtggcctccatgaccatgaatgtcatccagacagtgcccaacctggactggctgtctgtgtggatcaaggcctatgcctttgtgcacactggagacaacagccgggccatcagcaccatctgcagcctggagaagaagagcctgctgcgggacaacgtggacctgctgggcagcctggccgacctgtacttccgggccggggacaacaagaacagcgtgctgaagtttgagcaggcccagatgctggacccctacctgatcaagggcatggatgtgtatggctacctgctggcccgggagggccgcctggaggatgtggagaacctgggctgccgcctcttcaacatcagtgaccagcacgccgagccctgggtggtgtctggctgccacagcttctacagcaagcgctacagccgggccctgtacctgggcgccaaggccatccagctgaacagcaacagcgtgcaggccctgctgctgaagggagctgccctgaggaacatgggccgggtgcaggaggccatcatccacttccgggaggccatccggctggccccctgccgcctggactgctatgagggcctgattgagtgctacctggccagcaacagcatccgggaggccatggtgatggccaacaacgtgtacaagaccctgggcgccaatgcccagaccctgaccctgctggccaccgtgtgcctggaggaccctgtgacccaggagaaggccaagaccctgctggacaaggccctgacccagaggccagactacatcaaggctgtggtgaagaaggccgagctgctgagccgggagcagaagtatgaagatggcatcgccctgctgagaaatgccctggccaaccagagcgactgtgtgctgcaccgcatcctgggggacttcctggtggccgtgaatgagtaccaggaggccatggaccagtacagcatcgccctgaggtag

SEQ ID NO: 21563 - DNA, 351 bp, synthetic construct
  source 1..351: mol_type = other DNA; note = Synthetic coding sequence
atggccttcatgaccaggaagctgtgggacctggagcagcaggtgaaggcccagacagatgagatcctgagcaaggaccagaagattgctgccctggaggacctggtgcagaccctgcggccccaccctgctgaggccaccctgcagaggcaggaggagctggagaccatgtgtgtgcagctgcagaggcaggtgcgggagatggagcgcttcctgagtgactatggcctgcagtgggtgggggagcccatggaccaggaggacagcgagagcaagacagtgtctgaacatggagagcgggactggatgacagccaagaagttctggaagccaggccgggccggccgctag

SEQ ID NO: 21564 - DNA, 285 bp, synthetic construct
  source 1..285: mol_type = other DNA; note = Synthetic coding sequence
atgacaggcagcaggaactggagggccacccgggacatgtgccgctaccgccacaactacccagacctggtggagcgggactgcaatggagacacccccaacctgtccttctacagaaatgagatccgcttcctgcccaacggctgcttcatcgaggacatcctgcagaactggacagacaactatgacctgctggaggacaaccacagctacatccagtggctgttccccctgcgggagcccggggtgaactggcacgccaagcccctgaccctgcgggagtag

SEQ ID NO: 21565 - DNA, 1029 bp, synthetic construct
  source 1..1029: mol_type = other DNA; note = Synthetic coding sequence
atgaggttctgggccccctggggcagcaggaccccatctggccgcagcctgtggacagatcctgtgacctactacacagccctgcacatcgctgtgctgaggaaccagcctgacatggtggagctgctggtgcaccacggggctgatgtgaacagaagagaccgcatccacgagagcagccccctggacctggccagcgaggagcctgagcggctgccctgcctgcagaggctgctggacctgggcgcagatgtgaatgctgctgacaagcacggcaagacagccctgctgcacgccctggccagcagtgatggagtgcagatccacaacacagagaacatccggctgctgctggagggcggcgcagatgtgaaggccaccaccaaggatggagacacagtgttcacctgcatcatcttcctgctgggggagaccgtgggcggggacaaggaggaggcccagatgatcaaccgcttctgcttccaggtgacccggctgctgctggcccacggggctgaccccagcgagtgcccagcccacgagagcctgacccacatctgcctgaagagcttcaagctgcacttccccctgctgcgcttcctgctggagagcggggccgcctacaactgcagcctgcatggagccagctgctggagcggcttccacatcatctttgagcggctgtgcagccaccctggctgcacagaagatgagagccatgctgacctgctgaggaaggccgagaccgtgctggacctgatggtgaccaacagccagaagctgcagctgcctgaaaattttgacatccaccctgtgggcagcctggccgagaagatccaggccctgcacttcagcctgcggcagctggagagctaccccccacccctgaagcacctgtgccgggtggccatccggctgtacctgcagccctggcctgtggatgtgaaggtgaaggccctgcccctgcctgaccggctgaagtggtacctgctgtctgagcacagcggctctgtggaggatgacatctag

SEQ ID NO: 21566 - DNA, 3192 bp, synthetic construct; identical to SEQ ID NO: 20250
  source 1..3192: mol_type = other DNA; note = Synthetic coding sequence

SEQ ID NO: 21567 - DNA, 96 bp, synthetic construct
  source 1..96: mol_type = other DNA; note = Synthetic coding sequence
atgtctgatgaggtgttcagcaccaccctggcctacaccaagagccccaaggtgaccaagaggaccaccttccaggatgagctgatccgggcctag

SEQ ID NO: 21568 - DNA, 606 bp, synthetic construct
  source 1..606: mol_type = other DNA; note = Synthetic coding sequence
atgcccctgcagctgaagaacccccggctgcggcagaagagcaggacccgctgcaacaagagccagaagaaggccgagctgctggacaatgagaagccagctgctgtggtggcccccatcaccaccggctacacagtgaagatcagcaactacggctgggaccagagcgacaagtttgtgaagatctacatcaccctgactggagtgcaccaggtgcccacagaaaatgtgcaggtgcacttcacagagaggagctttgacctgctggtgaagaacctgaatggcaagagctacagcatgattgtgaacaacctgctgaagcccatctctgtggagggcagcagcaagaaggtgaagacagacacagtgctgatcctgtgcaggaagaaggtggagaacacccgctgggactacctgacccaggtggagaaggagtgcaaggagaaggagaagcccagctatgacacagaaacagaccccagcgagggcctgatgaatgtgctgaagaagatctatgaagatggagatgatgacatgaagaggaccatcaacaaggcctgggtggagagccgggagaagcaggccaagggggacacagagttctag

SEQ ID NO: 21569 - DNA, 480 bp, synthetic construct; identical to SEQ ID NO: 20848
  source 1..480: mol_type = other DNA; note = Synthetic coding sequence

SEQ ID NO: 21570 - DNA, 4599 bp, synthetic construct
  source 1..4599: mol_type = other DNA; note = Synthetic coding sequence
atgcagcgggagctggtgtatgcccggggagatggccctggggccccccggcccggcagcacagcccaccccccccacgccatccccaacagcccccccagcacccctgtgccccacagcatgccacccagccccagccgcatcccctacggcggcaccaggtccatggtggtgcctggaaatgccaccatcccccgggaccgcatcagcagcctgcctgtgtcccggcccatcagccccagccccagcgccatcctggagaggagagatgtgaagccagatgaggacatgtctgggaagaacatcgccatgtacagaaatgaaggcttctacgccgacccctacctgtaccacgagggccgcatgagcatcgccagcagccacggcggccaccccctggatgtgcctgaccacatcatcgcctaccacaggacagccatccgcagcgccagcgcctactgcaaccccagcatgcaggccgagatgcacatggagcagagcctgtaccggcagaagagcaggaagtacccagacagccacctgcccaccctgggcagcaagaccccaccagccagcccccaccgggtgtctgacctgaggatgattgacatgcacgcccactacaatgcccacggccccccccacaccatgcagcctgaccgggccagccccagccggcaggccttcaagaaggagcccggcaccctggtgtacatcgagaagcccaggtctgctgctggcctgagcagcctggtggacctgggcccccccctgatggagaagcaggtgtttgcctacagcacagccaccatccccaaggaccgggagaccagcgagaagatgatgaagaccacagccaacagaaaccacacagattctgctggcaccccccacgtgtctgggggcaagatgctgagcgccctggagagcacagtgccccccagccagcccccacctgtgggcaccagcgccatccacatgagcctgctggagatgagaagatctgtggccgagctgcggctgcagctgcagcagatgaggcagctgcagctgcagaaccaggagctgctgcgggccatgatgaagaaggccgagctggagatcagcggcaaggtgatggagaccatgaagaggctggaggaccctgtgcagaggcagagggtgctggtggagcaggagcggcagaagtacctgcacgaggaggagaagatcgtgaagaagctgtgtgagctggaggactttgtggaggacctgaagaaggacagcacagctgccagccggctggtgaccctgaaggatgtggaggatggagccttcctgctgcggcaggtgggggaggccgtggccaccctgaagggggagttccccaccctgcagaacaagatgagggccatcctgcgcatcgaggtggaggccgtgcgcttcctgaaggaggagccccacaagctggacagcctgctgaagagggtgcgctccatgacagatgtgctgaccatgctgcggagacatgtgacagatggcctgctgaagggcacagatgctgcccaggccgcccagtacatggccatggagaaggccacagctgctgaggtgctgaagagccaggaggaggccgcccacaccagcggccagcccttccacagcactggagcccctggagatgccaagtctgaggtggtgcccctgagcggcatgatggtgagacatgcccagagcagccctgtggtgatccagcccagccagcacagcgtggccctgctgaacccagcccagaacctgccccacgtggccagcagccctgctgtgccccaggaggccaccagcaccctgcagatgagccaggccccccagagcccccagatccccatgaatggcagcgccatgcagagcctcttcatcgaggagatccacagcgtgtctgccaagaacagagctgtgtccattgagaaggccgagaagaagtgggaggagaagaggcagaacctggaccactacaacgggaaggagtttgagaagctgctggaggaggcccaggccaacatcatgaagagcatccccaacctggagatgcccccagccaccggccccctgcccagaggagatgcccctgtggacaaggtggagctgtctgaggacagccccaacagcgagcaggacctggagaagctgggcggcaagagccccccacctcctcctcctccaccccggcgcagctacctgcccggcagcggcctgaccaccaccaggtctggagatgtggtgtacacaggcaggaaggagaacatcacagccaaggccagcagtgaagatgctggccccagcccccagacccgggccaccaagtacccagctgaggagcccgccagcgcctggacccccagccccccacctgtgaccaccagcagcagcaaggatgaggaggaggaggaggaggagggggacaagatcatggccgagctgcaggccttccagaagtgcagcttcatggatgtgaacagcaacagccatgctgagcccagcagagctgacagccacgtgaaggacaccaggtctggggccaccgtgccccccaaggagaagaagaacctggagttcttccatgaagatgtgaggaagagtgatgtggagtatgaaaatggcccccagatggagttccagaaggtgaccaccggggctgtgcggcccagcgacccccccaagtgggagcggggcatggagaacagcatcagtgatgccagcaggaccagcgagtacaagacagagatcatcatgaaggagaacagcatcagcaacatgagcctgctgcgggacagcaggaactacagccaggagaccgtgcccaaggccagctttggcttcagcggcatcagccccctggaggatgagatcaacaagggcagcaagatcagcggcctgcagtacagcatcccagacacagagaaccagaccctgaactacggcaagaccaaggagatggagaagcagaacacagacaagtgccacgtgagcagccacacccggctgacagagagctctgtgcatgacttcaagacagaggaccaggaggtgatcaccacagactttggccaggtggtgctgcggcccaaggaggcccggcatgccaacgtgaaccccaatgaagatggagagagcagcagcagcagccccacagaagaaaatgctgccacagacaacatcgccttcatgatcacagagaccaccgtgcaggtgctgagcagcggggaggtgcatgacatcgtgtcccagaagggggaggacatccagacagtgaacattgatgccaggaaggagatgaccccccggcaggagggcacagacaatgaagatcctgtggtgtgcctggacaagaagcctgtgatcatcatctttgatgagcccatggacatccgcagcgcctacaagaggctgagcaccatctttgaagaatgtgatgaggagctggagaggatgatgatggaggagaagattgaggaggaggaggaggaggagaatggagacagcgtggtgcagaacaacaacaccagccagatgagccacaagaaggtggcccctggcaacctgaggacaggccagcaggtggagaccaagagccagccccacagcctggccacagagaccaggaaccctgggggccaggagatgaacagaacagagctgaacaagttcagccacgtggacagccccaacagcgagtgcaagggggaggatgccacagatgaccagtttgagagccccaagaagaagttcaagttcaagttccccaagaagcagctggccgccctgacccaggccatcagaacaggcaccaagacaggcaagaagaccctgcaggtggtggtgtatgaggaggaggaggaggatggcaccctgaagcagcacaaggaggccaagagatttgagatcgcccggagccagcctgaggacacccccaccagcatccccagcgccagcaggaagggcagcagcggggccccccagaccagcaggatgcctgtgcccatgtctgccaagaacagacctggcaccctggacaagccaggcaagcagagcaagctgcaggacccccggcagtaccggcaggccaatggaagtgccaagaagtctggaggagacttcaagcccaccagccccagcctgcctgccagcaagatcccagccctgagccccagcagcggcaagagcagcagcctgcccagcagcagcggggacagcagcaacctgcccaaccccccagccaccaagcccagcatcgccagcaaccccctgagcccccagacaggccccccagcccacagcgccagcctcatccccagcgtgtccaatggcagcctgaagttccagagcctgacccacacaggcaagggccaccacctgtccttcagcccccagagccagaatggccgggcccccccacccctgtccttcagcagcagcccccccagccctgccagctctgtgtccctgaaccagggcgccaagggcaccaggaccatccacacccccagcctgaccagctacaaggcccagaatggcagcagcagcaaggccacccccagcacagccaaggagaccagctag

SEQ ID NO: 21571 - DNA, 1566 bp, synthetic construct
  source 1..1566: mol_type = other DNA; note = Synthetic coding sequence
atgaccagcgccttcaagctggacttcctgcctgacatgatggtggagggccgcctgctggtgcctgaccgcatcaatggaacagccaacaagatgaatggagccctggaccacagcgaccagcctgaccctgatgccatcaagatgtttgtgggccagatccccaggtcctggagcgagaaggagctgaaggagctgtttgagccctacggggctgtgtaccagatcaacgtgctgcgggacaggagccagaaccccccccagagcaagggctgctgctttgtgaccttctacaccaggaaggccgccctggaggcccagaatgccctgcacaacatcaagaccctgcccggcatgcaccaccccatccagatgaagccagctgacagcgagaagagcaatgctgtggaggacaggaagctgttcatcggcatggtgtccaagaagtgcaatgaaaatgacatccgggtgatgttcagccccttcggccagattgaagaatgtcgcatcctgcggggcccagatggcctgagccggggctgtgcctttgtgaccttcagcacccgggccatggcccagaatgccatcaaggccatgcaccagagccagaccatggagggctgcagcagccccatcgtggtgaagtttgctgacacccagaaggacaaggagcagaggcggctgcagcagcagctggcccagcagatgcagcagctgaacacagccacctggggcaacctgaccggcctgggcggcctgaccccccagtacctggccctgctgcagcaggccaccagcagcagcaacctgggcgccttcagcggcatccagcagatggccggcatgaatgccctgcagctgcagaacctggccaccctggccgctgctgctgctgctgcccagaccagcgccaccagcaccaatgccaaccccctgagcaccaccagcagcgccctgggcgccctgaccagccctgtggccgccagcacccccaacagcacagctggagctgccatgaacagcctgaccagcctgggcaccctgcagggcctggccggggccaccgtgggcctgaacaacatcaatgccctggccgtggcccagatgctgagcggcatggccgccctgaatggaggcctgggcgccaccggcctgaccaatggaacagctggcaccatggatgccctgacccaggcctacagcggcatccagcagtatgctgctgctgccctgcccaccctgtacagccagagcctgctgcagcagcagagcgctgctggcagccagaaggagggccctgagggcgccaacctcttcatctaccacctgccccaggagtttggagaccaggacatcctgcagatgttcatgccctttggaaatgtcatcagcgccaaggtgttcatcgacaagcagaccaacctgagcaaatgttttggatttgtgtcctatgacaaccctgtgtctgcccaggccgccatccaggccatgaatggcttccagatcggcatgaagaggctgaaggtgcagctgaagaggagcaagaatgacagcaagccctactag

SEQ ID NO: 21572 - DNA, 315 bp, synthetic construct
  source 1..315: mol_type = other DNA; note = Synthetic coding sequence
atgtctgagcagggcgacctgaaccaggccatcgccgaggagggcggcacagagcaggagacagccaccccagaaaatggcatcgtgaagtctgagagcctggatgaggaggagaagctggagctgcagaggcggctggaggcccagaaccaggagaggaggaagagcaagagcggggccggcaagggcaagctgaccaggagcctggccgtgtgtgaggagagcagcgcccggcctggaggagagagcctgcaggaccaggagagcatccacctgcagctgagcagcttcagcagcctgcaggaggaggactag

SEQ ID NO: 21573 - DNA, 1653 bp, synthetic construct
  source 1..1653: mol_type = other DNA; note = Synthetic coding sequence
atggagcccccccaggagaccaaccggcccttcagcaccctggacaacagaagtggccaggtgcaggtgctgagcgccacccccctgctgcagaggaacccctacagcagcccagacatcatgcacatcaagggcagcgaggccagctctgtgccctatgccctgaaccagggcaccacagccctgcccaagaacaagaaccaggagggcaccggccaccggctgctgaacatgctgaggaagaccctgaaggagagtgacagcgaggagctggagatcacccaggagacccccaacctggtgccctttggagatgtggtgggctgcctgggcatccacatcaagaactgccgccacttcatgcccaagatcagcctgcagcactacgccaacctcttcatccgcatcagcatcaacaaggctgtgaagtgcaccaagatgtgcagcctgctgagcaagaatgatgagaagaacacagtcatcaagtttgatgaggtgaagtacttctctgtgcaggtgcccaggagatatgatgacaagaggaacaacatcctgctggagctgatccagtatgacaaccgggagaagagggccttcctgctgggctctgtgcagatccacctgtatgaagtcatccagaagggctgcttcatcgaggaggtgcaggtgctgcacggcaacatctttgtgtgccgcctggaggtggagttcatgttctcctatggcaactttggctacggcttcagccaccagctgaagcccctgcagaagatcacagagcccagcatgttcatgaacctggcccctcctcctgagaggacagatcctgtgaccaaggtgatcaccccccagacagtggagtacccagccttcctgagcccagacctgaatgtgacagtgggcaccccagctgtgcagagcagcaaccagcccagcgtggtgcggctggagaagctgcagcagcagccccgggagcggctggagaagatgaagaaggagtacagaaacctgaacacctggattgacaaggccaactacctggagagcatcctgatgcccaagctggagcacaaggacagcgaggagaccaacattgatgaggccagcgagaacaccaagagcaaccaccctgaggaggagctggagaacatcgtgggcgtggacatccccctggtgaatgaggaggccgagaccacagccaatgagctgctggacaatgacagcgagaagggcctgaccatccccaccctgaaccagagcgaccaggacaacagcacagcagatgccagcaagaatgatgagagcacccccagccccacagaggtgcacagcctgtgcaccatcagcaaccaggagaccatcaaggccggccgcatcccccccctgggggagcggcagagcgagagcatgccagacaggaagatgaagaatgtgttcttccccctggaggtgaagctgaaggacaactaccccagcatcctgaaggctgacagcagcctgtctgaggtgaacctgcggagcatctgcatcaaccccaagagcaggaacctggacagcagccccacagagatctcctggcagaacaacaacctgaacctggccgagagagaaaatacaggcctggtgtccacccggctgaagatcaagaggtag

SEQ ID NO: 21574 - DNA, 363 bp, synthetic construct
  source 1..363: mol_type = other DNA; note = Synthetic coding sequence
atgagcatcagcagtgatgaggtgaacttcctggtgtaccgctacctgcaggagagcggcttcagccacagcgccttcaccttcggcatcgagagccacatcagccagagcaacatcaacggggccctggtgcccccagctgccctgatcagcatcatccagaagggcctgcagtatgtggaggccgaggtgtccatcaatgaagatggcaccctgtttgatggccggcccatcgagagcctgagcctgattgatgctgtgatgccagatgtggtgcagacccggcagcaggcctacagagacaagctggcccagcagcaggccgctgctgctgctgctgctgctgctgctgccagccagtag

SEQ ID NO: 21575 - DNA, 222 bp, synthetic construct
  source 1..222: mol_type = other DNA; note = Synthetic coding sequence
atgagctactaccagaggcccttcagccccagcgcctacagcctgcctgccagcctgaacagcagcatcgtgatgcagcacggcaccagcctggacagcacagacacctacccccagcacgcccagagcctggatggcaccaccagcagcagcatccccctgtaccgcagcagcgaggaggagaagagggtgaccgtcatcaaggccccccactacccctag

SEQ ID NO: 21576 - DNA, 717 bp, synthetic construct
  source 1..717: mol_type = other DNA; note = Synthetic coding sequence
atgacagaggacagccagaggaacttccgctctgtgtactatgagaaggtgggcttccggggcgtggaggagaagaagagcctggagatcctgctgaaggatgaccggctgggcatcctgcccccccaccacgagagccacgccaaggtgatgatgtacaggaaggagcagtacctggatgtgctgcacgccctgaaggtggtgcgctttgtgtctgatgccaccccccaggccgaggtgtacctgaggatgtaccagctggagagcggcaagctgcccaggagccccagcttccccctggagccagatgatgaggtgttcctggccatcgccaaggccatggaggagatggtggaggacagcgtggactgctactggatcaccaggagatttgtgaaccagctgaacaccaagtacagagacagcctgccccagctgcccaaggcctttgagcagtacctgaacctggaggatggccgcctgctgacccacctgaggatgtgcagcgctgcccccaagctgccctatgacctgtggttcaagcgctgctttgctggctgcctgcctgagagcagcctgcagagggtgtgggacaaggtggtgtctggcagctgcaagatcctggtgtttgtggccgtggagatcctgctgaccttcaagatcaaggtgatggccctgaacagcgctgagaagatcaccaagttcctggagaactag

SEQ ID NO: 21577 - DNA, 1620 bp, synthetic construct; identical to SEQ ID NO: 19050
  source 1..1620: mol_type = other DNA; note = Synthetic coding sequence

SEQ ID NO: 21578 - DNA, 609 bp, synthetic construct
  source 1..609: mol_type = other DNA; note = Synthetic coding sequence
atgggccagaaggtgactggaggcatcaagacagtggacatgagggaccccacctaccggcccctgaagcaggagctgcagggcctggactactgcaagcccacccggctggacctgctgctggacatgcctcctgtgtcctatgatgtgcagctgctgcacagctggaacaacaatgacaggagcctgaatgtgtttgtgaaggaggatgacaagctgatcttccaccgccaccctgtggcccagagcacagatgccatccggggcaaggtgggctacacccggggcctgcacgtgtggcagatcacctgggccatgaggcagaggggcacccatgctgtggtgggcgtggccacagcagatgcccccctgcacagcgtgggctacaccaccctggtgggcaacaaccacgagagctggggctgggacctgggcaggaacagactctaccatgatggcaagaaccagcccagcaagacctacccagccttcctggagccagatgagaccttcatcgtgcctgacagcttcctggtggccctggacatggatgatggcaccctgtccttcatcgtggatggccagtacatgggcgtggccttcagatag

SEQ ID NO: 21579 - DNA, 174 bp, synthetic construct
  source 1..174: mol_type = other DNA; note = Synthetic coding sequence
aacctgcccatctgcatggccaagacccacctgagcctgagccaccagcctgacaagaagggcgtgccccgggacttcatcctgcccatcagtgatgtgcgggccagcattggagctggcttcatctaccccctggtgggcaccggcggccgggaggcccccctgtggctgtag

SEQ ID NO: 21580 - DNA, 468 bp, synthetic construct
  source 1..468: mol_type = other DNA; note = Synthetic coding sequence
atgaacaaccagaagcagcagaagcccaccctgagcggccagcgcttcaagaccaggaagagagatgagaaggagagatttgaccccacccagttccaggactgcatcatccagggcctgacagaaacaggaacagacctggaggccgtggccaagttcctggatgccagcggggccaagctggactaccgccgctatgcagagaccctgtttgacatcctggtggccggcggcatgctggcccctgggggcaccctggctgatgacatgatgaggacagatgtgtgtgtgtttgctgcccaggaggacctggagaccatgcaggcctttgcccaggtgttcaacaagctgatccgccgctacaagtacctggagaagggctttgaagatgaggtgaagaagctgctgctcttcctgaagggcttcagcgagagcgagaggaacaagctggccatgctgaccggctag

SEQ ID NO: 21581 - DNA, 528 bp, synthetic construct
  source 1..528: mol_type = other DNA; note = Synthetic coding sequence
tgatttgatgaccagaggaggatgagcctgcacctgcatggagctgactgtgaccccaagacccagaatgagatgaacatctgtgaggaggagtttgtggagtacaagaacagagatgccatcagcgccctgatgcccctcttcagcgaggaggagagcagtgatggcagcaagcacaacaacggcctgcctgaccacatcagcgcccagctgcagaacacctacaccctgaaggccttcaccgtgggcagcaaatgtgtggtgtggagcagcctgaggaacacctggagcaaatgtgagatcctggagacagctgaggagggcaccagggtgctgaacctgagcaatggcatggaggagatcgtgaacccagaaaatgtgtggaatggcatccccaagctggacaagagccccccagaggccgtgtcccagagggtgggcaaggacctgtacttcatgtctgtgggggacaccaccatcaaggagaagggctttggaggagatggagacctgactgtggacctgtag

SEQ ID NO: 21582 - DNA, 2814 bp, synthetic construct
  source 1..2814: mol_type = other DNA; note = Synthetic coding sequence
tgactgcggagccagcccggctgcggctgcctgtggcaggaggcccccacccacagcacaggccccagcgtggagggggaggcccccagcagcgagaccggcaccagcctggacagccccagcgcctacccccagggccccctggtgcccggcagcagcctgagcccagaccactatgagcacacctctgtgggcgcctacggcctgtacagcggccccccaggccagcagcagaggacccggcggcccaagctgcagcacagcaccagcatcctgaggaagcaggccgaggaggaggccatcaagaggagccgcagcctgtctgagagctatgagctgagcagtgacctgcaggacaagcaggtggagatgctggagaggaaatatggaggccgcctggtgaccaggcatgctgcccggaccatccagacagccttccggcagtaccagatgaacaagaactttgagcggctgcggagctccatgtctgagaacaggatgagcagaagaattgtgctgagcaacatgaggatgcagttctcctttgagggccctgagaaggtgcacagcagctactttgagggcaagcaggtgtctgtgaccaatgatggcagccagctgggcgccctggtgtccccagaatgtggggacctgtctgagcccaccaccctgaagagccctgcccccagcagtgactttgctgatgccatcacagagctggaggatgccttcagccggcaggtgaagagcctggccgagagcattgatgatgccctgaactgccgcagcctgcacacagaggaggccccagccctggatgctgcccgggcccgggacacagagccccagacagccctgcacggcatggaccacaggaagctggatgagatgacagccagctacagtgatgtgaccctgtacattgatgaggaggagctgagcccccccctgcccctgagccaggccggggaccggcccagcagcacagaaagtgacctgcggctgcgggccggcggggccgccccagactactgggccctggcccacaaggaggacaaggctgacacagacaccagctgccgcagcacccccagcctggagcggcaggagcagaggctgcgggtggagcacctgcccctgctgaccatcgagcccccaagtgacagctctgtggacctgagtgacagaagtgagcggggcagcctgaagaggcagagcgcctatgaaagaagcctgggcggccagcagggcagccccaagcacggcccccacagcggggcccccaagagcctgccccgggaggagcctgagctgcggccccggcccccccggcccctggacagccacctggccatcaatggaagtgccaaccggcagagcaagtctgagagtgactacagtgatggagacaatgacagcatcaacagcaccagcaacagcaatgacaccatcaactgcagcagcgagagcagcagccgggacagcctgcgggagcagaccctgagcaagcagacctaccacaaggaggccagaaattcctgggacagccctgccttcagcaatgatgtgatcaggaagaggcactacagaattggcctgaacctcttcaacaagaagccagagaagggcgtgcagtacctgattgaaagaggatttgtgcctgacacccctgtgggcgtggcccacttcctgctgcagaggaagggcctgagccggcagatgattggagagttcctgggcaaccggcagaagcagttcaacagagatgtgctggactgtgtggtggatgagatggacttcagcaccatggagctggatgaggccctgaggaagttccaggcccacatccgggtgcagggcgaggcccagaaggtggagcggctgattgaggccttcagccagcgctactgcatctgcaaccctggggtggtgcggcagttcaggaacccagacaccatcttcatcctggcctttgccatcatcctgctgaacacagacatgtacagccccaacgtgaagccagagaggaagatgaagctggaggacttcatcaagaacctgcggggcgtggatgatggagaggacatcccccgggagatgctgatgggcatctatgagcgcatcaggaagcgggagctgaagaccaatgaagatcatgtgtcccaggtgcagaaggtggagaagctgattgtgggcaagaagcccatcggcagcctgcaccctggcctgggctgtgtgctgagcctgccccaccggcggctggtgtgctactgccgcctgtttgaggtgcctgaccccaacaagccccagaagctgggcctgcaccagcgggagatcttcctgttcaatgacctgctggtggtgaccaagatcttccagaagaagaagaacagcgtgacctacagcttccggcagagcttcagcctgtatggcatgcaggtgctgctgtttgagaaccagtactaccccaacggcatccggctgaccagctctgtgcctggagctgacatcaaggtgctgatcaacttcaatgcccccaacccccaggacaggaagaagttcacagatgacctgcgggagagcattgctgaggtgcaggagatggagaagcacagaattgaaagtgagctggagaagcagaagggcgtggtgcggcccagcatgagccagtgcagcagcctgaagaaggagagcggaaatggcaccctgagccgggcctgcctggatgacagctatgccagcggggagggcctgaagaggtctgccctgagcagcagcctgcgggacctgtctgaggccggcgtgcaccactag

SEQ ID NO: 21583 - DNA, 198 bp, synthetic construct
  source 1..198: mol_type = other DNA; note = Synthetic coding sequence
atggtggaggccgctgaccgggagaaggtggagctgctgaaccagctggaggaggagaagaggaaggtggaggacctgcagttccgggtggaggaggagagcatcaccaagggggacctggagcagaagagccagatcagcgaggaccctgaaaatgtggccaccgtgtctgagaagagccgcatcatggagctgtag

SEQ ID NO: 21584 - DNA, 630 bp, synthetic construct
  source 1..630: mol_type = other DNA; note = Synthetic coding sequence
atggacttcctgctgggcaaccccttcagcagccctgtgggccagagaattgagaaggccacagatggcagcctgcagagcgaggactgggccctgaacatggagatctgtgacatcatcaatgaaacagaggagggccccaaggatgccctgcgggctgtgaagaagagaattgtgggcaacaagaacttccacgaggtgatgctggccctgactgtgctggagacctgtgtgaagaactgtggccaccgcttccacgtgctggtggccagccaggactttgtggagagcgtgctggtgaggaccatcctgcccaagaacaacccccccaccatcgtgcatgacaaggtgctgaacctgatccagagctgggcagatgccttccgcagcagcccagacctgactggagtggtgaccatctatgaggacctgcggaggaagggcctggagttccccatgacagacctggacatgctgagccccatccacaccccccggggcccctgcagcacccagaggcacaaccaggaccgcatcctgtgggccctgaccccagccagcaagaggaccctggcctccatgctgcccctgtgccccccccggccctacagccctgtgacccggccctag

SEQ ID NO: 21585 - DNA, 255 bp, synthetic construct
  source 1..255: mol_type = other DNA; note = Synthetic coding sequence
atggctgacacagacctcttcatggagtgtgaggaggaggagctggagccctggcagaagatcagtgatgtgattgaggacagcgtggtggaggactacaacagcgtggacaagaccaccacagctggcaaccccctggtgcagcagggcggccagcccctcatcctgacccagaacccagcccctggcctgggcaccatggtgacccagcctgtgctgcggcctgtgcaggtgatgcagaatgccaaccactag

SEQ ID NO: 21586 - DNA, 618 bp, synthetic construct
  source 1..618: mol_type = other DNA; note = Synthetic coding sequence
atggccacccccctgggctggagcaaggccggcagcggctctgtgtgcctggccctggaccagctgagagatgtgattgagagccaggaggagctgatccaccagctgagaaatgtgatggtgctgcaggatgaaaattttgtgtccaaggaggagttccaggccgtggagaagaagctggtggaggagaaggccgcccacgccaagaccaaggtgctgctggccaaggaggaggagaagctgcagtttgccctgggggaggtggaggtgctgagcaagcagctggagaaggagaagctggcctttgagaaggccctgagctctgtgaagagcaaggtgctgcaggagagcagcaagaaggaccagctgatcaccaagtgcaatgaaattgagagccacatcatcaagcaggaggacatcctgaatggcaaggaaaatgagatcaaggagctgcagcaggtgatcagccagcagaagcagatcttcaggaaccacatgtctgacttccgcatccagaagcagcaggagagctacatggcccaggtgctggaccagaagcacaagaaggccagcggcacccggcaggcccggagccaccagcacccccgggagaagtag

SEQ ID NO: 21587 - DNA, 330 bp, synthetic construct
  source 1..330: mol_type = other DNA; note = Synthetic coding sequence
atggagcccagcgcccagcagctgcagctggccgccagcctgcctgccaacctgagcaacttctgccagggcagcgagatgcccaccaccagcaggcctgccctggatgtgaagggcggcaccagccctgccaaggaggatgccaaccaggagatgagctctgtggcctacagcaacctggccgtgaaggacaggaaggctgtggccatcctgcactacccaggagtggccagcaatggcaccaaggccagcggggcccccaccagcagcagcggcagccccatcggcagccccaccaccaccccacccaccaagccacccagcttctag

SEQ ID NO: 21588 - DNA, 1737 bp, synthetic construct
  source 1..1737: mol_type = other DNA; note = Synthetic coding sequence
atgcctgagatccgggtgacccccctgggcgccggccaggatgtgggccgcagctgcatcctggtgtccattgctgggaagaatgtgatgctggactgtggcatgcacatgggcttcaatgatgaccggcgcttcccagacttctcctacatcacccagaatggccgcctgacagacttcctggactgtgtgatcatcagccacttccacctggaccactgtggggccctgccctacttcagcgagatggtgggctatgatggccccatctacatgacccaccccacccaggccatctgccccatcctgctggaggactacaggaagattgctgtggacaagaagggggaggccaacttcttcaccagccagatgatcaaggactgcatgaagaaggtggtggccgtgcacctgcaccagacagtgcagatcaaggtgggcagcgagagcgtggtgtacaccggggactacaacatgaccccagacagacacctgggcgccgcctggattgacaagtgccggcccaacctgctgatcacagagagcacctacgccaccaccatccgggacagcaagcgctgccgggagcgggacttcctgaagaaggtgcatgagaccgtggagcggggcggcaaggtgctgatccctgtgtttgccctgggccgggcccaggagctgtgcatcctgctggagaccttctgggagaggatgaacctgaaggtgcccatctacttcagcacaggcctgacagagaaggccaaccactactacaagctgttcatcccctggaccaaccagaagatcaggaagacctttgtgcagaggaacatgtttgagttcaagcacatcaaggcctttgaccgggcctttgctgacaaccctggccccatggtggtgtttgccaccccaggcatgctgcacgccggccagagcctgcagatcttcaggaagtgggccggaaatgagaagaacatggtgatcatgcctggctactgtgtgcagggcaccgtgggccacaagatcctgagcggccagaggaagctggagatggagggccggcaggtgctggaggtgaagatgcaggtggagtacatgtccttcagcgcccatgctgatgccaagggcatcatgcagctggtgggccaggccgagcctgagagcgtgctgctggtgcacggggaggccaagaagatggagttcctgaagcagaagattgagcaggagctgcgggtgaactgctacatgcctgccaacggggagaccgtgaccctgcccaccagccccagcatccctgtgggcatcagcctgggcctgctgaagcgggagatggcccagggcctgctgcctgaggccaagaagccccggctgctgcacggcaccctcatcatgaaggacagcaacttccggctggtgtcctctgagcaggccctgaaggagctgggcctggccgagcaccagctgcgcttcacctgccgggtgcacctgcatgacaccaggaaggagcaggagacagccctgcgggtgtacagccacctgaagtctgtgctgaaggaccactgtgtgcagcacctgcctgatggctctgtgacagtggagagcgtgctgctgcaggccgccgcccccagtgaagatcctggcaccaaggtgctgctggtgtcctggacctaccaggatgaggagctgggcagcttcctgaccagcctgctgaagaagggcctgccccaggcccccagctag

SEQ ID NO: 21589 - DNA, 570 bp, synthetic construct
  source 1..570: mol_type = other DNA; note = Synthetic coding sequence
atgcagcccatgagctttggctgggaccacagcctgcacaagaggaagaggctgccccctgtgaagaggagcctggtgtactacctgaagaaccgggaggtgcggctgcagaatgagaccagctacagccgggtgctgcacggctacgccgcccagcagctgcccagcctgctgaaggagcgggagttccacctgggcaccctgaacaaggtgtttgccagccagtggctgaaccaccggcaggtggtgtgtggcaccaagtgcaacaccctgtttgtggtggatgtgcagaccagccagatcaccaagatccccatcctgaaggaccgggagcccggcggcgtgacccagcagggctgcggcatccacgccatcgagctgaaccccagcaggaccctgctggccaccggcggggacaaccccaacagcctggccatctaccgcctgcccaccctggaccctgtgtgtgtgggagatgatggccacaaggactggatcttcagcatcgcctggatcagtgacaccatggctgtgtctggcagcagagatggctccatgggcctgtggtag

SEQ ID NO: 21590 - DNA, 2289 bp, synthetic construct; identical to SEQ ID NO: 20891
  source 1..2289: mol_type = other DNA; note = Synthetic coding sequence

SEQ ID NO: 21591 - DNA, 1362 bp, synthetic construct
  source 1..1362: mol_type = other DNA; note = Synthetic coding sequence
atggccggggctgctggccgggtgcaggaccgggccctgcggcgcttccccatcaccctgcctgtgggggacctgagcaacctgcacctgaaggaggagaagatcaagccagacaccaacggggctgtggtgaagaccaatgccaatgctgagaagacagatgaggaggagaaggaggaccgggccgcccagagcctgctgaacaagctgatccgcagcaacctggtggacaacaccaaccaggtggaggtgctgcagagggaccccaacagccccctgtacagcgtgaagagctttgaggagctgcggctgccccagaacctgattgcccagagccagagcggcaccgggaagacagctgcctttgtgctggccatgctgagccaggtggagcccgccaacaagtacccccagtgcctgtgcctgagccccacctatgagctggccctgcagacaggcaaggtgattgagcagatgggcaagttctacccagagctgaagctggcctatgctgtgcggggcaacaagctggagcggggccagaagatcagcgagcagatcgtgattggcaccccaggcaccgtgctggactggtgcagcaagctgaagttcatcgaccccaagaagatcaaggtgtttgtgctggatgaagcagatgtgatgattgccacccagggccaccaggaccagagcatccgcatccagaggatgctgcccaggaactgccagatgctgctcttcagcgccacctttgaggacagcgtgtggaagtttgcccagaaggtggtgcctgaccccaacgtcatcaagctgaagcgggaggaggagaccctggacaccatcaagcagtactacgtgctgtgcagcagcagagatgagaagttccaggccctgtgcaacctgtatggagccatcaccatcgcccaggccatgatcttctgccacaccaggaagacagcctcctggctggccgctgagctgagcaaggagggccaccaggtggccctgctgagcggggagatgatggtggagcagagagctgctgtgattgagcgcttccgggagggcaaggagaaggtgctggtgaccaccaacgtgtgtgcccggggcattgatgtggagcaggtgtctgtggtgatcaactttgacctgcctgtggacaaggatggcaacccagacaatgagacctacctgcacagaattggaagaacaggccgctttgggaagaggggcctggccgtgaacatggtggacagcaagcacagcatgaacatcctgaaccgcatccaggagcacttcaacaagaagattgagcggctggacacagatgacctggatgaaattgagaagatcgccaactag

SEQ ID NO: 21592 - DNA, 921 bp, synthetic construct
  source 1..921: mol_type = other DNA; note = Synthetic coding sequence
atggcccgggtgcccctgggccgcagcctgaccctgagcccccggctggagcacaacggcatgaccagcgcccaccacaacttccggctgcccggcagccgggacagccctgccagcgccagccaggtggccgagatcatcgacctggagtggtatgagaagtctgaggagacccacgccagccagatcgagctgctggagaccagcagcacccaggagcccctgaatgccagcgaggccttctgcccccgggactgcatggtgcctgtggtgtttcctggccctgtgtcccaggagggctgctgccagttcacctgtgagctgctgaagcacatcatgtaccagaggcagcagctgcccctgccctatgagcagctgaagcacttctacaggaagcccagcccccaggccgaggagatgctgaagaagaagccccgggccaccacagaggtgagcagcaggaagtgccagcaggccctggccgagctggagagcgtgctgagccacctggaggacttctttgcccggaccctggtgccccgggtgctgatcctgctgggcggcaatgccctgagccccaaggagttctatgagctggacctgagcctgctggccccctacagcgtggaccagagcctgagcacagctgcctgcctgcggcggctcttccgggccatcttcatggctgatgccttcagcgagctgcaggccccacccctgatgggcaccgtggtgatggcccagggccacaggaactgtggggaggactggttccggcccaagctgaactacagagtgcccagccggggccacaagctgactgtgaccctgagctgtggccggcccagcatccgcaccacagcctgggaggactacatctggttccaggcccctgtgaccttcaagggcttccgggagtag

SEQ ID NO: 21593 - DNA, 426 bp, synthetic construct
  source 1..426: mol_type = other DNA; note = Synthetic coding sequence
atgccccagctgctgcagaacatcaatggcatcatcgaggccttccgccgctatgccaggacagagggcaactgcacagccctgaccagaggagagctgaagaggctgctggagcaggagtttgctgatgtgattgtgaagccccatgaccctgccaccgtggatgaggtgctgcggctgctggatgaggaccacacaggcaccgtggagttcaaggagttcctggtgctggtgttcaaggtggcccaggcctgcttcaagaccctgtctgagagcgctgagggcgcctgtggcagccaggagagcggcagcctgcacagcggggccagccaggagctgggcttccggccccgggtgcggcccctggccctgcggggcagcgctgccatgaccgggaagctgagcccccgggccaggaaggagtag

SEQ ID NO: 21594 - DNA, 480 bp, synthetic construct; identical to SEQ ID NO: 20848
  source 1..480: mol_type = other DNA; note = Synthetic coding sequence

SEQ ID NO: 21595 - DNA, 1506 bp, synthetic construct
  source 1..1506: mol_type = other DNA; note = Synthetic coding sequence
atggacttcctgctgggcaaccccttcagcagccctgtgggccagagaattgagaaggccacagatggcagcctgcagagcgaggactgggccctgaacatggagatctgtgacatcatcaatgaaacagaggagggccccaaggatgccctgcgggctgtgaagaagagaattgtgggcaacaagaacttccacgaggtgatgctggcccacagcgcccggcggcacctgagcgccctgcaggtgctggagacctgtgtgaagaactgtggccaccgcttccacgtgctggtggccagccaggactttgtggagagcgtgctggtgaggaccatcctgcccaagaacaacccccccaccatcgtgcatgacaaggtgctgaacctgatccagagctgggcagatgccttccgcagcagcccagacctgactggagtggtgaccatctatgaggacctgcggaggaagggcctggagttccccatgacagacctggacatgctgagccccatccacaccccccagaggacagtgttcaacagcgagacccagagcggccaggacagcgtgggcacagacagcagccagcaggaggacagcggccagcacgccgcccccctgcctgccccacccatcctgagcggggacacccccatcgcccccaccccagagcagatcggcaagctgcggtctgagctggagatggtgtctggaaatgtgcgggtgatgtctgagatgctgacagagctggtgcccacccaggccgagcctgctgacctggagctgctgcaggagctgaacagaacctgccgggccatgcagcagagggtgctggagctgatcccccagatcgccaatgagcagctgacagaggagctgctgattgtgaatgacaacctgaacaacgtgttcctgcggcatgaaagatttgagcgcttcagaacaggccagaccaccaaggcccccagcgaggccgagcctgctgctgacctgattgacatgggccctgaccctgctgccactggaaacctgagcagccagctggccggcatgaacctgggcagcagctctgtgcgggccggcctgcagagcctggaggccagcggccgcctggaggatgaatttgacatgtttgccctgacccggggcagcagcctggccgaccagaggaaggaggtgaagtatgaggccccccaggccacagatggcctggccggggccctggatgcccggcagcagagcactggagccatccctgtgacccaggcctgcctgatggaggacatcgagcagtggctgagcacagatgtgggcaatgatgctgaggagcccaagggcgtgaccagcgaggagtttgacaagttcctggaggagcgggccaaggctgctgaccggctgcccaacctgagcagccccagcgctgagggccccccaggcccccccagcggccctgcccccaggaagaagacccaggagaaggatgatgacatgctgtttgccctgtag

SEQ ID NO: 21596 - DNA, 117 bp, synthetic construct
  source 1..117: mol_type = other DNA; note = Synthetic coding sequence
gagcctgtgtactttgctgagaaggtgatgagcctgggcaggaactggcaccggccctgcctgcgctgccagcgctgccacaagaccctgacagctggcagccacgccgaggtgtag

SEQ ID NO: 21597 - DNA, 1122 bp, synthetic construct; identical to SEQ ID NO: 19391
  source 1..1122: mol_type = other DNA; note = Synthetic coding sequence

SEQ ID NO: 21598 - DNA, 453 bp, synthetic construct
  source 1..453: mol_type = other DNA; note = Synthetic coding sequence
atgcacactggagaccccaagcaggacctggcctatgaaaggcagtatgagcagcagacctaccaggtgattcctgaggtgatcaagaacttcatccagtacttccacaagacagtgtctgacctgattgaccagaaggtgtatgagctgcaggccagccgggtgtccagtgatgtgattgaccagaaggtgtatgagatccaggacatctatgagaacagctggaccaagctgacagagcgcttcttcaagaacaccccctggccagaggccgaggccatcgccccccaggtgggcaatgatgctgtgttcctgatcctgtacaaggagctgtactaccgccacatctatgccaaggtgtctgggggccccagcctggagcagagatttgagagctactacaactactgcaacctcttcaactacatcctgaatgctgatggccctgcctag

SEQ ID NO: 21599 - DNA, 2136 bp, synthetic construct
  source 1..2136: mol_type = other DNA; note = Synthetic coding sequence
atggccatgcaggagaagtaccccacagagggcatcagccacgtgaccagccccaacttctgcagcagcagcggcagcccccccttccagcccatcaagagccacgtgaccatccccacagcccacgtgatgcccagcaccctgggcaccagccctgccaagcccaacagcacccctgtgggccccagcagcagcaagctgcccctgagcggcctggccgagagcgtgggcatgaccagaaatggagacctgggcgccatgaagcacagccctggcctgagccgggacctgatgtacttcagcggggccaccggggagaatggaattgagcagagctggttccctgctgtgggccacgagcggcaggaggaggccaggaagtttgacatccccagcatggagagcaccctgaaccagagcgccatgatggagaccctgtacagcgacccccaccaccgggtgcgcttccacaaccccaggaccagcaccagcaaggagctgtacagagtgctgcctgaggccaagaaggcccctggcagcggggctgtgtttgaaagaaatggcccccacagcaacagcagcggcgtgctgcccctgggcctgcagcctgcccctggcctgagcaagcccctgcccagccaggtgtggcagcccagcccagacacctggcacccccgggagcagagctgtgagctgagcacctgccggcagcagctggagctgatccggctgcagatggagcagatgcagctgcagaatggagccatctgccaccaccctgctgccttcggccccagcctgcccatcctggagcccgcccagtggatcagcatcctgaacagcaatgagcacctgctgaaggagaaggagctgctgattgacaagcagaggaagcacatcagccagctggagcagaaggtgcgggagagcgagctgcaggtgcacagcgccctgctgggccggcctgccccctttggagatgtgtgcctgctgcggctgcaggagctgcagcgggagaacaccttcctgcgggcccagtttgcccagaagacagaggccctgagccgggagaagattgacctggagaagaagctgagcgccagcgaggtggaggtgcagctgatccgggagagcctgaaggtggccctgcagaagcacagcgaggaggtgaagaagcaggaggagcgggtgaagggccgggacaagcacatcaacaacctgaagaagaagtgccagaaggagagcgagcagaaccgggagaagcagcagagaattgagaccctggagcgctacctggccgacctgcccaccctggaggaccaccagaagcagagccagcagctgaaggacagcgagctgaagagcacagagctgcaggagaaggtgacagagctggagagcctgctggaggagacccaggccatctgccgggagaaggagatccagctggagagcctgcggcagcgggaggccgagttcagcagcgctggccacagcctgcaggacaagcagagcgtggaggagaccagcggggagggccctgaggtggagatggagagctggcagaagagatatgacagcctgcagaagatcgtggagaagcagcagcagaagatggaccagctgcggagccaggtgcagagcctggagcaggaggtggcccaggaggagggcaccagccaggccctgcgggaggaggcccagaggcgggacagcgccctgcagcagctgaggacagctgtgaaggagctgtctgtgcagaaccaggacctgattgagaagaacctgaccctgcaggagcacctgcggcaggcccagcccggcagcccccccagcccagacacagcccagctggccctggagctgcaccaggagctggccagctgcctgcaggacctgcaggccgtgtgcagcatcgtgacccagagggcccagggccatgaccccaacctgagcctgctgctgggcatccacagcgcccagcaccctgagacccagctggacctgcagaagccagatgtgatcaagaggaagctggaggaggtgcagcagctgcggcgggacatcgaggacctgcggaccaccatgtctgacagatatgcccaggacatgggagagaactgtgtgacccagtag

SEQ ID NO: 21600 - DNA, 531 bp, synthetic construct
  source 1..531: mol_type = other DNA; note = Synthetic coding sequence
atggctgctgccactggagaccccggcctgagcaagctgcagtttgcccccttcagcagcgccctggatgtgggcttctggcatgagctgacccagaagaagctgaatgagtaccgcctggatgaggcccccaaggacatcaagggctactactacaatggagacagcgctggcctgcctgcccggctgaccctggagttcagcgcctttgacatgtctgcccccaccccagcccgctgctgcccagccatcggcaccctgtacaacaccaacaccctggagagcttcaagacagctgacaagaagctgctgctggagcaggccgccaatgagatctgggagagcatcaagagcggcacagccctggagaaccctgtgctgctgaacaagttcctgctgctgacctttgctgacctgaagaagtaccacttctactactggttctgctacccagccctgtgcctgcctgagagcctgcccctcatccagggccctgtgggcctggaccagcgcttcagcctgaagcagtag

SEQ ID NO: 21601 - DNA, 1443 bp, synthetic construct
  source 1..1443: mol_type = other DNA; note = Synthetic coding sequence
atgaagctgaaggagctggagaggcctgctgtgcaggcctggagccctgccagccagtaccccctgtacctggccaccggcaccagcgcccagcagctggacagcagcttcagcaccaacggcaccctggagatctttgaggtggacttccgggaccccagcctggacctgaagcacagaggagtgctgagcgccctgagccgcttccacaagctggtgtggggcagctttggaagtggcctgctggagagcagtggagtcatcgtgggcggcggggacaatggcatgctgatcctgtacaacgtgacccacatcctgagcagcggcaaggagcccgtcatcgcccagaagcagaagcacactggagctgtgcgggccctggacctgaaccccttccagggcaacctgctggccagcggggccagtgacagcgagatcttcatctgggacctgaacaacctgaatgtgcccatgaccctgggcagcaagagccagcagcccccagaggacatcaaggccctgtcctggaaccggcaggcccagcacatcctgagcagcgcccaccccagcggcaaggctgtggtgtgggacctgaggaagaatgagcccatcatcaaggtgtctgaccacagcaacaggatgcactgcagcggcctggcctggcacccagacatcgccacccagctggtgctgtgcagtgaagatgaccggctgcctgtgatccagctgtgggacctgcgctttgccagcagccccctgaaggtgctggagagccacagccggggcatcctgtctgtgtcctggagccaggctgatgctgagctgctgctgaccagcgccaaggacagccagatcctgtgcaggaacctgggcagcagcgaggtggtgtacaagctgcccacccagagctcctggtgctttgatgtgcagtggtgcccccgggaccccagcgtcttctctgctgccagcttcaacggctggatcagcctgtacagcgtgatgggccgctcctgggaggtgcagcacatgaggcaggccgacaagatcagcagcagcttcagcaagggccagcccctgccccccctgcaggtgcctgagcaggtggcccaggcccccctcatcccccccctgaagaagccacccaagtggatcagaagacccaccggggtgtcctttgccttcggcggcaagctggtgaccttcggcctgcccagcaccccagcccacctggtgccccagccctgcccccggctggtgttcatcagccaggtgaccacagagagcgagttcctgatgaggtctgctgagctgcaggaggccctgggcagcggcaacctgctgaactactgccagaacaagagccagcaggccctgctgcagagcgagaagatgctgtggcagttcctgaagccagcccgggacagcagcggggcccggaggtag

SEQ ID NO: 21602 - DNA, 1842 bp, synthetic construct; identical to SEQ ID NO: 18580
  source 1..1842: mol_type = other DNA; note = Synthetic coding sequence

SEQ ID NO: 21603 - DNA, 1446 bp, synthetic construct; identical to SEQ ID NO: 21094
  source 1..1446: mol_type = other DNA; note = Synthetic coding sequence

SEQ ID NO: 21604 - DNA, 537 bp, synthetic construct
  source 1..537: mol_type = other DNA; note = Synthetic coding sequence
atgagcagcaatgaatgcttcaagtgtggccgcagcggccactgggcccgggagtgccccactggaggcggccggggccggggcatgaggagccggggccggggcggcttcaccagtgaccggggcttccagtttgtgagcagcagcctgcctgacatctgctaccgctgtggggagagcggccacctggccaaggactgtgacctgcaggaggatgaggcctgctacaactgtggccggggcggccacatcgccaaggactgcaaggagcccaagcgggagcgggagcagtgctgctacaactgtgggaagccaggccacctggcccgggactgtgaccatgctgatgagcagaagtgctacagctgtggggagtttggccacatccagaaggactgcaccaaggtgaagtgctaccgctgtggggagaccggccacgtggccatcaactgcagcaagaccagcgaggtgaactgctaccgctgtggggagagcggccacctggccagagaatgtaccatcgaggccacagcctag

SEQ ID NO: 21605 - DNA, 87 bp, synthetic construct
  source 1..87: mol_type = other DNA; note = Synthetic coding sequence
atggccatggcccccagccccagcctggtgcaggtgtacaccagccctgctgctgtggccgtgtgggagtggcaggacggcctgtag

SEQ ID NO: 21606 - DNA, 603 bp, synthetic construct
  source 1..603: mol_type = other DNA; note = Synthetic coding sequence
atggccgccacagccagagaagatggagccagcggccaggagcggggccagaggggctgtgagcactatgaccggggctgcctgctgaaggccccctgctgtgacaagctgtacacctgccgcctgtgccacgacaacaatgaagaccaccagctggaccgcttcaaggtgaaggaggtgcagtgcatcaactgtgagaagatccagcacgcccagcagacctgtgaagaatgttccaccctgtttggagagtactactgtgacatctgccacctgtttgacaaggacaagaagcagtaccactgtgagaactgtggcatctgccgcatcggccccaaggaggacttcttccactgcctgaagtgcaacctgtgcctggccatgaacctgcagggccgccacaagtgcattgaaaatgtgtcccggcagaactgccccatctgcctggaggacatccacaccagccgggtggtggcccacgtgctgccctgtggccacctgctgcacaggacctgctatgaggagatgctgaaggagctgcagatgagcatcatgtatgccctgtgcttccgctatgaccaggtgctggagacagctggatag

SEQ ID NO: 21607 - DNA, 567 bp, synthetic construct
  source 1..567: mol_type = other DNA; note = Synthetic coding sequence
atggccacccccctgggctggagcaaggccggcagcggctctgtgtgcctggccctggaccagctgagagatgtgattgagagccaggaggagctgatccaccagctgagaaatgtgatggtgctgcaggatgaaaattttgtgtccaaggaggagttccaggccgtggagaagaagctggtggaggagaaggccgcccacgccaagaccaaggtgctgctggccaaggaggaggagaagctgcagtttgccctgggggaggtggaggtgctgagcaagcagctggagaaggagaagctggcctttgagaaggccctgagctctgtgaagagcaaggtgctgcaggagagcagcaagaaggaccagctgatcaccaagtgcaatggccggcgggaggcccgggccctgcaccacggctacatcaatggcctcttccccaaccaccctgtgcctgtgtccaaggccggcttccacagcaacacctgcccccagctgcgcatccaggccggccctgggggcccccacctgaggaagggcctgaagggccctggccggcccaggaagtag

SEQ ID NO: 21608 - DNA, 381 bp, synthetic construct
  source 1..381: mol_type = other DNA; note = Synthetic coding sequence
atggacaggagcaagaggaacagcattgctggcttccccccccgggtggagcggctggaggagtttgagggcggcggcggcggggagggcaatgtgtcccaggtgggccgggtgtggcccagcagctaccgggccctgatcagcgccttcagccggctgacccggctggatgacttcacctgtgagaagattggcagcggcttcttcagcgaggtgttcaaggtgcgccaccgggccagcggccaggtgatggccctgaagatgaacaccctgagcagcaacagagccaacatgctgaaggaggtgcagctgatgaaccggctgagccaccccaacatcctgcgctgccgctccatgaaccagaacttcagccccaactag

SEQ ID NO: 21609 - DNA, 1443 bp, synthetic construct
  source 1..1443: mol_type = other DNA; note = Synthetic coding sequence
atggagacagacctgaacagccaggacaggaaggacctggacaagttcatcaagttctttgccctgaagacagtgcaggtgattgtgcaggcccggctgggggagaagatctgcaccaggagcagcagcagccccaccggcagtgactggttcaacctggccatcaaggacatccctgaggtgacccatgaggccaagaaggccctggccggccagctgcctgctgtgggccgctccatgtgtgtggagatcagcctgaagaccagcgagggggacagcatggagctggagatctggtgcctggagatgaatgagaagtgtgacaaggagatcaaggtgtcctacacagtgtacaaccggctgagcctgctgctgaagagcctgctggccatcaccagggtgaccccagcctaccgcctgagcaggaagcagggccacgagtatgtgatcctgtaccgcatctactttggagaggtgcagctgagcggcctgggggagggcttccagacagtgcgggtgggcaccgtgggcacccctgtgggcaccatcaccctgagctgtgcctaccgcatcaacctggccttcatgagcacccggcagtttgagaggaccccacccatcatgggcatcatcatcgaccactttgtggaccggccctaccccagcagcagccccatgcacccctgcaactacagaacagctggggaggacaccggggtcatctaccccagcgtggaggacagccaggaggtgtgcaccaccagcttcagcaccagcccccccagccagctgatggtgcctgggaaggagggcggcgtgcccctggcccccaaccagcctgtgcacggcacccaggccgaccaggagcggctggccacctgcacccccagcgacaggacccactgtgccgccacccccagcagcagcgaggacacagagaccgtgagcaacagcagcgagggccgggccagcccccatgatgtgctggagaccatctttgtgaggaaggtgggcgcctttgtgaacaagcccatcaaccaggtgaccctgaccagcctggacatcccctttgccatgtttgcccccaagaacctggagctggaggacacagaccccatggtgaaccccccagacagccctgagacagagagccccctgcagggcagcctgcacagtgatggcagcagcggcggcagcagcggcaacacccatgatgactttgtgatgattgacttcaagccagccttcagcaaggatgacatcctgcccatggacctgggcaccttctaccgggagttccagaaccccccccagctgagcagcctgagcattgacatcggggcccagagcatggccgaggacctggacagcctgcctgagaagctggccgtgcatgagaagaatgtgcgggagtttgatgcctttgtggagaccctgcagtag

SEQ ID NO: 21610 - DNA, 390 bp, synthetic construct; identical to SEQ ID NO: 19988
  source 1..390: mol_type = other DNA; note = Synthetic coding sequence

SEQ ID NO: 21611 - DNA, 348 bp, synthetic construct
  source 1..348: mol_type = other DNA; note = Synthetic coding sequence
atggtggaggatgagctggccctgtttgacaagagcatcaatgagttctggaacaagttcaagagcacagacaccagctgccagatggccggcctgcgggacacctacaaggacagcatcaaggcctttgctgagaagctgtctgtgaagctgaaggaggaggagaggatggtggagatgttcctggagtaccagaaccagatcagccggcagaacaagctgatccaggagaagaaggacaacctgctgaagctgattgctgaggtgaagggcaagaagcaggagctggaggtgctgacagccaacatccaggacctgaaggaggagtacagcaggaagaaggagtag

SEQ ID NO: 21612 - DNA, 402 bp, synthetic construct
  source 1..402: mol_type = other DNA; note = Synthetic coding sequence
atggccagcagcgcccgggagcacctgctgtttgtgagaagaagaaacccccagatgagatacaccctgagccctgagaacctgcagagcctggccgcccagagctccatgcctgagaacatgaccctgcagagggccaacagcgacacagacctggtgaccagcgagagccgcagcagcctgacagcctccatgtatgagtacaccctgggccaggcccagaacctgatcatcttctgggacatcaaggaggaggtggaccccagcgactggattggcctgtaccacattgatgagaacagccctgccaacttctgggacagcaagaacagaggagtgacaggcacccagaagggccagatcgtgtggagaattgagcccggcccctacttcatggagtag

SEQ ID NO: 21613 - DNA, 264 bp, synthetic construct
  source 1..264: mol_type = other DNA; note = Synthetic coding sequence
atgagcctgtttggcaccaccagcggcttcggcaccagcggcacctccatgtttggcagcgccaccacagacaaccacaaccccatgaaggacatcgaggtgaccagcagcccagatgacagcatcggctgcctgtccttcagcccccccaccctgcccggcaacttcctgattgctggctcctgggccaatgatgtgcgctgctgggaggtgcaggacagcggccagaccatccccaaggcccagcagatgcacactggatag

SEQ ID NO: 21614 - DNA, 1329 bp, synthetic construct
  source 1..1329: mol_type = other DNA; note = Synthetic coding sequence
atggccaacagctttgctgcccgcatcttcaccaccctgagtgacctgcagaccaacatggccaacctgaaggtgattggcatcgtcatcggcaagacagatgtgaagggcttcccagacaggaagagcatcggcagcgagcgctacaccttctccttcaccatccgggacagccctgcccactttgtgaatgctgcctcctggggcaatgaagactacatcaagagcctgagtgacagcttccgggtgggggactgtgtgatcatcgagaaccccctcatccagaggaaggagattgagcgggaggagaagttctccccagccacccccagcaactgcaagctgctgctgtctgagaaccacagcacagtgaaggtgtgcagcagctatgaggtggacaccaagctgctgagcctcatccacctgcctgtgaaggagagccatgactactacagcctgggggacatcgtggccaacggccacagcctgaatggccgcatcatcaacgtgctggccgctgtgaagtctgtgggggagcccaagtacttcaccaccagtgacaggaggaagggccagagatgtgaggtgcggctgtatgatgaaacagagagcagctttgccatgacctgctgggacaatgaaagcatcctgctggcccagagctggatgccccgggagaccgtcatctttgccagtgatgtgcgcatcaactttgacaagttcaggaactgcatgacagccaccgtcatcagcaagaccatcatcaccaccaacccagacatccctgaggccaacatcctgctgaacttcatccgggagaacaaggagaccaacgtgctggatgatgaaattgacagctacttcaaggagagcatcaacctgagcaccatcgtggatgtgtacacagtggagcagctgaagggcaaggccctgaagaatgaaggcaaggctgaccccagctatggcatcctgtatgcctacatcagcaccctgaacattgatgatgagaccaccaaggtggtgaggaaccgctgcagcagctgtggctacatcgtgaatgaggccagcaacatgtgcaccacctgcaacaagaacagcctggacttcaagtctgtgttcctgtccttccacgtgctgattgacctgacagaccacacaggcaccctgcacagctgcagcctgactggatctgtggccgaggagaccctgggctgcacctttgtgctgagccaccgggcccggagcggcctgaagatctctgtgctgagctgcaagctggccgaccccacagaggccagcaggaacctgagcggccagaagcacgtgtag

SEQ ID NO: 21615 - DNA, 651 bp, synthetic construct
  source 1..651: mol_type = other DNA; note = Synthetic coding sequence
atgaacaaccagaagcagcagaagcccaccctgagcggccagcgcttcaagaccaggaagagagatgagaaggagagatttgaccccacccagttccaggactgcatcatccagggcctgacagaaacaggaacagacctggaggccgtggccaagttcctggatgccagcggggccaagctggactaccgccgctatgcagagaccctgtttgacatcctggtggccggcggcatgctggcccctgggggcaccctggctgatgacatgatgaggacagatgtgtgtgtgtttgctgcccaggaggacctggagaccatgcaggcctttgcccaggtgttcaacaagctgatccgccgctacaagtacctggagaagggctttgaagatgaggtgaagaagctgctgctcttcctgaagggcttcagcgagagcgagaggaacaagctggccatgctgactggagtgctgctggccaacggcaccctgaatgccagcatcctgaacagcctgtacaatgaaaacctggtgaaggagggcgtgtctgctgcctttgctgtgaagctgttcaagtcctggatcaatgagaaggacatcaatgctgtggccgccagcctgaggaaggtgtccatggacaaccggctgatgtag

SEQ ID NO: 21616 - DNA, 429 bp, synthetic construct; identical to SEQ ID NO: 21135
  source 1..429: mol_type = other DNA; note = Synthetic coding sequence

SEQ ID NO: 21617 - DNA, 447 bp, synthetic construct
  source 1..447: mol_type = other DNA; note = Synthetic coding sequence
gccatccacatcctggatgtgctggtgctgaatggaacagatgtgcgggagcagcacttcaaccagaggatccagctggccgagaagtttgtgaaggctgtgtccaagcccagcaggccagacatgaaccccatccgggtgaaggaggtgtaccgcctggaggagatggagaagatctttgtgcggctggagatgaagatcatcaagggcagcagcggcacccccaagctgagctacacaggaagagatgacagacactttgtgcccatgggcctgtacatcgtgaggacagtgaatgagccctggaccatgggcttcagcaagagcttcaagaagaagttcttctacaacaagaagaccaaggacagcacctttgacctgccctactaccccttccccagcttcttcttccccaacagacgctacaacctgctgctgtttgtgtag

SEQ ID NO: 21618 - DNA, 300 bp, synthetic construct
  source 1..300: mol_type = other DNA; note = Synthetic coding sequence
atggaggagatcccagcccaggaggccgccggcagcccccgggtgcagttccagagcctggagacccagagtgaatgtctgagccctgagccccagtttgtgcaggacacagacatggagcagggcctgaccggcggcatcctgctgcggctgcccaccacccgcatccacagcgtgaacagctgcccagccctgagccacacccaggccagcgccttcagcggggagaccctggccgtgctgacagctggcatcagcaagcgctggcccaagtaccgcctgcccatcgacatcgcctag

SEQ ID NO: 21619 - DNA, 2493 bp, synthetic construct
  source 1..2493: mol_type = other DNA; note = Synthetic coding sequence
atgaagaggggccgcctgcccagcagcagtgaagattctgatgacaatggcagcctgagcaccacctggagccagaacagccgcagccagcaccggcgcagcagctgcagcagacatgaggacaggaagcccagcgaggtgttcagaacagacctgatcacagccatgaagctgcatgacagctaccagctgaacccagatgagtactacgtgctggccgacccctggaggcaggagtgggagaagggcgtgcaggtgcctgtgtccccaggcaccatcccccagcctgtggcccggcccaagaagtacatcgtgagcagcggcagcgagcccccagagctgggctacgtggacatccgcaccctggccgacagcgtgtgccgctatgacctgaatgacatggatgctgcctggctggagctgaccaatgaggagttcaaggagatgggcatgcctgagctggatgagtacaccatggagcgggtgctggaggagtttgagcagcgctgctatgacaacatgaaccacgccatcgagacagaggagggcctgggcatcgagtatgatgaagatgtggtgtgtgatgtgtgccagagcccagatggagaagatggaaatgagatggtgttctgtgacaagtgcaacatctgtgtgcaccaggcctgctacggcatcctgaaggtgcctgagggctcctggctgtgcaggacctgtgccctgggcgtgcagcccaagtgcctgctgtgccccaagaagggcggggccatgaagcccaccaggagcggcaccaagtgggtgcacgtgtcctgtgccctgtggatccctgaggtgtccatcggcagccctgagaagatggagcccatcaccaaggtgagccacatccccagcagccgctgggccctggtgtgcagcctgtgcaatgagaagtttggagccagcatccagtgcagcgtgaagaactgcaggacagccttccacgtgacctgtgcctttgaccggggcctggagatgaagaccatcctggctgaaaatgatgaggtgaagttcaagagctactgccccaagcacagcagccacaggaagccagaggagagcctgggcaagggggccgcccaggagaatggagcccctgagtgcagccccaggaaccccctggagccctttgccagcctggagcagaaccgggaggaggcccaccgggtgtctgtgaggaagcagaagctgcagcagctggaggatgagttctacacctttgtgaacctgctggatgtggcccgggccctgcggctgcctgaggaggtggtggacttcctgtaccagtactggaagctgaagaggaaggtgaacttcaacaagcccctcatcacccccaagaaggatgaggaggacaacctggccaagcgggagcaggatgtgctcttccggcggctgcagctgttcacccacctgcggcaggacctggagcgggtgaggaacctgacctacatggtgacccggcgggagaagatcaagaggtctgtgtgcaaggtgcaggagcagatcttcaacctgtacaccaagctgctggagcaggagcgggtgtctggagtgcccagcagctgcagcagcagcagcctggagaacatgctgctcttcaacagccccagcgtgggcccagatgcccccaagattgaggacctgaagtggcacagcgccttcttcaggaagcagatgggcaccagcctggtgcacagcctgaagaagccccacaagagggaccccctgcagaacagccctggcagcgagggcaagaccctgctgaagcagcctgacctgtgtggccggcgggagggcatggtggtgcctgagagcttcctgggcctggagaagacctttgctgaggcccggctcatcagcgcccagcagaagaatggagtggtgatgccagaccacggcaagagaagagacaaccgcttccactgtgacctgatcaagggggacctgaaggacaagagcttcaagcagagccacaagcccctgcggagcacagatgtgtcccagaggcacctggacaacacccgggccgccaccagccctggggtgggccagagcgcccctggcaccaggaaggagatcgtgcccaagtgcaatggcagcctcatcaaggtgaactacaaccagacagctgtgaaggtgcccaccaccccagccagccctgtgaagaactggggcggcttccgcatccccaagaagggggagcggcagcagcagggcgaggcccatgatggagcctgccaccagcacagcgactacccctacctgggcctgggccgggtgcctgccaaggagcgggccaagagcaagctgaagagtgacaatgaaaatgatggctacgtgcctgatgtggagatgtctgacagcgagagcgaggccagcgagaagaagtgcatccacaccagcagcaccatcagcagaagaacagacatcatccgccgcagcatcctggccagctag

SEQ ID NO: 21620 - DNA, 402 bp, synthetic construct
  source 1..402: mol_type = other DNA; note = Synthetic coding sequence
atggccagcgaggacatcgccaagctggccgagaccctggccaagacccaggtggccggcggccagctgtccttcaagggcaagagcctgaagctgaacacagcagaagatgccaaggatgtgatcaaggagattgaggactttgacagcctggaggccctgcggctggagggcaacacagtgggcgtggaggccgcccgggtgattgccaaggccctggagaagaagtctgagctgaagcgctgccactggagcgacatgttcaccggccgcctgaggacagagatccccccagccctgatcagcctgggggagggcctcatcacagctggggcccagctggtggagctggacctgagtgacaatgccttcggcccagatggagtgcagggctttgaatag

SEQ ID NO: 21621 - DNA, 390 bp, synthetic construct
  source 1..390: mol_type = other DNA; note = Synthetic coding sequence
atgagccctggcagcggcgtgaagtctgagtacatgaagcgctaccaggagccccgctgggaggagtatggcccctgctaccgggagctgctgcactaccgcctgggccgccgcctgctggagcaggcccacgccccctggctgtgggatgactggggccctgctggcagcagtgaagattctgccagcagcgagagcagtggagctgggggccctgccccccgctgtgccccacccagccccccacctcctgtggagcccgccacccaggaggaggccgagcggcgggcccggggggcccctgaggagcaggatgctgaggccggagatgctgaggccgaggatgctgaagatgctgccctgcctggaaatgcctggctgcggacctag

SEQ ID NO: 21622 - DNA, 390 bp, synthetic construct; identical to SEQ ID NO: 19988
  source 1..390: mol_type = other DNA; note = Synthetic coding sequence

SEQ ID NO: 21623 - DNA, 402 bp, synthetic construct
  source 1..402: mol_type = other DNA; note = Synthetic coding sequence
atggccgagaagctgatcacccagaccttcagccaccacaaccagctggcccagaagacccggcgggagaagagggcccggcaggaggccgagcggcgggagaaggccgagagagctgcccggctggccaaggaggccaagtctgagaccagcggcccccagatcaaggagctgacagatgaggaggccgagcggctgcagctggagattgaccagaagaaggatgctgaaaatcatgaggcccagctgaagaatggcagcctggacagccctgggaagcaggacacagaggaggatgaggaggaggatgagaaggacaagggcaagctgaagcccaacctgggcaatggagctgacctgcccaactaccgctggacccagaccctgtctgagctggactag

SEQ ID NO: 21624 - DNA, 2373 bp, synthetic construct; identical to SEQ ID NO: 18522
  source 1..2373: mol_type = other DNA; note = Synthetic coding sequence

SEQ ID NO: 21625 - DNA, 1356 bp, synthetic construct
  source 1..1356: mol_type = other DNA; note = Synthetic coding sequence
atgtacggggcccctggggccccagcccagagcgcctctgtgacagtggtgcgcagcctgcggcggcccccaccccaggccaccggggtgtccttcatgaacaaccagaagcagcagaagcccaccctgagcggccagcgcttcaagaccaggaagagagatgagaaggagagatttgaccccacccagttccaggactgcatcatccagggcctgacagaaacaggaacagacctggaggccgtggccaagttcctggatgccagcggggccaagctggactaccgccgctatgcagagaccctgtttgacatcctggtggccggcggcatgctggcccctgggggcaccctggctgatgacatgatgaggacagatgtgtgtgtgtttgctgcccaggaggacctggagaccatgcaggcctttgcccaggtgttcaacaagctgatccgccgctacaagtacctggagaagggctttgaagatgaggtgaagaagctgctgctcttcctgaagggcttcagcgagagcgagaggaacaagctggccatgctgactggagtgctgctggccaacggcaccctgaatgccagcatcctgaacagcctgtacaatgaaaacctggtgaaggagggcgtgtctgctgcctttgctgtgaagctgttcaagtcctggatcaatgagaaggacatcaatgctgtggccgccagcctgaggaaggtgtccatggacaaccggctgatggagctgtttcctgccaacaagcagagcgtggagcacttcaccaagtacttcacagaggccggcctgaaggagctgtctgaatatgtgaggaaccagcagaccatcggggccaggaaggagctgcagaaggagctgcaggagcagatgagcagaggagaccccttcaaggacatcatcctgtatgtgaaggaggagatgaagaagaacaacatccctgagcctgtggtgattggaattgtgtggagctctgtgatgagcacagtggagtggaacaagaaggaggagctggtggccgagcaggccatcaagcacctgaagcagtacagccccctgctggccgccttcaccacccagggccagagcgagctgaccctgctgctgaagatccaggagtactgctatgacaacatccacttcatgaaggccttccagaagatcgtggtgctcttctacaaggccgaggtgctgtctgaggagcccatcctgaagtggtacaaggatgcccacgtggccaagggcaagtctgtgttcctggagcagatgaagaagtttgtggagtggctgaagaatgctgaggaggagagcgagagcgaggccgaggagggggactag

SEQ ID NO: 21626 - DNA, 948 bp, synthetic construct
  source 1..948: mol_type = other DNA; note = Synthetic coding sequence
atggccggcggggcccgggaggtgctgaccctgcagctgggccactttgctggctttgtgggcgcccactggtggaaccagcaggatgctgccctgggccgggccacagacagcaaggagcccccaggagagctgtgcccagatgtgctgtacagaactggaagaaccctgcacggccaggagacctacacccccaggctcatcctgatggacctgaagggcagcctgagcagcctgaaggaggagggcggcctgtacagagacaagcagctggatgctgccatcgcctggcagggcaagctgaccacccacaaggaggagctgtaccccaagaacccctacctgcaggacttcctgtctgctgagggcgtgctgagcagtgatggagtgtggagggtgaagagcatccccaacgggaagggcagcagccccctgcccacagccaccacccccaagcccctcatccccacagaggccagcatccgggtgtggagcgacttcctgcgggtgcacctgcaccccaggagcatctgcatgatccagaagtacaaccatgatggagaggccggccgcctggaggccttcggccagggcgagagcgtgctgaaggagcccaagtaccaggaggagctggaggaccggctgcacttctacgtggaggagtgtgactacctgcaggtggtggcctggcagtgtgccctgcagggcggcagcagcagccacccagccaactacctgagcagcctgaccccagcccagggcttccagatcctgtgtgacctgcatgatggcttcagcggcgtgggcgccaaggctgctgagctgctgcaggatgagtacagcggccggggcatcatcacctggggcctgctgcccggcccctaccaccggggcgtgtctggcacctggaggagcaagcacagcaaccccatcggccgggtggcctag

SEQ ID NO: 21627 - DNA, 285 bp, synthetic construct
  source 1..285: mol_type = other DNA; note = Synthetic coding sequence
tgcaccagcagctgcacccccagctgctgccagcagagcagctgccagcctgcctgctgcaccagcagcccctgccagcaggcctgctgcgtgcctgtgtgctgcaagacagtgtgctgcaagcccagcagctgccagcctgcctgctgcatcagcagcccctgccagcagagctgctgcgtgcctgtgtgctgcaagcccatctgctgcgtgcccccagcctgctgcaccaccagctgctgccggcccagcagctctgtgtccctgctgtgcaggcctgtgtag

SEQ ID NO: 21628 - DNA, 1221 bp, synthetic construct
  source 1..1221: mol_type = other DNA; note = Synthetic coding sequence
atggccgccaacctgagcagaaatggacctgccctgcaggaggcctacgtgcgggtggtgacagagaagagccccacagactgggccctcttcacctatgagggcaacagcaatgacatccgggtggccggcactggagagggcggcctggaggagatggtggaggagctgaacagcggcaaggtgatgtatgccttctgccgggtgaaggaccccaacagcggcctgcccaagtttgtgctgatcaactggggcgcccacgtgaccatcaatgcccgggcagaggaggatgtggagcctgagtgcatcatggagaaggtggccaaggccagcggggccaactacagcttccacaaggagagcggccgcttccaggatgtgggcccccaggcccctgtgggctctgtgtaccagaagaccaatgctgtgtctgagatcaagagggtgggcaaggacagcttctgggccaaggccgagaaggaggaggagaacagaaggctggaggagaagagaagagctgaggaggcccagaggcagctggagcaggagcggcgggagcgggagctgcgggaggccgcccggcgggagcagcgctaccaggagcagggcggggaggccagcccccagagcaggacctgggagcagcagcaggaggtggtgtccaggaacagaaatgagcaggagagcgctgtgcacccccgggagatcttcaagcagaaggagcgggccatgagcaccaccagcatcagcagcccccagcccgggaagctgcggagccccttcctgcagaagcagctgacccagcctgagacccacttcggccgggagcctgctgctgccatcagccggcccagggctgacctgcctgctgaggagcccgcccccagcaccccaccctgcctggtgcaggccgaggaggaggccgtgtatgaggagcccccagagcaggagaccttctatgagcagccccccctggtgcagcagcagggcgccggcagcgagcacatcgaccaccacatccagggccagggcctgagcggccagggcctgtgtgcccgggccctgtatgactaccaggccgcagatgacacagagatcagctttgatcctgaaaatctcatcactggaattgaggtgattgatgagggctggtggaggggctacggcccagatggccacttcggcatgtttcctgccaactacgtggagctgattgaatag

SEQ ID NO: 21629 - DNA, 981 bp, synthetic construct; identical to SEQ ID NO: 20766
  source 1..981: mol_type = other DNA; note = Synthetic coding sequence

SEQ ID NO: 21630 - DNA, 684 bp, synthetic construct
  source 1..684: mol_type = other DNA; note = Synthetic coding sequence
atgctgtgctggggctactggagcctgggccagcccggcatcagcaccaacctgcagggcatcgtggccgagccccaggtgtgtggcttcatcagtgacagatctgtgaaggaggtggcctgtggcggcaaccacagcgtcttcctgctggaggatggagaggtgtacacctgtggcctgaacaccaagggccagctgggccacgagcgggagggcaacaagccagagcagatcggggccctggccgaccagcacatcatccacgtggcctgtggggagagccacagcctggccctgagtgaccggggccagctgttctcctggggcgccggcagtgatggccagctgggcctgatgaccacagaggacagcgtggccgtgcccaggctcatccagaagctgaaccagcagaccatcctgcaggtgtcctgtggcaactggcactgcctggccctggccgcagatggccagttcttcacctggggcaagaacagccacggccagctgggcctgggcaaggagttccccagccaggccagcccccagagggtgcgcagcctggagggcatccccctggcccaggtggccgccggcggggcccacagctttgccctgagcctgagcggggctgtgtttggctggggcatgaacaatgccggccagctgggcctgagtgatgaatag

SEQ ID NO: 21631 - DNA, 624 bp, synthetic construct
  source 1..624: mol_type = other DNA; note = Synthetic coding sequence
atgagcagccccctggccagcctgagcaagaccaggaaggtgcccctgcccagcgagcccatgaaccctggaagaagaggcatccgcatctatggagatgtgcctgccagccatgacagcgagctgatggccttcatgaccaggaagctgtgggacctggagcagcaggtgaaggcccagacagatgagatcctgagcaaggaccagaagattgctgccctggaggacctggtgcagaccctgcggccccaccctgctgaggccaccctgcagaggcaggaggagctggagaccatgtgtgtgcagctgcagaggcaggtgcgggagatggagcgcttcctgagtgactatggcctgcagtgggtgggggagcccatggaccaggaggacagcgagagcaagacagtgtctgaacatggagagcgggactggatgacagccaagaagttctggaagccaggggacagcctggcccctcctgaggtggactttgaccggctgctggccagcctgcaggacctgtctgagctggtggtggagggggacacccaggtgacccctgtgcctggaggagcccggctgcggaccctggagcccatccccctgaagctgtacagaaattag

SEQ ID NO: 21632 - DNA, 717 bp, synthetic construct; identical to SEQ ID NO: 21576
  source 1..717: mol_type = other DNA; note = Synthetic coding sequence

SEQ ID NO: 21633 - DNA, 369 bp, synthetic construct
  source 1..369: mol_type = other DNA; note = Synthetic coding sequence
gtgcgggagctggaggccgagctggatgctgagcagaagaagcacgccgaggccctgaagggcgtgaggaagcatgaaagaagagtgaaggagctggcctaccaggccgaggaggacaggaagaacctggccaggatgcaggacctggtggacaagctgcagagcaaggtgaagagctacaagaggcagtttgaggaggccgagcagcaggccaacaccaacctggccaagtacaggaaggcccagcacgagctggatgatgctgaggagagagctgacatggccgagacccaggccaacaagctgcgggcccggaccagagatgccctgggccccaagctgagcctgagcccccagcacaaggagtag

SEQ ID NO: 21634 - DNA, 483 bp, synthetic construct
  source 1..483: mol_type = other DNA; note = Synthetic coding sequence
tgagaaagcctggtgggcctgcaggagggcaagagcacagagcagggcaaccacgaccagctgaaggagctgtacagcgctggcaacctgactgtgctggccacagaccccctgctgcaccaggaccctgtgcagctggacttccacttccggctgaccagccagaccagcgcccactggcacggcctgctgtgtgacagaagactcttcctggacatcccctaccaggccctggaccagggcaaccgggagagcctgacagccaccctggagtatgtggaggagaagaccaacgtggacagcgtgtttgtgaacttccagaatgacagaaatgacagaggagccctgctgcgggccttctcctacatgggctttgaggtggtgcggccagaccacccagccctgccccccctggacaacgtcatcttcatggtgtaccccctggagagagatgtgggccacctgcccagcgagcccccatag

SEQ ID NO: 21635 - DNA, 102 bp, synthetic construct
  source 1..102: mol_type = other DNA; note = Synthetic coding sequence
atgtctgtgacctatgatgacagcgtgggcgtggaggtgtccagtgacagcttctgggaggtgggcaactacaagaggacagtgaagagaattgatgactag

SEQ ID NO: 21636 - DNA, 402 bp, synthetic construct
  source 1..402: mol_type = other DNA; note = Synthetic coding sequence
atgtggagcctgacagccagcgagggggagagcaccacagcccacttcttcctgggcgctggagatgagggcctgggcacccggggcatcggcatgaggcctgaggagagtgacagcgagctgctggaggatgaggaggatgaggtgcccccagagccccagatcatcgtgggcatctgtgccatgaccaagaagagcaagagcaagcccatgacccagatcctggagcggctgtgccgctttgactacctgactgtggtgatcctgggagaagatgtgatcctgaatgaacctgtggagaactggcccagctgccactgcctgatctccttccacagcaagggcttccccctggacaaggctgtggcctacagcaagctgaggaaccccttcctgatctag

SEQ ID NO: 21637 - DNA, 939 bp, synthetic construct; identical to SEQ ID NO: 20845
  source 1..939: mol_type = other DNA; note = Synthetic coding sequence

SEQ ID NO: 21638 - DNA, 1308 bp, synthetic construct
  source 1..1308: mol_type = other DNA; note = Synthetic coding sequence
tgaagcatcctgaacagcaatgagcacctgctgaaggagaaggagctgctgattgacaagcagaggaagcacatcagccagctggagcagaaggtgcgggagagcgagctgcaggtgcacagcgccctgctgggccgcccagccccctttggagatgtgtgcctgctgcggctgcaggagctgcagcgggagaacaccttcctgcgggcccagtttgcccagaagacagaggccctgagccgggagaagattgacctggagaagaagctgagcgccagcgaggtggaggtgcagctgatccgggagagcctgaaggtggccctgcagaagcacagcgaggaggtgaagaagcaggaggagcgggtgaagggccgggacaagcacatcaacaacctgaagaagaagtgccagaaggagagcgagcagaaccgggagaagcagcagagaattgagaccctggagcgctacctggccgacctgcccaccctggaggaccaccagaagcagagccagcagctgaaggacagcgagctgaagagcacagagctgcaggagaaggtgacagagctggagagcctgctggaggagacccaggccatctgccgggagaaggagatccagctggagagcctgcggcagcgggaggccgagttcagcagcgctggccacagcctgcaggacaagcagagcgtggaggagaccagcggggagggccctgaggtggagatggagagctggcagaagagatatgacagcctgcagaagatcgtggagaagcagcagcagaagatggaccagctgcggagccaggtgcagagcctggagcaggaggtggcccaggaggagggcaccagccaggccctgcgggaggaggcccagaggcgggacagcgccctgcagcagctgaggacagctgtgaaggagctgtctgtgcagaaccaggacctgattgagaagaacctgaccctgcaggagcacctgcggcaggcccagcccggcagcccccccagcccagacacagcccagctggccctggagctgcaccaggagctggccagctgcctgcaggacctgcaggccgtgtgcagcatcgtgacccagagggcccagggccatgaccccaacctgagcctgctgctgggcatccacagccagcaccctgagacccagctggacctgcagaagccagatgtgatcaagaggaagctggaggaggtgcagcagctgcggcgggacatcgaggacctgcggaccaccatgtctgacagatatgcccaggacatgggagagaactgtgtgacccagtag

SEQ ID NO: 21639 - DNA, 474 bp, synthetic construct
  source 1..474: mol_type = other DNA; note = Synthetic coding sequence
atggagctgcgctgtggcggcctgctcttcagcagcagatttgacagcggcaacctggcccacgtggagaaggtggagagcctgagcagtgatggagagggcgtgggcggcggggccagcgccctgaccagcggcatcgccagcagcccagactatgagttcaacgtgtggaccaggccagactgtgccgagacagaatttgaaaatggaaacagatcctggttctacttctctgtgcggggcggcatgcctgggaagctgatcaagatcaacatcatgaacatgaacaagcagagcaagctgtacagccagggcatggccccctttgtgaggaccctgcccacccggccccgctgggagcgcatccgggaccggcccacctttgagatgacagagacccagtttgtgctgagctttgtgcacagatttgtggagggccgcggggccaccaccttctttgccttctgctactag

SEQ ID NO: 21640 - DNA, 1620 bp, synthetic construct; identical to SEQ ID NO: 19050
  source 1..1620: mol_type = other DNA; note = Synthetic coding sequence

SEQ ID NO: 21641 - DNA, 6141 bp, synthetic construct
  source 1..6141: mol_type = other DNA; note = Synthetic coding sequence
atggatgaggtggagcaggaccagcacgaggcccggctgaaggagctgtttgacagctttgacaccactggaacaggcagcctgggccaggaggagctgacagacctgtgccacatgctgagcctggaggaggtggcccctgtgctgcagcagaccctgctgcaggacaacctgctgggccgggtgcactttgaccagttcaaggaggccctgatcctgatcctgagcaggaccctgagcaatgaggagcacttccaggagccagactgcagcctggaggcccagcccaagtatgtgcggggcggcaagagatatggaagaagaagcctgcctgagttccaggagagcgtggaggagttccctgaggtgaccgtcatcgagcccctggatgaggaggcccggcccagccacatcccagctggggactgcagcgagcactggaagacccagaggtctgaggagtatgaagctgagggccagctgcgcttctggaacccagatgacctgaatgccagccagagcggcagcagccccccccaggactggattgaggagaagctgcaggaggtgtgtgaggacctgggcatcaccagagatggccacctgaacaggaagaagctggtgtccatctgtgagcagtatggcctgcagaatgtggatggagagatgctggaggaggtgttccacaacctggaccctgatggcaccatgtctgtggaggacttcttctacggcctcttcaagaatggcaagagcctgacccccagcgccagcaccccctaccggcagctgaagaggcacctgtccatgcagagctttgatgagagcggccgccgcaccaccaccagcagcgccatgaccagcaccatcggcttccgggtcttcagctgcctggatgatggcatgggccacgcctctgtggagcgcatcctggacacctggcaggaggagggcatcgagaacagccaggagatcctgaaggccctggacttcagcctggatggcaacatcaacctgacagagctgaccctggccctggagaatgagctgctggtgaccaagaacagcatccaccaggccgccctggccagcttcaaggccgagatccgccacctgctggagcgggtggaccaggtggtgcgggagaaggagaagctgcggagtgacctggacaaggccgagaagctgaagagcctgatggccagcgaggtggatgaccaccacgccgccattgaaagaagaaatgagtacaacctgaggaagctggatgaggagtacaaggagagaattgctgccctgaagaatgagctgaggaaggagcgggagcagatcctgcagcaggccggcaagcagaggctggagctggagcaggagattgagaaggccaagacagaggagaactacatccgggaccggctggccctgagcctgaaggagaacagccggctggagaatgagctgctggagaatgctgagaagctggccgagtatgagaacctgaccaacaagctgcagaggaacctggagaatgtgctggccgagaagtttggagacctggaccccagcagcgctgagttcttcctgcaggaggagcggctgacccagatgagaaatgaatatgaaaggcagtgccgggtgctgcaggaccaggtggatgagctgcagagcgagctggaggagtaccgggcccagggccgggtgctgcggctgcccctgaagaacagccccagcgaggaggtggaggccaacagcggcggcatcgagcctgagcacggcctgggcagcgaggagtgcaaccccctgaacatgagcattgaagctgagctggtgattgagcagatgaaggagcagcaccaccgggacatctgctgcctgcggctggagctggaggacaaggtgcgccactatgagaagcagctggatgaaacagtggtgtcctgcaagaaggcccaggagaacatgaagcagagacatgaaaatgagacccacaccctggagaagcagatcagtgacctgaagaatgaaattgctgagctgcagggccaggccgctgtgctgaaggaggcccaccacgaggccacctgcagacatgaggaggagaagaagcagctgcaggtgaagctggaggaggagaagacccacctgcaggagaagctgcggctgcagcacgagatggagctgaaggcccggctgacccaggcccaggccagctttgagcgggagcgggagggcctgcagagcagcgcctggacagaggagaaggtgcggggcctgacccaggagctggagcagttccaccaggagcagctgaccagcctggtggagaagcacaccctggagaaggaggagctgaggaaggagctgctggagaagcaccagcgggagctgcaggagggccgggagaagatggagacagagtgcaacagaaggaccagccagatcgaggcccagttccagagcgactgccagaaggtgacagagcgctgtgagagcgccctgcagagcctggagggccgctaccggcaggagctgaaggacctgcaggagcagcagcgggaggagaagagccagtgggagtttgagaaggatgagctgacccaggagtgtgccgaggcccaggagctgctgaaggagaccctgaagcgggagaagaccaccagcctggtgctgacccaggagcgggagatgctggagaagacctacaaggagcacctgaacagcatggtggtggagcggcagcagctgctgcaggacctggaggacctgagaaatgtgtctgagacccagcagagcctgctgagtgaccagatcctggagctgaagagcagccacaagcgggagctgcgggagcgggaggaggtgctgtgccaggccggggccagcgagcagctggccagccagaggctggagcggctggagatggagcatgaccaggagcggcaggagatgatgagcaagctgctggccatggagaacatccacaaggccacctgtgaaacagctgaccgggagcgggcagagatgagcacagagatcagccggctgcagagcaagatcaaggagatgcagcaggccaccagccccctgtccatgctgcagagcggctgccaggtgattggagaggaggaggtggagggagatggagccctgagcctgctgcagcagggcgagcagctgctggaggagaatggagatgtgctgctgagcctgcagagggcccacgagcaggccgtgaaggaaaatgtgaagatggccacagagatcagccggctgcagcagaggctgcagaagctggagcccggcctggtgatgagcagctgcctggatgagcccgccacagagttcttcggcaacacagctgagcagacagagcagttcctgcagcagaacagaaccaagcaggtggagggcgtgacccggcggcacgtgctgagtgacctggaggatgatgaggtgcgggacctgggcagcacaggcaccagctctgtgcagaggcaggaggtgaagattgaggagagcgaggcctctgtggagggcttcagcgagctggagaacagcgaggagaccaggacagagagctgggagctgaagaaccagatcagccagctgcaggagcagctgatgatgctgtgtgccgactgtgaccgggccagcgagaagaagcaggacctgctgtttgatgtgtctgtgctgaagaagaagctgaagatgctggagcgcatccctgaggccagccccaagtacaagctgctgtatgaagatgtgtcccgggagaatgactgcctgcaggaggagctgaggatgatggagaccaggtatgatgaggccctggagaacaacaaggagctgacagctgaggtgttccggctgcaggatgagctgaagaagatggaggaggtgacagagaccttcctgagcctggagaagagctatgatgaggtgaagattgaaaatgaaggcctgaatgtgctggtgctgcggctgcagggcaagattgagaagctgcaggagagcgtggtgcagagatgtgactgctgcctgtgggaggccagcctggagaacctggagattgaaccagatggcaacatcctgcagctgaaccagaccctggaggagtgtgtgccccgggtgcgctctgtgcaccacgtgattgaggagtgcaagcaggagaaccagtacctggagggcaacacccagctgctggagaaggtgaaggcccatgaaattgcctggctgcacggcaccatccagacccaccaggagcggccccgggtgcagaaccaggtgatcctggaggagaacaccaccctgctgggcttccaggacaagcacttccagcaccaggccaccatcgccgagctggagctggagaagaccaagctgcaggagctgaccaggaagctgaaggagcgggtgaccatcctggtgaagcagaaggatgtgctgagccacggggagaaggaggaggagctgaaggccatgatgcatgacctgcagatcacctgcagcgagatgcagcagaaggtggagctgctgcgctatgagagcgagaagctgcagcaggagaacagcatcctgagaaatgagatcaccaccctgaatgaggaggacagcatcagcaacctgaagctgggcaccctgaatggcagccaggaggagatgtggcagaagacagagaccgtgaagcaggagaatgctgctgtgcagaagatggtggagaacctgaagaagcagatcagcgagctgaagatcaagaaccagcagctggacctggagaacacagagctgagccagaagaacagccagaaccaggagaagctgcaggagctgaaccagaggctgacagagatgctgtgccagaaggagaaggagcccggcaacagcgccctggaggagcgggagcaggagaagttcaacctgaaggaggagctggagcgctgcaaggtgcagagcagcaccctggtgagcagcctggaggccgagctgtctgaggtgaagatccagacccacatcgtgcagcaggagaaccacctgctgaaggatgagctggagaagatgaagcagctgcaccgctgcccagacctgagtgacttccagcagaagatcagctctgtgctgagctacaatgagaagctgctgaaggagaaggaggccctgtctgaggagctgaacagctgtgtggacaagctggccaagagcagcctgctggagcaccgcatcgccaccatgaagcaggagcagaagtcctgggagcaccagagcgccagcctgaagagccagctggtggccagccaggagaaggtgcagaacctggaggacacagtgcagaatgtgaacctgcagatgagcaggatgaagagtgacctgcgggtgacccagcaggagaaggaggccctgaagcaggaggtgatgagcctgcacaagcagctgcagaatgccggcggcaagtcctgggcccctgagatcgccacccaccccagcggcctgcacaaccagcagaagaggctgtcctgggacaagctggaccacctgatgaatgaggagcagcagctgctgtggcaggagaatgaaaggctgcagaccatggtgcagaacaccaaggccgagctgacccacagccgggagaaggtgcggcagctggagagcaacctgctgcccaagcaccagaagcacctgaaccccagcggcaccatgaaccccacagagcaggagaagctgagcctgaagagagaatgtgaccagttccagaaggagcagagccctgccaacaggaaggtgtcccagatgaacagcctggagcaggagctggagaccatccacctggagaatgaaggcctgaagaagaagcaggtgaagctggatgagcagctgatggagatgcagcacctgcggagcacagccacccccagccccagcccccacgcctgggacctgcagctgctgcagcagcaggcctgccccatggtgccccgggagcagttcctgcagctgcagaggcagctgctgcaggccgagcgcatcaaccagcacctgcaggaggagctggagaacagaaccagcgagaccaacaccccccaggccctgctgcctgagcagagagctgtgcatgctgacagctacagaagaattggccacctgtag

SEQ ID NO: 21642 - DNA, 1203 bp, synthetic construct
  source 1..1203: mol_type = other DNA; note = Synthetic coding sequence
atggccggggagaaccaccagtggcagggcagcatcctgtacaacatgctgatgtctgccaagcagaccagggctgcccctgaggcccctgagacccggctggtggaccagtgctggggctgcagctgtggagatgagcccggggtgggccgggagggcctgctgggcggcagaaatgtggccctgctgtaccgctgctgcttctgtgggaaggaccacccccggcagggcagcatcctgtacagcatgctgaccagcgccaagcagacctacgccgcccccaaggcccctgaggccaccctgggcccctgctggggctgcagctgtggcagtgaccccggggtgggccgggccggcctgcccggcggccggcctgtggccctgctgtaccgctgctgcttctgtggggaggaccacccccggcagggcagcatcctgtacagcctgctgaccagcagcaagcagacccacgtggccccagctgcccctgaggcccggcctggaggagcctggtgggacaggagctactttgcccagaggcctgggggcaaggaggccctgcccggcggccgggccacagccctgctgtaccgctgctgcttctgtggggaggaccacccccagcagggcagcaccctgtactgtgtgcccaccagcaccaaccaggcccaggccgcccctgaggagcggccccgggccccctggtgggacaccagcagcggggccctgcggcctgtggccctgaagagcccccaggtggtgtgtgaggccgccagcgctggcctgctgaagaccctgcgctttgtgaagtacctgccctgcttccaggtgctgcccctggaccagcagctggtgctggtgaggaactgctgggccagcctgctgatgctggagctggcccaggaccggctgcagtttgagaccgtggaggtgtctgagcccagcatgctgcagaagatcctgaccaccaggagaagagagaccggcggcaatgagcccctgcctgtgcccaccctgcagcaccacctggcccctcctgctgaggccaggaaggtgcccagcgccagccaggtgcaggccatcaagtgcttcctgagcaagtgctggagcctgaacatcagcaccaaggagtatgcctacctgaagggcaccgtgctcttcaaccctgggaagggcaaggaaaatgactgcaaccaccactag

SEQ ID NO: 21643 - DNA, 627 bp, synthetic construct
  source 1..627: mol_type = other DNA; note = Synthetic coding sequence
atgaagcagctggaggaccacgaggcctttgagaccagcagcctcatcggccacagcgcccgggtgtatgccctgtactacaaggatggcctgctgtgcaccggcagtgatgacctgagcgccaagctgtgggatgtgtccacaggccagtgtgtgtatggcatccagacccacacctgtgccgctgtgaagtttgatgagcagaagctggtgacaggcagctttgacaacacagtggcctgctgggagtggagcagcggggcccggacccagcacttccggggccacactggagctgtgttttctgtggactacaatgatgagctggacatcctggtgtctggcagcgctgacttcaccgtgaaggtgtgggccctgtctgctggcacctgcctgaacaccctgaccggccacacagagtgggtgaccaaggtggtgctgcagaagtgcaaggtgaagagcctgctgcacagccctggggactacatcctgctgtctgctgacaagtatgagatcaagatctggcccatcggccgggagatcaactgcaagtgcctgaagaccctgtctgtgtctgaagatagaagcatctgcctgcagccccggctgcactttgatggcaagtag

SEQ ID NO: 21644 - DNA, 639 bp, synthetic construct
  source 1..639: mol_type = other DNA; note = Synthetic coding sequence
atgtttggagtgaccaagtttggagacaacattgaagatgagtggttcatcgtgtatgtgatcaagcagatcaccaaggagttccctgagctggtggccagaattgaggacaatgatggagagttcctgctgattgaagctgctgacttcctgcccaagtggctggaccctgagaacagcaccaacagagtcttcttctgccacggggagctgtgcatcatcccagcccccaggaagagcggggctgagagctggctgcccaccaccccacccaccatcccccaggccctgaacatcatcacagcccacagcgagaagatcctggccagcgagagcatccgggctgctgtgaacagacgcatccggggctacccagagaagatccaggccagcctgcaccgggcccactgcttcctgcctgctggcatcgtggccgtgctgaagcagaggccccggctggtggccgctgctgtgcaggccttctacctgcgggaccccatcgacctgcgggcctgcagggtcttcaagaccttcctgcctgagacccgcatcatgacctctgtgaccttcaccaagtgcctgtatgcccagctggtgcagcagagatttgtgcctgacagaagaagtggctacagatag

SEQ ID NO: 21645 - DNA, 474 bp, synthetic construct; identical to SEQ ID NO: 20844
  source 1..474: mol_type = other DNA; note = Synthetic coding sequence

SEQ ID NO: 21646 - DNA, 4773 bp, synthetic construct
  source 1..4773: mol_type = other DNA; note = Synthetic coding sequence
atgtctgccacctcctggttcctggtgagcagcagcggggcccggcaccggctgccccgggagctgatctttgtgggccgggaggagtgtgagctgatgctgcagagccgctctgtggacaagcagcacgccgtcatcaactatgaccaggacagagatgagcactgggtgaaggacctgggcagcctgaatggcacctttgtgaatgacatgaggatcccagaccagaagtatgtgaccctgaagctgaatgatgtgatccgcttcggctatgacagcaacatgtatgtgctggagcgggtgcagcaccgggtgcctgaggaggccctgaagcatgagaagtacaccagccagctgcaggtgtctgtgaagggcctggcccccaagaggtctgaggccctgcctgagcacaccccctactgtgaggccagcaaccccaggcctgagaagggggacagaagacctggaacagaagctgccagctaccgcacccccctgtatggccagcccagctggtggggagaagatgatggcagcaccctgcctgatgcccagaggcagggcgagccctacccagctgagcggcccaagggccctgtgcagcaggatggagagctgcacggcttccgggccccagctgagccccagggctgcagcttcagaagagagcccagctactttgagatccccaccaaggagaccccccagcccagccagcccccagaggtgcctgcccacgagatgcccaccaaggatgctgaggccggcggcggcggggccgcccctgtggtgcagagccacgccagcttcaccatcgagtttgatgactgcagccctgggaagatgaagatcaaggaccacatcaccaagttcagcctgcggcagaggcggcccccaggcaaggaggccaccccaggagagatggtgtctgctgagaccaaggtggccgactggctggtgcagaatgaccccagcctgctgcaccgggtgggccctggagatgacagacacagcaccaagagtgacctgcctgtgcacaccaggaccctgaagggccacaagcatgaagatggcacccagagcgacagcgaggaccccctggccaaggccgccagcgctgctggggtgcccctggaggccagcggggagcaggtgcggctgcagaggcagatcaagagggacccccaggagctgctgcacaaccagcaggcctttgtgattgagttctttgatgaggacacccccaggaagaagaggagccagagcttcacccacagccccagcggggaccccaaggctgacaagaggcggggccccaccccagctgaccgggaccggcccagcgtgcctgcccctgtgcaggccggcggccgcagcagcggcccccagagagctggcagcctgaagcgggagaagacagaggagcggctgggcagccccagccctgccagcaggaccccagcccggccctttggatctgtgggccgccgcagccggctggcccaggacttcatggcccagtgcctgcgggagagcagccctgctgcccggcccagccctgagaaggtgccccctgtgctgcctgcccccctgaccccccacggcaccagccctgtgggcccccccaccccacctccagcccccacagacccccagctgaccaaggccaggaagcaggaggaggatgacagcctgagtgatgctggcacctacaccattgaaacagaggcccaggacacagaggtggaggaggccaggaagatgattgaccaggtgtttggagtgctggagagccctgagctgagccgggccagcagcgccaccttccggcctgtgatccggggggacagagatgaaagtgatgatggcggcgtggcccagaggatggccctgctgcaggagtttgccagccggcccctgggcgccgccccccaggccgagcaccagggcctgcctgtgcccggcagccctgggggccagaagtgggtgagccgctgggccagcctggccgacagctacagcgaccccggcctgacagaagatggcctgggcagaagaggaggagagcctgagggcagcctgcctgtgaggatgagaagaaggctgccccagctgcccagcgagagagctgacagccctgctggccctgagagcagccgccgcagcggccctggccccccagagctggacagcgagcagcccagccggctgtttggccaggaggagctggaccctgacagcctgagtgatgccagcggcagtgatggcggccggggccctgagcccggggtggagccccaggacagcagaagaagaagcccccaggagggccccacctggagccggggccgccgcagcccccgggcccctggagagcccaccccagccagcttcttcatcggggaccagaatggagatgctgtgctgagcaggaagcccctggccgcccctggagatggagagggcctgggccagacagcccagcccagccccccagccagagatggagtgtatgtgtctgccaacggccgcatggtgatccagctgcggcccggccgcagccctgagccagatggccctgccccagccttcctgcggcaggagagcttcaccaaggagcccgccagcggccccccagcccctgggaagccaccccacatcagcagccaccccctgctgcaggacctggccgccaccagggctgccaggatggacttccacagccaggacacccacctgatcctgaaggagacagaaacagccctggccgccctggaggcccggctgctgagcaacagcgtggatgctgaatgtgagggcggcagcaccccccggcccccagaagatgccctgagcggggacagtgatgtggacacagccagcacagtgtccctgcggagcggcaagagcggccccagccccaccaccccccagcccctgcgggcccagaaggagatgagccccagccccccagctgcccaggaccccggcggcacagccctggtgtctgcccgggagcagagcagcgagcggcagcaccaccccctgggccccacagacatgggccgcggggagcctgtgcggcgcagcgccatcagaagaggccaccggccccggggcagcctggactggcccagcgaggagcggggccctgtgctggcccacctgcccagcagtgatgtgatggccagcaaccacgagaccccagaggccaccggggccggccgcctgggcagcaggaggaagccagctgcccccccacccagccctgctgcccgggaggagcagagccgcagcagcgccagcagccagaagggcccccaggccctgaccaggagcaacagcctgagcaccccccggcccacccgggccagccggctgcggcgggcccggctgggagatgccagtgacacagaggccgcagatggagagcggggcagcctgggcaaccctgagcctgtgggccggcctgctgctgagcaggccaagaagctgagccggctggacatcctggccatgcccaggaagagagctggcagcttcaccggcaccagtgaccctgaggccgccccagcccggaccagcttcagcggccgctctgtggagctgtgctgtgccagcaggaagcccaccatggccgaggcccgggctgtgtccaggaaggccgccaacacagccaccaccaccggcccccggcagcccttcagccgggcccggagcggcagcgcccgctacaccagcaacacccggcggcggcagcagggcagtgactacaccagcaccagcgaggaggagtatggcagccgccacggcagccccaagcacaccaggagccacaccagcacagccacccagacccccagggctggcagcagcagccgggcccggagccgggcccctggcccccgggacacagatgatgatgaggaggagccagacccctacggcttcatcgtgcagacagctgagattgctgagatcgcccggctgagccagaccctggtgaaggatgtggccatcctggcccaggagatccatgatgtggccggagatggagacaccctgggcagcagcgagcccgcccacagcgccagcctgagcaacatgcccagcaccccagccagcaccatcagcgcccgggaggagctggtgcagagaattcctgaggccagcctgaacttccagaaggtgcccccaggcagcctgaacagccgggactttgaccagaacatgaatgacagctgtgaagatgccctggccaacaagacccggcccaggaaccgggaggaggtgatctttgacaacctgatgctgaaccctgtgtcccagctgagccaggccatccgggagaacacagagcacctggccgagaagatgaagatcctcttccagaacacaggccgggcctgggaggacctggaggcccgcatcaatgcagaaaatgaggtgcccatcctgaagaccagcaacaaggagatcagcagcatcctgaaggagctgcggcgggtgcagaagcagctggaggtgatcaatgccatcgtggaccccagcggcagcctggacctgctgaccggcaacagaagcctggccagcagcgcccagcccggcctgggcaagggccgggtggccgcccagagcccccccagccctgccagcgctgaggccctgctgcctgccctgcccctgaggaacttcccccagagggccagctgtggcccccccagcctgcctgaccccaccttcctgcctgatgctgagcgcttcctgatctag

SEQ ID NO: 21647 - DNA, 1452 bp, synthetic construct
  source 1..1452: mol_type = other DNA; note = Synthetic coding sequence
atgtctgggggcggccccagcggcggcggccctgggggcagcggccgggcccggaccagcagctttgctgagcccggcggcggcggcggcggcggcggcggcggccctgggggcagcgccagcggccctgggggcaccggcggcggcaaggcctctgtgggcgccatgggcggcggcgtgggcgccagcagcagcggcggcggccctgggggcagcggcggcggcggcagcggcggccctggggccggcaccagcttccccccacctggggtgaagctgggccgggacagcggcaaggtgaccaccgtggtggccaccctgggccagggccctgagaggagccaggaggtggcctacacagacatcaaggtgattggaaatggcagctttggagtggtgtaccaggcccggctggccgagacccgggagctggtggccatcaagaaggtgctgcaggacaagcgcttcaagaaccgggagctgcagatcatgaggaagctggaccactgcaacatcgtgcggctgcgctacttcttctacagcagcggggagaagaaggatgagctgtacctgaacctggtgctggagtatgtgcctgagaccgtgtacagagtggcccggcacttcaccaaggccaagctgaccatccccatcctgtatgtgaaggtgtacatgtaccagctgttccgcagcctggcctacatccacagccagggcgtgtgccaccgggacatcaagccccagaacctgctggtggaccctgacacagctgtgctgaagctgtgtgactttggcagcgccaagcagctggtgcggggggagcccaacgtgtcctacatctgcagccgctactaccgggcccctgagctgatctttggagccacagactacaccagcagcattgatgtgtggagcgctggctgtgtgctggccgagctgctgctgggccagcccatcttccctggggacagcggcgtggaccagctggtggagatcatcaaggtgctgggcacccccacccgggagcagatccgggagatgaaccccaactacacagagttcaagttcccccagatcaaggcccacccctggaccaaggtgttcaagagcaggaccccacctgaggccatcgccctgtgcagcagcctgctggagtacacccccagcagccggctgagccccctggaggcctgtgcccacagcttctttgatgagctgcgctgcctgggcacccagctgcccaacaaccggcccctgcccccactcttcaacttctctgctggggagctgagcatccagcccagcctgaatgccatcctgatccccccccacctgcggagccctgctggcaccaccaccctgacccccagcagccaggccctgacagagacccccaccagcagtgactggcagagcacagatgccacccccaccctgaccaacagcagctag

SEQ ID NO: 21648 - DNA, 1389 bp, synthetic construct
  source 1..1389: mol_type = other DNA; note = Synthetic coding sequence
atgggcggcgctgaggccgagccctggggccgggcccctggccctgccatcggcggccggcgggccggggacagctgccccggctggaggagaagaagccgcagccggggccggggccagaggctgagccacggcccccggcggcggccccagctgctgacagctgccccacccctgcaggcccggggggccttccgctccttcccccacagctggggcgaggacttcctggccagcctgatgttcaagatccagctggagcccctgaagctgcgggcctggaccctgaatggatttgtgaagttcaggaacaaggagaccagcgctggccctgtggccgtgatgggcaaggactactacaagatcctgggcatccccagcggggccaatgaagatgagatcaagaaggcctacaggaagatggccctgaagtaccacccagacaagaacaaggagcccaatgctgaggagaagttcaaggagattgctgaggcctatgatgtgctgagtgaccccaagaagaggggcctgtatgaccagtatggagaggagggcctgaagacaggaggcggcaccagcggcggcagcagcggcagcttccactacaccttccatggagacccccacgccacctttgccagcttcttcggcggcagcaacccctttgacatcttctttgccagcagccgcagcacccggcccttcagcggctttgatcctgatgacatggatgtggatgaagatgaggacccctttggagccttcggccgcttcggcttcaacggcctgagccggggcccccggcgggcccctgagcccctgtaccccaggaggaaggtgcaggacccccctgtggtgcatgagctgcgggtgtccctggaggagatctaccacggcagcaccaagaggatgaagatcacccggcggcggctgaacccagatggccgcacagtgaggacagaggacaagatcctgcacatcgtcatcaagaggggctggaaggagggcaccaagatcaccttccccaaggagggagatgccaccccagacaacatcccagctgacatcgtgtttgtgctgaaggacaagccccacgcccacttcagaagagatggcaccaacgtgctgtacagcgccctgatcagcctgaaggaggccctgtgtggctgcaccgtgaacatccccaccattgatggccgggtcatccccctgccctgcaatgatgtgatcaagccaggcaccgtgaagaggctgcggggggagggcctgcccttccccaaggtgcccacccagagaggagacctgattgtggagttcaaggtgcgcttcccagaccggctgaccccccagacccggcagatcctgaagcagcacctgccctgcagctag

SEQ ID NO: 21649 - DNA, 279 bp, synthetic construct
  source 1..279: mol_type = other DNA; note = Synthetic coding sequence
gtgtatggagccaaggacatcgagctgagccctgaggcccaggccaagattgaccgctacacccagcagggctttggaaacctgcccatctgcatggccaagacccacctgagcctgagccaccagcctgacaagaagggcgtgccccgggacttcatcctgcccatcagtgatgtgcgggccagcattggagctggcttcatctaccccctggtgggcaccaggagcagccccctggccctggtgggggagagccagcccaagcaggtgcacccctag

SEQ ID NO: 21650 - DNA, 468 bp, synthetic construct
  source 1..468: mol_type = other DNA; note = Synthetic coding sequence
atgtctgtgacctatgatgacagcgtgggcgtggaggtgtccagtgacagcttctgggaggtgggcaactacaagaggacagtgaagagaattgatgatggccaccggctgtgcagcgacctgatgaactgcctgcacgagcgggccagaattgagaaggcctatgcccagcagctgacagagtgggcccggcgctggaggcagctggtggagaagggcccccagtatggcaccgtggagaaggcctggatggccttcatgtctgaggccgagcgggtgtctgagctgcacctggaggtgaaggccagcctgatgaatgatgactttgagaagatcaagaactggcagaaggaggccttccacaagcagatgatgggcggcttcaaggagaccaaggaggctgaagatggcttcaggaaggcccagaagccctgggccaagaagctgaaggaggtgcacctgtcctag

SEQ ID NO: 21651 - DNA, 483 bp, synthetic construct; identical to SEQ ID NO: 20009
  source 1..483: mol_type = other DNA; note = Synthetic coding sequence

SEQ ID NO: 21652 - DNA, 660 bp, synthetic construct; identical to SEQ ID NO: 21179
  source 1..660: mol_type = other DNA; note = Synthetic coding sequence

SEQ ID NO: 21653 - DNA, 318 bp, synthetic construct
  source 1..318: mol_type = other DNA; note = Synthetic coding sequence
atgaacatgatctggaggaacagcatcagctgcctgcggctgggcaaggtgccccaccgctaccagagcggctaccaccctgtggcccccctgggcagccgcatcctgacagatcctgccaaggtgtttgagcacaacatgtgggaccacatgcagtggagcaaggaggaggaggccgccgccaggaagaaggtgaaggaaaattctgctgtgcgggtgctgctggaggagcaggtgaagtatgagcgggaggccagcaagtactgggacaccttctacaagatccacaagaacaagttcttcaaggacaggaactag

SEQ ID NO: 21654 - DNA, 366 bp, synthetic construct
  source 1..366: mol_type = other DNA; note = Synthetic coding sequence
tgagaaggagagagccccacagccagcccccacagcagcgccacagatgacctgcaccacagcgaccgctaccagaccttcctgcgggtgcgggccaaccggcagacccggctgaatgcccgcatcggcaagatgaagaggaggaagcaggatgagggccaggtgtgccccctgtgcaaccggcccctggccggcagcgagcaggagatgagcagacatgtggagcactgcctgagcaagcgggagggcagctgcatggccgaggatgatgctgtggacatcgagcacgagaacaacaacagatttgaggagtatgagtggtgtggccagaagaggatccgggccaccaccctgctggagggctag

SEQ ID NO: 21655 - DNA, 1701 bp, synthetic construct; identical to SEQ ID NO: 19423
  source 1..1701: mol_type = other DNA; note = Synthetic coding sequence

SEQ ID NO: 21656 - DNA, 4719 bp, synthetic construct
  source 1..4719: mol_type = other DNA; note = Synthetic coding sequence
atgctgctgcacctgtgcagcgtgaagaacctgtaccagaaccgcttcctgggcctggccgccatggccagccccagcaggaacagccagagcagaagacgctgcaaggagcccctgcgctacagctacaacccagaccagttccacaacatggacctgcggggcggcccccatgatggagtgaccatccccaggagcaccagtgacacagacctggtgaccagtgacagccgcagcaccctgatggtgagcagcagctactacagcatcggccacagccaggacctggtgatccactgggacatcaaggaggaggtggatgctggggactggattggcatgtacctgattgatgaggtgctgtctgagaacttcctggactacaagaacagaggagtgaatggcagccaccggggccagatcatctggaagattgatgccagcagctactttgtggagcctgagaccaagatctgcttcaagtactaccacggcgtgtctggggccctgcgggccaccacccccagcgtgacagtgaagaacagcgctgcccccatcttcaagagcatcggggctgatgaaacagtgcagggccagggcagccggcggctcatctccttcagcctgagtgacttccaggccatgggcctgaagaagggcatgttcttcaacccagacccctacctgaagatcagcatccagcccgggaagcacagcatcttccctgccctgccccaccacggccaggagaggaggagcaagatcatcggcaacacagtgaaccccatctggcaggccgagcagttctcctttgtgtccctgcccacagatgtgctggagattgaggtgaaggacaagtttgccaagagccggcccatcatcaagcgcttcctgggcaagctgtccatgcctgtgcagaggctgctggagagacatgccatcggggacagagtggtgtcctacaccctgggccgccgcctgcccacagaccacgtgtctggccagctgcagttccgctttgagatcaccagcagcatccacccagatgatgaggagatcagcctgagcacagagcctgagagcgcccagatccaggacagccccatgaacaacctgatggagagcggcagcggggagcccaggtctgaggcccctgagagcagcgagagctggaagccagagcagctgggggagggctctgtgcctgatggccctggcaaccagagcattgagctgagcaggcctgctgaggaggccgccgtcatcacagaagctggggaccagggcatggtgtctgtgggccctgagggcgctggggagctgctggcccaggtgcagaaggacatccagcctgcccccagcgctgaggagctggccgagcagctggacctgggggaggaggccagcgccctgctgctggaggatggagaggccccagccagcaccaaggaggagcccctggaggaggaggccaccacccagagcagagctggccgggaggaggaggagaaggagcaggaggaggagggagatgtgtccaccctggagcagggcgagggccgcctgcagctgcgggcctctgtgaagaggaagagccggccctgcagcctgcctgtgtctgagctggagaccgtcatcgccagcgcctgtggggaccctgagacccccaggacccactacatccgcatccacaccctgctgcacagcatgcccagcgcccagggcggcagcgctgctgaggaggaggatggagctgaggaggagagcaccctgaaggacagcagcgagaaggatggcctgtctgaggtggacacagtggccgctgaccccagcgccctggaggaggaccgggaggagcctgagggcgccaccccaggcacagcccaccctggccacagcggcggccacttccccagcctggccaacggggccgcccaggatggagacacccaccccagcacaggcagcgagagtgacagcagcccccggcagggcggggaccacagctgtgagggctgtgatgccagctgctgcagccccagctgctacagcagcagctgctacagcaccagctgctacagcagcagctgctacagcgccagctgctacagccccagctgctacaatggaaacagatttgccagccacacccgcttcagctctgtggacagcgccaagatcagcgagagcacagtgttcagcagccaggatgatgaggaggaggagaacagcgcctttgagagcgtgcctgacagcatgcagagccctgagctggaccctgagagcaccaacggggccggcccctggcaggatgagctggccgcccccagcggccacgtggagaggagccctgagggcctggagagccctgtggccggccccagcaacagaagagaggactgggaggccagaattgacagccacggccgggtcttctacgtggaccacgtgaacagaaccaccacctggcagaggcccacagctgctgccaccccagatggcatgaggaggagcggcagcatccagcagatggagcagctgaacagacgctaccagaacatccagaggaccatcgccacagagaggagtgaagaagattctggcagccagagctgtgagcaggccccagctgggggcggcggcggcggcggcagtgacagcgaggccgagagcagccagagcagcctggacctgcggcgggagggcagcctgagccctgtgaacagccagaagatcaccctgctgctgcagagccctgctgtgaagttcatcaccaaccctgagttcttcaccgtgctgcacgccaactacagcgcctacagagtcttcaccagcagcacctgcctgaagcacatgatcctgaaggtgagaagagatgccaggaactttgagcgctaccagcacaacagagacctggtgaacttcatcaacatgtttgctgacacccggctggagctgccccggggctgggagatcaagacagaccagcagggcaagagcttctttgtggaccacaacagccgggccaccaccttcatcgacccccgcatccccctgcagaatggccgcctgcccaaccacctgacccaccggcagcacctgcagaggctgcggagctacagcgctggggaggccagcgaggtgtccaggaacagaggagccagcctgctggcccggcccggccacagcctggtggccgccatccgcagccagcaccagcacgagagcctgcccctggcctacaatgacaagatcgtggccttcctgcggcagcccaacatctttgagatgctgcaggagcggcagcccagcctggccaggaaccacaccctgcgggagaagatccactacatcagaacagagggcaaccacggcctggagaagctgagctgtgatgctgacctggtgatcctgctgagcctgtttgaggaggagatcatgtcctatgtgcccctgcaggccgccttccaccctggctacagcttcagcccccgctgcagcccctgcagcagcccccagaacagccctggcctgcagagggccagcgcccgggcccccagcccctaccgccgggactttgaggccaagctgaggaacttctacaggaagctggaggccaagggcttcggccagggccctgggaagatcaagctgatcatcagaagagaccacctgctggagggcaccttcaaccaggtgatggcctacagcaggaaggagctgcagaggaacaagctgtatgtgacctttgtgggggaggagggcctggactacagcggccccagccgggagttcttcttcctgctgagccaggagctgttcaacccctactacggcctgtttgagtacagcgccaatgacacctacacagtgcagatcagccccatgtctgcctttgtggagaaccacctggagtggttccgcttcagcggccgcatcctgggcctggccctgatccaccagtacctgctggatgccttcttcacccggcccttctacaaggccctgctgcggctgccctgtgacctgagtgacctggagtacctggatgaggagttccaccagagcctgcagtggatgaaggacaacaacatcacagacatcctggacctgaccttcaccgtgaatgaggaggtgtttggccaggtgacagagcgggagctgaagagcggcggggccaacacccaggtgacagagaagaacaagaaggagtacatcgagaggatggtgaagtggagggtggagcggggcgtggtgcagcagacagaggccctggtgcggggcttctatgaggtggtggacagccggctggtgtctgtgtttgatgcccgggagctggagctggtgattgctggaacagctgagattgacctgaatgactggaggaacaacacagagtacagaggaggctaccatgatggccacctggtgatccgctggttctgggccgctgtggagcgcttcaacaatgagcagaggctgcggctgctgcagtttgtgacaggcaccagctctgtgccctatgagggctttgctgccctgcggggcagcaatggcctgcggcgcttctgcatcgagaagtggggcaagatcaccagcctgccccgggcccacacctgcttcaaccggctggacctgcccccctaccccagctacagcatgctgtatgagaagctgctgacagctgtggaggagaccagcaccttcggcctggagtag

SEQ ID NO: 21657 - DNA, 1629 bp, synthetic construct
  source 1..1629: mol_type = other DNA; note = Synthetic coding sequence
atgagcggcctggtgctgggccagagagatgagcctgctggccaccggctgagccaggaggagatcctgggcagcacccggctggtgtcccagggcctggaggccctgcggtctgagcaccaggccgtgctgcagagcctgagccagaccatcgagtgcctgcagcagggcggccacgaggagggcctggtgcatgagaaggcccggcagctgcggcgctccatggagaacatcgagctgggcctgtctgaggcccaggaggagaaggagggagatgccaccaaggacagcctggatgacctcttccccaatgaggaggaggaggaccccagcaatggcctgagccggggccagggcgccacagctgcccagcagggcggctatgagatcccagcccggctgcggaccctgcacaacctggtgatccagtatgctgcccagggccgctatgaggtggccgtgcccctgtgcaagcaggccctggaggacctggagaggaccagcggccggggccacccagatgtggccaccatgctgaacatcctggccctggtgtacagagaccagaacaagtacaaggaggccgcccacctgctgaatgatgccctgagcatccgggagagcaccctgggccctgaccaccctgctgtggccgccaccctgaacaacctggccgtgctgtatggcaagaggggcaagtacaaggaggccgagcccctgtgccagagggccctggagatccgggagaaggtgctgggcaccaaccacccagatgtggccaagcagctgaacaacctggccctgctgtgccagaaccagggcaagtatgaggccgtggagcgctactaccagagggccctggccatctatgagggccagctgggccctgacaaccccaacgtggcccggaccaagaacaacctggccagctgctacctgaagcagggcaagtatgcagaggccgagaccctgtacaaggagatcctgacccgggcccacgtgcaggagtttggatctgtggatgatgaccacaagcccatctggatgcatgctgaggagcgggaggagatgagcaagagccgccaccatgaaggaggcaccccctatgcagaatatggaggctggtacaaggcctgcaaggtgagcagccccaccgtgaacaccaccctgaggaacctgggcgccctgtaccgccggcagggcaagctggaggccgctgagaccctggaggagtgtgccctgcggagccggcggcagggcacagaccccatcagccagaccaaggtggccgagctgctgggggagagtgatggaagaaggaccagccaggagggccctggggacagcgtgaagtttgagggcggggaggatgcctctgtggccgtggagtggagcggagatggcagcggcaccctgcagaggagcggcagcctgggcaagatcagagatgtgctgcggcgcagcagcgagctgctggtgaggaagctgcagggcacagagccccggcccagcagcagcaacatgaagagagctgccagcctgaactacctgaaccagcccagcgctgcccccctgcaggtgtcccggggcctgagcgccagcaccatggacctgagcagcagcagctag

SEQ ID NO: 21658 - DNA, 1548 bp, synthetic construct
  source 1..1548: mol_type = other DNA; note = Synthetic coding sequence
atgtgccaggtgggggaggactatggagagcccgcccctgaggagcccccaccagccccccggcccagccgggagcagaagtgtgtgaagtgcaaggaggcccagcctgtggtggtgatccgggctggagatgccttctgccgggactgcttcaaggccttctacgtgcacaagttccgggccatgctgggcaagaacagactcatcttccctggagagaaggtgctgctggcctggagcggcggccccagcagcagctccatggtgtggcaggtgctggagggcctgagccaggacagcgccaagaggctgcgctttgtggccggggtcatctttgtggatgagggcgccgcctgtggccagagcctggaggagaggagcaagaccctggccgaggtgaagcccatcctgcaggccaccggcttcccctggcacgtggtggccctggaggaggtgttcagcctgccccccagcgtgctgtggtgcagcgcccaggagctggtgggcagcgagggcgcctacaaggctgctgtggacagcttcctgcagcagcagcacgtgctgggcgctgggggcggccctggccccacccagggcgaggagcagcccccccagccccccctggacccccagaacctggcccggcccccagccccagcccagacagaggccctgagccagctgttctgcagcgtgaggaccctgacagccaaggaggagctgctgcagaccctgcggacccacctgatcctgcacatggcccgggcccacggctacagcaaggtgatgaccggggacagctgcacccggctggccatcaagctgatgaccaacctggccctgggccgcggggccttcctggcctgggacaccggcttcagtgatgaaagacatggagatgtggtggtggtgcggcccatgagggaccacaccctgaaggaggtggccttctacaacagactcttctctgtgcccagcgtcttcaccccagctgtggacaccaaggcccctgagaaggccagcatccaccggctgatggaggccttcatcctgcggctgcagacccagttccccagcacagtgtccacagtgtaccgcaccagcgagaagctggtgaagggccccagagatggccctgctgctggggacagcggcccccgctgcctgctgtgcatgtgtgccctggatgtggatgctgctgacagcgccacagccttcggggcccagaccagcagccggctgagccagatgcagagccccatccccctgacagagaccaggaccccacctggcccctgctgcagccctggggtgggctgggcccagagatgtggccagggcgcctgccggcgggaggacccccaggcctgcatcgaggagcagctgtgctacagctgccgggtgaacatgaaggacctgcccagcctggaccccctgcccccctacatcctggccgaggcccagctgcggacccagagggcctggggcctgcaggagatccgggactgcctgattgaggacagtgatgatgaggccggccagagctag

SEQ ID NO: 21659 - DNA, 1263 bp, synthetic construct
  source 1..1263: mol_type = other DNA; note = Synthetic coding sequence
atgttcaagaggacagtgctgagctgccccccacctgctgccccacccctgcaggcccggggggccttccgctccttcccccacagctggggcgaggacttcctggccagcctgatgttcaagatccagctggagcccctgaagctgcgggcctggaccctgaatggatttgtgaagttcaggaacaaggagaccagcgctggccctgtggccgtgatgggcaaggactactacaagatcctgggcatccccagcggggccaatgaagatgagatcaagaaggcctacaggaagatggccctgaagtaccacccagacaagaacaaggagcccaatgctgaggagaagttcaaggagattgctgaggcctatgatgtgctgagtgaccccaagaagaggggcctgtatgaccagtatggagaggagggcctgaagacaggaggcggcaccagcggcggcagcagcggcagcttccactacaccttccatggagacccccacgccacctttgccagcttcttcggcggcagcaacccctttgacatcttctttgccagcagccgcagcacccggcccttcagcggctttgatcctgatgacatggatgtggatgaagatgaggacccctttggagccttcggccgcttcggcttcaacggcctgagccggggcccccggcgggcccctgagcccctgtaccccaggaggaaggtgcaggacccccctgtggtgcatgagctgcgggtgtccctggaggagatctaccacggcagcaccaagaggatgaagatcacccggcggcggctgaacccagatggccgcacagtgaggacagaggacaagatcctgcacatcgtcatcaagaggggctggaaggagggcaccaagatcaccttccccaaggagggagatgccaccccagacaacatcccagctgacatcgtgtttgtgctgaaggacaagccccacgcccacttcagaagagatggcaccaacgtgctgtacagcgccctgatcagcctgaaggaggccctgtgtggctgcaccgtgaacatccccaccattgatggccgggtcatccccctgccctgcaatgatgtgatcaagccaggcaccgtgaagaggctgcggggggagggcctgcccttccccaaggtgcccacccagagaggagacctgattgtggagttcaaggtgcgcttcccagaccggctgaccccccagacccggcagatcctgaagcagcacctgccctgcagctag

SEQ ID NO: 21660 - DNA, 2979 bp, synthetic construct
  source 1..2979: mol_type = other DNA; note = Synthetic coding sequence
atgtatggcagcgcccggtctgtgggcaaggtggagcccagcagccagagccctggccgcagcccccggctgcccaggagcccccggctgggccacaggaggaccaacagcactggaggcagcagcggcagctctgtgggcggcggcagcggcaagaccctgtccatggagaacatccagagcctgaatgctgcctatgccaccagcggccccatgtacctgagtgaccatgaaaatgtgggcagcgagacccccaagagcaccatgaccctgggccgcagcggcggccgcctgccctacggcgtgaggatgacagccatgggcagcagccccaacatcgccagcagcggcgtggccagtgacaccatcgcctttggagagcaccacctgccccctgtgtccatggccagcacagtgccccacagcctgcggcaggcccgggacaacaccatcatggacctgcagacccagctgaaggaggtgctgcgggagaatgacctgctgaggaaggatgtggaggtgaaggagagcaagctgagcagctccatgaacagcatcaagaccttctggagccctgagctgaagaaggagcgggccctgaggaaggatgaggccagcaagatcaccatctggaaggagcagtacagagtggtgcaggaggagaaccagcacatgcagatgaccatccaggccctgcaggatgagctgcgcatccagagggacctgaaccagctgttccagcaggacagcagcagcaggactggagagccctgtgtggccgagctgacagaggagaacttccagaggctgcacgccgagcacgagcggcaggccaaggagctgttcctgctgaggaagaccctggaggagatggagctgagaattgagacccagaagcagaccctgaatgccagagatgagagcatcaagaagctgctggagatgctgcagagcaagggcctgagcgccaaggccacagaggaggaccacgagaggacccggcggctggccgaggccgagatgcacgtgcaccacctggagagcctgctggagcagaaggagaaggagaacagcatgctgcgggaggagatgcacagaagatttgaaaatgccccagacagcgccaagaccaaggccctgcagaccgtcatcgagatgaaggacagcaagatcagctccatggagcggggcctgcgggacctggaggaggagatccagatgctgaagagcaatggagccctgagcacagaggagcgggaggaggagatgaagcagatggaggtgtaccgcagccacagcaagttcatgaagaacaagattggccaggtgaagcaggagctgagcaggaaggacacagagctgctggccctgcagaccaagctggagaccctgaccaaccagttcagtgacagcaagcagcacatcgaggtgctgaaggagagcctgacagccaaggagcagagagctgccatcctgcagacagaggtggatgccctgcggctgcggctggaggagaaggagaccatgctgaacaagaagaccaagcagatccaggacatggccgaggagaagggcacccaggccggggagatccatgacctgaaggacatgctggatgtgaaggagaggaaggtgaatgtgctgcagaagaagattgagaacctgcaggagcagctgcgggacaaggagaagcagatgagcagcctgaaggagcgggtgaagagcctgcaggccgacaccaccaacacagacacagccctgaccaccctggaggaggccctggccgagaaggagaggaccatcgagcggctgaaggagcagagggacagagatgagcgggagaagcaggaggagattgacaactacaagaaggacctgaaggacctgaaggagaaggtgtccctgctgcagggcgacctgtctgagaaggaggccagcctgctggacctgaaggagcacgccagcagcctggccagcagcggcctgaagaaggacagccggctgaagaccctggagatcgccctggagcagaagaaggaggagtgcctgaagatggagagccagctgaagaaggcccatgaagctgccctggaggcccgggccagccctgagatgtctgaccgcatccagcacctggagcgggagatcacccgctacaaggatgagagcagcaaggcccaggccgaggtggaccggctgctggagatcctgaaggaggtggagaatgagaagaatgacaaggacaagaagattgctgagctggagagcctcttcagccggcaggtgaaggaccagaacaagaaggtggccaacctgaagcacaaggagcaggtggagaagaagaagagcgcccagatgctggaggaggcccggcggcgggaggacaacctgaatgacagcagccagcagctgcaggacagcctgaggaagaaggatgacagaattgaggagctggaggaggccctgcgggagagcgtgcagatcacagctgagcgggagatggtgctggcccaggaggagagcgcccggaccaatgctgagaagcaggtggaggagctgctgatggccatggagaaggtgaagcaggagctggagagcatgaaggccaagctgagcagcacccagcagagcctggccgagaaggagacccacctgaccaacctgcgggcagagaggaggaagcacctggaggaggtgctggagatgaagcaggaggccctgctggccgccatcagcgagaaggatgccaacatcgccctgctggagctgagcagcagcaagaagaagacccaggaggaggtggccgccctgaagcgggagaaggaccggctggtgcagcagctgaagcagcagacccagaacaggatgaagctgatggctgacaactatgaagatgaccacttcaagagcagccacagcaaccagaccaaccacaagcccagcccagaccaggatgaggaggagggcatctgggcctag

SEQ ID NO: 21661 - DNA, 180 bp, synthetic construct
  source 1..180: mol_type = other DNA; note = Synthetic coding sequence
atggagcccagcgcccagcagctgcagctggccgccagcctgcctgccaacctgagcaacttctgccagggcagcgagatgcccaccaccagcaggcctgccctggatgtgaagggcggcaccagccctgccaaggaggatgccaaccaggagatgagctctgtggcctacagcaactag

SEQ ID NO: 21662 - DNA, 6978 bp, synthetic construct
  source 1..6978: mol_type = other DNA; note = Synthetic coding sequence
atgaagaagggcagccagcagaagatcttcagcaaggccaagatccccagcagcagccacagccccatccccagctccatgagcaacatgaggagccgcagcctgagccccctgattggcagcgagaccctgcccttccacagcggcggccagtggtgtgagcaggtggagattgctgatgagaacaacatgctgctggactaccaggaccacaagggagctgacagccacgccggcgtgcgctacatcacagaggccctgatcaagaagctgaccaagcaggacaacctggccctgatcaagagcctgaacctgagcctgagcaaggatggcggcaagaagttcaagtacatcgagaacctggagaagtgtgtgaagctggaggtgctgaacctgagctacaacctgattggcaagattgagaagctggacaagctgctgaagctgcgggagctgaacctgagctacaacaagatcagcaagattgagggcatcgagaacatgtgcaacctgcagaagctgaacctggccggaaatgaaattgagcacatccctgtgtggctgggcaagaagctgaagagcctgcgggtgctgaacctgaagggcaacaagatcagcagcctgcaggacatcagcaagctgaagcccctgcaggacctgatcagcctcatcctggtggagaaccctgtggtgaccctgccccactacctgcagttcaccatcttccacctgcggagcctggagagcctggagggccagcctgtgaccacccaggaccggcaggaggcctttgagcgcttcagcctggaggaggtggagcggctggagcgggacctggagaagaagatgattgaaacagaggagctgaagagcaagcagacccgcttcctggaggagatcaagaaccaggacaagctgaacaagagcctgaaggaggaggccatgctgcagaagcagagctgtgaggagctgaagagtgacctgaacaccaagaatgagctgctgaagcagaagaccatcgagctgacccgggcctgccagaagcagtatgagctggagcaggagctggccttctacaagattgatgccaagtttgagcccctgaactactaccccagtgaatatgcagaaattgacaaggccccagatgagagcccctacatcggcaagagccgctacaagaggaacatgtttgccacagagagctacatcattgattctgcccaggccgtgcagatcaagaagatggagccagatgagcagctgagaaatgaccacatgaacctgcggggccacacccccctggacacccagctggaggacaaggagaagaagatctctgctgcccagacccggctgtctgagctgcatgatgaaattgagaaggccgagcagcagatcctgcgggccacagaggagttcaagcagctggaggaggccatccagctgaagaagatcagcgaggccggcaaggacctgctgtacaagcagctgagcggccgcctgcagctggtgaacaagctgcggcaggaggccctggacctggagctgcagatggagaagcagaagcaggagattgctgggaagcagaaggagatcaaggacctgcagatcgccatcgacagcctggacagcaaggaccccaagcacagccacatgaaggcccagaagagcggcaaggagcagcagctggacatcatgaacaagcagtaccagcagctggagagccggctggatgagatcctgagcagaattgccaaggagacagaggagatcaaggacctggaggagcagctgacagagggccagattgctgccaatgaggccctgaagaaggacctggagggcgtcatcagcggcctgcaggagtacctgggcaccatcaagggccaggccacccaggcccagaatgaatgtaggaagctgagagatgagaaggagaccctgctgcagaggctgacagaggtggagcaggagcgggaccagctggagatcgtggccatggatgctgagaacatgaggaaggagctggccgagctggagagcgccctgcaggagcagcacgaggtgaatgccagcctgcagcagacccagggcgacctgagcgcctatgaggccgagctggaggcccggctgaacctgagagatgctgaggccaaccagctgaaggaggagctggagaaggtgacccggctgacccagctggagcagagcgccctgcaggccgagctggagaaggagcggcaggccctgaagaatgccctgggcaaggcccagttcagcgaggagaaggagcaggagaacagcgagctgcacgccaagctgaagcacctgcaggatgacaacaacctgctgaagcagcagctgaaggacttccagaaccacctgaaccacgtggtggatggcctggtgcggcctgaggaggtggccgcccgggtggatgagctgcggaggaagctgaagctgggcaccggggagatgaacatccacagccccagtgatgtgctgggcaagagcctggccgacctgcagaagcagttcagcgagatcctggcccggagcaagtgggagagagatgaggcccaggtgcgggagaggaagctgcaggaggagatggccctgcagcaggagaagctggccaccggccaggaggagttccggcaggcctgtgagcgggccctggaggccaggatgaactttgacaagaggcagcacgaggcccgcatccagcagatggagaatgagatccactacctgcaggagaacctgaagtccatggaggagatccagggcctgacagacctgcagctgcaggaggctgatgaggagaaggagcgcatcctggcccagctgcgggagctggagaagaagaagaagctggaggatgccaagagccaggagcaggtgtttggcctggacaaggagctgaagaagctgaagaaggctgtggccaccagtgacaagctggccacagctgagctgaccatcgccaaggaccagctgaagagcctgcatggaacagtgatgaagatcaaccaggagcgggcagaggagctgcaggaggccgagcgcttcagcaggaaggccgcccaggccgcccgggacctgaccagggctgaggccgagattgagctgctgcagaacctgctgcggcagaagggggagcagttccggctggagatggagaagacaggagtgggcaccggggccaacagccaggtgctggagattgagaagctgaatgagaccatggagcggcagaggacagaaattgcccggctgcagaatgtgctggacctgactggaagtgacaacaagggcggctttgaaaatgtgctggaggagattgctgagctgcggcgggaggtgtcctaccagaatgactacatcagctccatggctgaccccttcaagagaagaggctactggtacttcatgcctcctccacccagcagcaaggtgagcagccacagcagccaggccaccaaggacagcggcgtgggcctgaagtacagcgccagcacccctgtgaggaagccccggcccggccagcaggacggcaaggagggcagccagcccccaccagccagcggctactgggtgtacagccccatccgcagcggcctgcacaagctgttccccagcagagatgctgacagcggcggggacagccaggaggagagcgagctggatgaccaggaggagcccccatttgtgcccccacctggctacatgatgtacacagtgctgcctgatggcagccctgtgccccagggcatggccctgtatgcccctcctccacccctgcccaacaacagccggcccctgaccccaggcaccgtggtgtatggccccccacctgctggggcccccatggtgtatggccccccaccacccaacttcagcatccccttcatccccatgggcgtgctgcactgcaatgtgcctgagcaccacaacctggagaatgaggtgtcccggctggaggacatcatgcagcacctgaagagcaagaagcgggaggagcgctggatgagggccagcaagaggcagagcgagaaggagatggaggagctgcaccacaacattgatgacctgctgcaggagaagaagagcctggagtgtgaggtggaggagctgcacaggacagtgcagaagaggcagcagcagaaggacttcattgatggaaatgtggagagcctgatgacagagctggagattgagaagagcctgaagcaccatgaagatattgtggatgaaattgagtgcatcgagaagaccctgctgaagagaagaagtgagctgcgggaggccgaccggctgctggccgaggccgagagcgagctgagctgcaccaaggagaagaccaagaatgctgtggagaagttcacagatgccaagaggagcctgctgcagacagaaagtgatgctgaggagctggagcggcgggcccaggagacagctgtgaacctggtgaaggctgaccagcagctgcggagcctgcaggctgatgccaaggacctggagcagcacaagatcaagcaggaggagatcctgaaggagatcaacaagatcgtggccgccaaggacagcgacttccagtgcctgagcaagaagaaggagaagctgacagaggagctgcagaagctgcagaaggacatcgagatggccgagagaaatgaagaccaccacctgcaggtgctgaaggagagcgaggtgctgctgcaggccaagagagctgagctggagaagctgaagagccaggtgaccagccagcagcaggagatggctgtgctggaccggcagctgggccacaagaaggaggagctgcacctgctgcagggctccatggtgcaggccaaggctgacctgcaggaggccctgcggctgggggagacagaggtgacagagaagtgcaaccacatccgggaggtgaagagcctgctggaggagctgtccttccagaagggggagctgaatgtgcagatcagcgagaggaagacccagctgaccctcatcaagcaggagattgagaaggaggaggagaacctgcaggtggtgctgcggcagatgagcaagcacaagacagagctgaagaacatcctggacatgctgcagctggagaaccacgagctgcagggcctgaagctgcagcacgaccagagggtgtctgagctggagaagacccaggtggccgtgctggaggagaagctggagctggagaacctgcagcagatcagccagcagcagaagggggagattgagtggcagaagcagctgctggagcgggacaagcgggagattgaaagaatgacagctgagagccgggccctgcagagctgtgtggagtgcctgagcaaggagaaggaggacctgcaggagaagtgtgacatctgggagaagaagctggcccagaccaagagggtgctggccgctgctgaggagaacagcaagatggagcagagcaacctggagaagctggagctgaatgtgaggaagctgcagcaggagctggaccagctgaacagagacaagctgagcctgcacaatgacatcagcgccatgcagcagcagctgcaggagaagcgggaggccgtgaacagcctgcaggaggagctggccaacgtgcaggaccacctgaacctggccaagcaggacctgctgcacaccaccaagcaccaggatgtgctgctgtctgagcagacccggctgcagaaggacatcagcgagtgggccaacagatttgaggactgccagaaggaggaggagaccaagcagcagcagctgcaggtgctgcagaatgaaattgaggagaacaagctgaagctggtgcagcaggagatgatgttccagaggctgcagaaggagcgggagagcgaggagagcaagctggagaccagcaaggtgaccctgaaggagcagcagcaccagctggagaaggagctgacagaccagaagagcaagctggaccaggtgctgagcaaggtgctggccgctgaggagcgggtgaggaccctgcaggaggaggagcgctggtgtgagagcctggagaagaccctgagccagaccaagaggcagctgtctgagcgggagcagcagctggtggagaagagcggggagctgctggccctgcagaaggaggccgacagcatgagagctgacttcagcctgctgaggaaccagttcctgacagagaggaagaaggccgagaagcaggtggccagcctgaaggaggccctgaagatccagaggagccagctggagaagaacctgctggagcagaagcaggagaacagctgcatccagaaggagatggccaccatcgagctggtggcccaggacaaccacgagcgggcccggcggctgatgaaggagctgaaccagatgcagtatgagtacacagagctgaagaagcagatggccaaccagaaggacctggagcggcggcagatggagatcagtgatgccatgaggaccctgaagtctgaggtgaaggatgagatccgcaccagcctgaagaacctgaaccagttcctgcctgagctgcctgctgacctggaggccatcctggagagaaatgaaaacctggagggggagctggagagcctgaaggagaacctgcccttcaccatgaatgaaggcccctttgaggagaagctgaacttcagccaggtgcacatcatggatgagcactggagaggagaggccctgcgggagaagctgcggcacagagaagatcggctgaaggcccagctgcggcactgcatgagcaagcaggccgaggtgctgatcaagggcaagaggcagacagagggcaccctgcacagcctgcggcggcaggtggatgccctgggggagctggtgaccagcaccagcgctgacagcgccagcagccccagcctgagccagctggagagcagcctgacagaggacagccagctgggccagaaccagaagcagaacaacagcctgaggtag

SEQ ID NO: 21663 - DNA, 657 bp, synthetic construct
  source 1..657: mol_type = other DNA; note = Synthetic coding sequence
atggatgagctggtgaccctggaggaggctgatggcggcagtgacatcctgctggtggtgcccaaggccaccgtgctgcagaaccagctggatgagagccagcaggagagaaatgacctgatgcagctgaagctgcagctggagggccaggtgacagagctgcggagccgggtgcaggagctggagcgggccctggccacagcccggcaggagcacacagagctgatggagcagtacaagggcatcagccgcagccacggggagatcacagaggagcgggacatcctgagccggcagcagggcgaccacgtggcccgcatcctggagctggaggatgacatccagaccatcagcgagaaggtgctgaccaaggaggtggagctggaccggctgcgggacacagtgaaggccctgacccgggagcaggagaagctgctgggccagctgaaggaggtgcaggccgacaaggagcagagcgaggccgagctgcaggtggcccagcaggagaaccaccacctgaacctggacctgaaggaggccaagtcctggcaggaggagcagagcgcccaggcccagaggctgaaggacaaggtggcccagatgaaggacaccctgggccaggcccagcagagggtgcggcccagctggagcccctag

SEQ ID NO: 21664 - DNA, 693 bp, synthetic construct
  source 1..693: mol_type = other DNA; note = Synthetic coding sequence
atgaagaagcccaggcctgctgctgctgcccccagcccccggcccccagcctgcagcagaggagcccaccctggaacagccagcgagctgcgggtgcctgccctgcggcggggcggctgtggggaccggcggctgcgggaggaggccgcccctgagcaggccgccgccggccccaggaggagcacagtgggcgccctgctggccagcgagctgggctggaagttctatgatgctgatgactaccacccagaagaaaatagaaggaagatgggcaagggcatccccctgaatgaccaggaccgcatcccctggctgtgcaacctgcatgacatcctgctgagagatgtggccagcggccagagggtggtgctggcctgcagcgccctgaagaagacctacagagacatcctgacccagggcaaggatggagtggccctgaagtgtgaggagagcggcaaggaggccaagcaggccgagatgcagctgctggtggtgcacctgagcggcagctttgaagtcatcagcggccgcctgctgaagcgggagggccacttcatgcctcctgagctgctgcagagccagtttgagaccctggagcccccagctgcccctgagaacttcatccagatctctgtggacaagaatgtgtctgagatcatcgccaccatcatggagaccctgaagatgaagtag

SEQ ID NO: 21665 - DNA, 957 bp, synthetic construct
  source 1..957: mol_type = other DNA; note = Synthetic coding sequence
atgtgcaggacagccctgggcgtgaccaccctgcaggacctgggcgtgtgctggaggaaggagcatgaccctgctgagatgctgcgggtgggccgggcagagctgggcggctggaagcccagctgggaggccatcgtgaaggaggtggccgccgccaccggccacacagtggtgctggtggaccagacagaggacatcctggccaagagcaagaagggcatcgaggagagcctgaggaaggtggccaagaagaagtttgctgagaacctgaaggctggagatgaatttgtggagaagaccctgagcaccatcgccaccagcacagatgctgcctctgtggtgcacagcacagacctggtggtggaggccatcgtggagaacctgaaggtgaagaatgagctgttcaagaggctggacaagtttgctgctgagcacaccatctttgccagcaacaccagcagcctgcagatcaccagcatcgccaatgccaccacccggcaggacagatttgctggcctgcacttcttcaaccctgtgcctgtgatgaagctggtggaggtgatcaagacccccatgaccagccagaagacctttgagagcctggtggacttcagcaaggccctgggcaagcaccctgtgtcctgcaaggacaccccaggcttcatcgtgaaccggctgctggtgccctacctgatggaggccatccggctgtatgaaagaggagatgccagcaaggaggacatcgacacagccatgaagctgggcgccggctaccccatgggcccctttgagctgctggactatgtgggcctggacaccaccaagttcatcgtggatggctggcatgagatggatgctgagaaccccctgcaccagcccagccccagcctgaacaagctggtggccgagaacaagtttgggaagaagacaggagagggcttctacaagtacaagtag

SEQ ID NO: 21666 - DNA, 666 bp, synthetic construct
  source 1..666: mol_type = other DNA; note = Synthetic coding sequence
atggccatcgtgcagaccctgcctgtgcccctggagcccgcccctgaggccgccacagccccccaggcccctgtgatgggctctgtgagcagcctcatcagcggccggccctgccctgggggccctgccccacccaggcaccacggccccccaggccccaccttcttccggcagcaggacggcctgctgcggggcggctatgaggcccaggagcccctgtgcccagctgtgccccccaggaaggctgtgcctgtgaccagcttcacctacatcaatgaagacttcagaacagagagcccccccagccccagcagtgatgtggaggatgcccgggagcagagggcccacaatgcccacctgcggggccccccacccaagctgatccctgtgtctgggaagctggagaagaacatggagaagatcctgatccggcccacagccttcaagcctgtgctgcccaagcccaggggggcccccagcctgcccagcttcatgggcccccgggccaccggcctgagcggcagccagggcagcctgacccagctgtttggaggccctgccagcagcagcagcagcagcagcagcagcagcgctgctgacaagcccctggccttcagcggctgggccagcggctgccccagcggcaccctgagtgacagcggctag

SEQ ID NO: 21667 - DNA, 585 bp, synthetic construct
  source 1..585: mol_type = other DNA; note = Synthetic coding sequence
atgagggagctggccgctgtggtgtcccgggacatctacctgcacaaccccaacatcaagtggaatgacatcatcggcctggatgctgccaagcagctggtgaaggaggccgtggtgtaccccatccgctacccccagctgttcaccggcatcctgagcccctggaagggcctgctgctgtatggccccccaggcaccgggaagaccctgctggccaaggctgtggccacagagtgcaagaccaccttcttcaacatcagcgccagcaccatcgtgtccaagtggaggggggacagcgagaagctggtgcgggtgctgtttgagctggcccgctaccacgcccccagcaccatcttcctggatgagctggagagcgtgatgagccagaggggcacagccagcggcggggagcacgagggcagcctgaggatgaagacagagctgctggtgcagatggatggcctggcccggtctgaggacctggtgtttgtgctggccgccagcaacctgccctgcctgaaggccatcgccctgcagcccggggaccgggcccggctgcggctgaagaagaagaagtgcacctag

SEQ ID NO: 21668 - DNA, 555 bp, synthetic construct
  source 1..555: mol_type = other DNA; note = Synthetic coding sequence
atgaccttccagttcaacttcaccatcgaggaccacctggagaatgagctgacccccatcagagatggagccctgaccctggacagcagcaaggagctgtctgtgtctgagagccagaagggggaggagcgggacagaaaatgttctgctgagcagtttgacctgccccaggaccacctgtgggagcacaagtccatggagaatgctgcccccagccaggacacagacagccccctgtctgctgccagcagcagcaggaacctggagccccacggcaagcagcccagcctgcgggccgccaaggagcacgccatgcccaaggacctgaagaagatgctggagaacaaggtgattgagaccctgcccggcttccagcacgtgaagctgtctgtggtgaagaccatcctgctgaaggagaacttccctggagagaacatcgtgtccaagagcttcagcagccacagcgacctgatcactggagtgtatgagggcggcctgaagatctgggagtgcacctttgacctgctggcctacttcaccaaggccaaggtgtag

SEQ ID NO: 21669 - DNA, 354 bp, synthetic construct
  source 1..354: mol_type = other DNA; note = Synthetic coding sequence
atggtgctgatcctgggccgccgcctgaaccgggaggacctgggcgtgcgggacagccctgccaccaagaggaaggtgtttgagatggaccccaagagcctgactggacatgagttctttgacttcagcagcggcagcagccatgctgagaacatcctgcagatcttcaatgagttccgggacagccgcctcttcacagatgtgatcatctgtgtggagggcaaggagttcccctgccacagagctgtgctgagcgcctgcagcagctacttccgggccatgttctgcaatgaccaccgggagagccgggagatgctggtggagatcaatggcatcctggccgaggccatgtag

SEQ ID NO: 21670 - DNA, 498 bp, synthetic construct
  source 1..498: mol_type = other DNA; note = Synthetic coding sequence
atgatcctgaatgtgctggagtatggcagccagcaggtggccgacctgaccctgaacctggatgactacattgatgctgagcacctgggggacttccacaggacctacaagaacagcgaggagctgcggagccgcatcgtgtctggcatcatcacccccatccacgagcagtgggagaaggccaacgtgagcagcccccaccgggagttccccccagccacagcccgggaggtggaccccctgcgcatccccccccaccacccccacaccagccggcagcccccctggccccggcggggcggcatgattgtggaccccctgcggagcggcttcccccgggccctgattgaccccagcagcggcctgcccaaccggctgcccccaggagctgtgcccccaggggccaggtttgaccccttcggccccatcggcaccagccccccaggccccaacccagaccacctgcccccacctggctatgatgacatgtacctgtag

SEQ ID NO: 21671 - DNA, 369 bp, synthetic construct
  source 1..369: mol_type = other DNA; note = Synthetic coding sequence
gccctgaccttcagcctgcgggccggggccgccagcgcccaggacggccgctgcccctgtggggcccggcggccagacagccggctgctgcagctgcacatcaccatgcccttcagcagccccatggaggccgagctggtgcggcgcatcctgagcagagatgctgcccccctgcccaggcctggagctgtgctgaaggacttcaccgtgtctggcaacctgctcttcatccggctgacagctgctgaccaccggcagctgcagctgagcatcagcagctgcctgcagcagctgagcctgctgatgtggatcacccagtgcttcctgcccgtcttcctggcccaggcccccagcggccagaggaggtag

SEQ ID NO: 21672 - DNA, 2415 bp, synthetic construct
  source 1..2415: mol_type = other DNA; note = Synthetic coding sequence
atgaagagcattggagtgaagacagtgaaggtgtgtggcagcaagagctctgtgcgcatcgagggccagccctgcagcctgggccagagcaggaggaaggtgaagctgatgggagagaggagctacaccctgagcattggaaatggagactacttctgggccaacaaggagatgctgtgggactatgtgcagaccctgagtgaccagggcgctgagaagcatgagggcaccggccagagcagcggcatcacagaccaggagaaggagctgagcaccaatgccttccaggccttcaccagcggcaactatgatgcctgcctgcagcacctggcctgcctgcaggacatcaacaaggatgactacaagatcatcctgaacacagctgtggccgagttcttcaagagcaaccagaccaccacagacaacctgcggcagaccctgaaccagctgaagaaccaggtgcacagcgctgtggaggagatggatggcctggatgatgtggagaacagcatgctgtactacaaccaggccgtcatcctgtaccacctgcggcagtacacagaggccatctctgtgggggagaagctgtaccagttcatcgagccctttgaggagaagtttgcccaggccgtgtgcttcctgctggtggacctgtacatcctgacctaccaggccgagaaggccctgcacctgctggccgtgctggagaagatgatcagccagggcaacaacaacaagaatggcaagaatgagaccggcaacaacaacaacaaggatggcagcaaccacaaggccgagagcggggccctgattgaagctgccaagagcaagatccaccagtacaaggtgcgggcctacatccagatgaagagcctgaaggcctgcaagcgggagatcaagtctgtgatgaacacagctggcaacagcgcccccagcctcttcctgaagagcaactttgagtacctgcggggcaactacaggaaggctgtgaagctgctgaacagcagcaacattgctgagcaccctggcttcatgaagacaggagaatgtctgcgctgcatgttctggaacaacctgggctgcatccactttgccatgagcaagcacaacctgggcatcttctacttcaagaaggccctgcaggagaatgacaacgtgtgtgcccagctgtctgctggcagcacagatcctgggaagaagttcagcggccggcccatgtgcaccctgctgaccaacaagagatatgagctgctgtacaactgtggcatccagctgctgcacatcggccggcccctggccgcctttgagtgcctgattgaagctgtgcaggtgtaccacgccaacccccggctgtggctgcggctggccgagtgctgcatcgccgccaacaagggcaccagcgagcaggagaccaagggcctgcccagcaagaagggcatcgtgcagagcatcgtgggccagggctaccacaggaagatcgtgctggccagccagagcatccagaacacagtgtacaatgatggccagagcagcgccatccctgtggcctccatggagtttgctgccatctgcctgagaaatgccctgctgctgctgcctgaggagcagcaggaccccaagcaggagaatggagccaagaacagcaaccagctgggcggcaacacagagagcagcgagagcagcgagacctgcagcagcaagagccatgatggagacaagttcatcccagccccacccagcagccccctgaggaagcaggagctggagaacctgaagtgcagcatcctggcctgcagcgcctacgtggccctggccctgggggacaacctgatggccctgaaccacgccgacaagctgctgcagcagcccaagctgagcggcagcctgaagttcctgggccacctgtatgctgctgaggccctgatcagcctggaccgcatcagtgatgccatcacccacctgaacccagaaaatgtgacagatgtgtccctgggcatcagcagcaatgagcaggaccagggcagtgacaagggagaaaatgaggccatggagagcagcggcaagagggccccccagtgctaccccagctctgtgaacagcgccaggacagtgatgctgttcaacctgggcagcgcctactgcctgcggagtgaatatgacaaggccaggaagtgcctgcaccaggccgcctccatgatccaccccaaggaggtgcccccagaggccatcctgctggccgtgtacctggagctgcagaatggaaacacccagctggccctgcagatcatcaagaggaaccagctgctgcctgctgtgaagacccacagcgaggtgaggaagaagcctgtgttccagcctgtgcaccccatccagcccatccagatgcctgccttcaccaccgtgcagaggaagtag

SEQ ID NO: 21673 - DNA, 1899 bp, synthetic construct; identical to SEQ ID NO: 18887
  source 1..1899: mol_type = other DNA; note = Synthetic coding sequence

SEQ ID NO: 21674 - DNA, 585 bp, synthetic construct
  source 1..585: mol_type = other DNA; note = Synthetic coding sequence
atggaggacctgtttgagaccttccaggatgagatgggcttcagcaacatggaggatgatggccctgaggaggaggagcgggtggccgagccccaggccaacttcaacaccccccaggccctgcgctttgaggagctgctggccaacctgctgaatgagcagcaccagatcgccaaggagctgtttgagcagctgaagatgaagaagcccagcgccaagcagcagaaggaggtggagaaggtgaagccccagtgcaaggaggtgcaccagaccctcatcctggaccctgcccagaggaagaggctgcagcagcagatgcagcagcacgtgcagctgctgacccagatccacctgctggccacctgcaaccccaacctgaaccctgaggccagcagcacccgcatctgcctgaaggagctgggcacctttgcccagagcagcatcgccctgcaccaccagtacaaccccaagttccagaccctcttccagccctgcaacctgatgggcgccatgcagctgattgaggacttcagcacccacgtgtccattgactgcagcccccacaagacagtgaagaagacctag

SEQ ID NO: 21675 - DNA, 1803 bp, synthetic construct; identical to SEQ ID NO: 18330
  source 1..1803: mol_type = other DNA; note = Synthetic coding sequence

SEQ ID NO: 21676 - DNA, 1620 bp, synthetic construct; identical to SEQ ID NO: 19050
  source 1..1620: mol_type = other DNA; note = Synthetic coding sequence

SEQ ID NO: 21677 - DNA, 567 bp, synthetic construct
  source 1..567: mol_type = other DNA; note = Synthetic coding sequence
tgatatgtgaatgctgtggacagccgctggagcagctatggaaatgaggccaccagcagcgcccactacgtggagcgggaccgcttcatcgtgacagacctgagcggccacaggaagcacagcagcactggagacctgctgagcctggagctgcagcaggccaagagcaacagcctgctgctgcagcgggaggccaatgccctggccatgcagcagaagtggaacagcctggatgagggccgccacctgaccctgaacctgctgagcaaggagattgagctgagaaatggagagctgcagagcgactacacagaagatgccacagacaccaagccagaccgggacatcgagctggagctgagcgccctggacacagatgagccagatggccagagcgagcccatcgaggagatcctggacatccagctgggcatcagcagccagaatgaccagctgctgaatggcatggctgtggagaatggccaccctgtgcagcagcaccagaaggagccccccaagcagaagaagcagagcctgggccgcagcaagaagcagttctgcaggtag

SEQ ID NO: 21678 - DNA, 1806 bp, synthetic construct
  source 1..1806: mol_type = other DNA; note = Synthetic coding sequence
atggaggagaccatgaagctggccaccatggaggacacagtggagtactgcctcttcctgatcccagatgagagccgggacagcgacaagcacaaggagatcctgcagaagtacatcgagcgcatcatcaccaggtttgcccccatgctggtgccctacatctggcagaaccagcccttcaacctgaagtacaagccaggcaagggcggcgtgcctgcccacatgtttggagtgaccaagtttggagacaacattgaagatgagtggttcatcgtgtatgtgatcaagcagatcaccaaggagttccctgagctggtggccagaattgaggacaatgatggagagttcctgctgattgaagctgctgacttcctgcccaagtggctggaccctgagaacagcaccaacagagtcttcttctgccacggggagctgtgcatcatcccagcccccaggaagagcggggctgagagctggctgcccaccaccccacccaccatcccccaggccctgaacatcatcacagcccacagcgagaagatcctggccagcgagagcatccgggctgctgtgaacagacgcatccggggctacccagagaagatccaggccagcctgcaccgggcccactgcttcctgcctgctggcatcgtggccgtgctgaagcagaggccccggctggtggccgctgctgtgcaggccttctacctgcgggaccccatcgacctgcgggcctgcagggtcttcaagaccttcctgcctgagacccgcatcatgaccagcgcccacggctttgagatcctgtgcagcaagtgcagcccccacttcagtgactgcaagaagagcctggtgacagccagccccctgtgggccagcttcctggagagcctgaagaagaatgactacttcaagggcctgattgagggcagcgcccagtaccgggagcggctggagatggccgagaactacttccagctgtctgtggactggccagagagcagcctggccatgagccctggagaggagatcctgaccctgctgcagaccatcccctttgatattgaggacctgaagaaggaggccgccaacctgcccccagaagatgatgaccagtggctggacctgagcccagaccagctggaccagctgctgcaggaggccgtgggcaagaaggagagcgagagcgtgtccaaggaggagaaggagcagaactatgacctgacagaggtgtctgagagcatgaaggccttcatcagcaaggtgtccacccacaagggagctgagctgccccgggagcccagcgaggcccccatcacctttgatgctgacagcttcctgaactactttgacaagatcctgggcccccggcccaatgaaagtgacagtgatgacctggatgatgaggactttgaatgtctggacagtgatgatgacctggactttgagacccatgagcccggggaggaggccagcctgaagggcaccctggacaacctgaagagctacatggcccagatggaccaggagctggcccacacctgcatcagcaagagcttcaccaccaggaaccaggtggagcctgtgtcccagaccacagacaacaacagtgatgaagaagattctggaactggagagagcgtgatggcccctgtggatgtggacctgaacctggtgagcaacatcctggagagctacagcagccaggccggcctggccggccctgccagcaacctgctgcagagcatgggcgtgcagctgcctgacaacacagaccaccggcccaccagcaagcccaccaagaactag

SEQ ID NO: 21679 - DNA, 405 bp, synthetic construct
  source 1..405: mol_type = other DNA; note = Synthetic coding sequence
atgaagaagaagcatgatggcatcgtgtatgagaccaaggaggtgctgaaccccagccccaaggtgacccactgctgcaagagcctgtggctgaagtacagcttccagaaggcctacatgacccagctggtgagcagccagcctgtgcctgccatgagcaggaacccagaccacaacctgctgagccagcccaaggagcacagcatcgtgcagaagcaccaccaggaggagatcatccacaagctggccatgcagctgcggcacatcggggacaacatcgaccacaggatggtgcgggaggacctgcagcaggacggcagagatgccctggaccactttgtgttcttcttcttcagaagagtgcaggtgctgctgcacttcttctggaacaaccacctgctgtag

SEQ ID NO: 21680 - DNA, 1791 bp, synthetic construct
  source 1..1791: mol_type = other DNA; note = Synthetic coding sequence
atggaggatgccccccagaggctgcgctggcaggcccacctggagttcacccacaaccatgatgtgggggacctgacctgggacaagattgctgtgtccctgcccaggtctgagaagctgcggagcctggtgctggccggcatcccccacggcatgaggccccagctgtggatgaggctgagcggggccctgcagaagaagaggaacagcgagctgagctaccgggagatcgtgaagaacagcagcaatgatgagaccatcgccgccaagcagatcgagaaggacctgctgcggaccatgcccagcaatgcctgctttgcctccatgggcagcattggagtgccccggctgcggcgggtgctgcgggccctggcctggctgtacccagaaattggctactgccagggcaccggcatggtggccgcctgcctgctgctcttcctggaggaggaggatgccttctggatgatgtctgccatcatcgaggacctgctgcctgccagctacttcagcaccaccctgctgggcgtgcagacagaccagagggtgctgcggcacctgattgtgcagtacctgccccggctggacaagctgctgcaggagcatgacatcgagctgagcctcatcaccctgcactggttcctgacagcctttgcctctgtggtggacatcaagctgctgctgcgcatctgggacctcttcttctatgagggcagccgggtgctcttccagctgaccctgggcatgctgcacctgaaggaggaggagctgatccagagtgaaaattctgccagcatcttcaacaccctgagtgacatccccagccagatggaggatgctgagctgctgctgggcgtggccatgaggctggccggcagcctgacagatgtggccgtggagacccagaggaggaagcacctggcctacctgattgctgaccagggccagctgctgggcgccggcaccctgaccaacctgagccaggtggtgagaagaaggacccagaggaggaagagcaccatcacagccctgctgtttggagaagatgacctggaggccctgaaggccaagaacatcaagcagacagagctggtggccgacctgcgggaggccatcctgcgggtggcccggcacttccagtgcacagaccccaagaactgcagcgtggagctgaccccagactacagcatggagagccaccagagggaccatgaaaattatgtggcctgcagccgcagccacagaagaagagccaaggccctgctggactttgaaagacatgatgatgatgagctgggcttcaggaagaatgacatcatcaccatcgtgtcccagaaggatgagcactgctgggtgggggagctgaatggcctgcggggctggttccctgccaagtttgtggaggtgctggatgagaggagcaaggagtacagcattgctggagatgacagcgtgacagagggcgtgacagacctggtgcggggcaccctgtgcccagccctgaaggccctgtttgaacatggcctgaagaagcccagcctgctgggcggggcctgccacccctggctgttcatcgaggaggccgccggccgggaggtggagcgggactttgcctctgtgtacagccggctggtgctgtgcaagaccttccggctggatgaagatggcaaggtgctgaccccagaggagctgctgtacagagctgtgcagagcgtgaatgtgacccatgatgctgtgcacgcccagatggatgtgaagctgcggagcctcatctgtgtgggcctgaagtag

SEQ ID NO: 21681 - DNA, 399 bp, synthetic construct
  source 1..399: mol_type = other DNA; note = Synthetic coding sequence
atggagagccgggtggctgatgctggcaccggggagacagcccgggctgctgggggcagccctgctgtgggctgcaccacccggggccctgtggtgtctgcccccctgggcgccgcccgctggaagctgctgcggcaggtgctgaagcagaagcacctggatgactgcctgcggcacgtgtctgtgagaagatttgagagcttcaacctcttctctgtgacagagggcaaggagcgggagacagaggaggaggtgggcgcctgggtgcagtacaccagcatcttctgcccagagtacagcatcagcctgcggcacaacagcggcagcctgaatgtggaggatgtgctgaccagctttgacaacacaggaaatgtgtggagcttcagccggggcaagtag

SEQ ID NO: 21682 - DNA, 1620 bp, synthetic construct; identical to SEQ ID NO: 19050
  source 1..1620: mol_type = other DNA; note = Synthetic coding sequence

SEQ ID NO: 21683 - DNA, 2193 bp, synthetic construct
  source 1..2193: mol_type = other DNA; note = Synthetic coding sequence
atgaacaacagcagcagcgagacccggggccacccccacagcgccagcagccccagcgagagggtcttccccatgcccctgcccaggaaggcccccctgaacatccctggcacccctgtgctggaggacttcccccagaatgatgatgagaaggagcggctgcagaggagaagaagccgggtgtttgacctgcagttcagcacagacagcccccggctgctggccagccccagcagccgcagcattgacatcagcgccaccatccccaagttcaccaacacccagatcacagagcactacagcacctgcatcaagctgagcacagagaacaagatcaccaccaagaatgccttcggcctgcacctgattgacttcatgtctgagatcctgaagcagaaggacacagagcccaccaacttcaaggtggccgccggcaccctggatgccagcaccaagatctatgctgtgcgggtggatgctgtgcatgctgatgtgtacagagtgctgggcggcctgggcaaggatgcccccagcctggaggaggtggagggccacgtggctgatggcagcgccacagagatgggcaccaccaagaaggctgtgaagcccaagaagaagcacctgcacaggaccatcgagcagaacatcaacaacctgaatgtgtctgaggccgacagaaaatgtgaaattgaccccatgttccagaagacagctgccagctttgatgaatgttccacagctggggtcttcctgagcaccctgcactgccaggactacagaagtgagctgctcttccccagtgatgtgcagaccctgagcactggagagcccctggagctgcctgagctgggctgtgtggagatgacagacctgaaggcccccctgcagcagtgtgccgaggaccggcagatctgccccagcctggccggcttccagttcacccagtgggacagcgagacccacaatgaatctgtgtctgccctggtggacaagttcaagaagaatgaccaggtgtttgacatcaatgctgaggtggatgaaagtgactgtggggacttcccagatggcagcctgggagatgactttgatgccaatgatgagccagaccacacagctgtgggggaccacgaggagttccgctcctggaaggagccctgccaggtgcagagctgccaggaggagatgatcagcctgggagatggagacatccgcaccatgtgccccctgctgtccatgaagccaggagagtacagctacttcagccccaggaccatgtccatgtgggccggccctgaccactggaggttccggcccaggaggaagcaggatgcccccagccagagcgagaacaagaagaagagcaccaagaaggactttgaaattgactttgaagatgacatcgactttgatgtgtacttcaggaagaccaaggccgccaccatcctgaccaagagcaccctggagaaccagaactggagggccaccaccctgcccacagacttcaactacaacgtggacaccctggtgcagctgcacctgaagccaggcacccggctgctgaagatggcccagggccaccgggtggagacagagcactatgaggagattgaagattatgactacaacaaccccaatgacaccagcaacttctgccccggcctgcaggccgctgacagtgatgatgaggacctggatgacctgtttgtgggccctgtgggcaacagcgacctgagcccctacccctgccacccccccaagacagcccagcagaatggagacaccccagaggcccagggcctggacatcaccacctatggagagagcaacctggtggccgagccccagaaggtgaacaagattgagatccactacgccaagacagccaagaagatggacatgaagaagctgaagcagagcatgtggagcctgctgacagccctgagcggcaaggaggctgatgctgaggccaaccaccgggaggccggcaaggaggccgccctggccgaggtggctgatgagaagatgctgagcggcctgaccaaggacctgcagaggagcctgccccctgtgatggcccagaacctgagcatccccctggcctttgcctgcctgctgcacctggccaatgagaagaacctgaagctggagggcacagaggacctgagtgatgtgctggtgcggcagggcgactag

SEQ ID NO: 21684 - DNA, 900 bp, synthetic construct
  source 1..900: mol_type = other DNA; note = Synthetic coding sequence
atggagacccagtttcctgtgtctgagggcaaggtggacccctaccgcagctgtggcttctcctatgagcaggaccccaccctgcgggaccctgaggccgtggcccggcgctggccctggatggtgtctgtgcgggccaacggcacccacatctgtgccggcaccatcatcgccagccagtgggtgctgactgtggcccactgcctgatctggagagatgtgatctacagcgtgcgggtgggcagcccctggattgaccagatgacccagacagccagtgatgtgcctgtgctgcaggtgatcatgcacagccgctaccgggcccagcgcttctggagctgggtgggccaggccaatgacatcggcctgctgaagctgaagcaggagctgaagtacagcaactacgtgcggcccatctgcctgcccggcacagattatgtgctgaaggaccacagccgctgcaccgtgacaggctggggcctgagcaaggcagatggcatgtggccccagttccgcaccatccaggagaaggaggtgatcatcctgaacaacaaggaatgtgacaacttctaccacaacttcaccaagatccccaccctggtgcagatcatcaagagccagatgatgtgtgccgaggacacccaccgggagaagttctgctatgagctgaccggggagcccctggtgtgcagcatggagggcacctggtacctggtgggcctggtgtcctggggcgccggctgccagaagtctgaggccccacccatctacctgcaggtgagcagctaccagcactggatctgggactgcctgaatggccaggccctggccctgcctgcccccagcaggaccctgctgctggccctgcccctgcccctgagcctgctggccgccctgtag

SEQ ID NO: 21685 - DNA, 1089 bp, synthetic construct
  source 1..1089: mol_type = other DNA; note = Synthetic coding sequence
atgctggtgcccggcagcacccggccctacagcaagaagaggcagaacagcaagagcgcccagggcctggccggcctgaggaacctgggcaacacctgcttcatgaacagcatcctgcagtgcctgagcaacacccgggagctgcgggactactgcctgcagaggctgtacatgagggacctgcaccacggcagcaatgcccacacagccctggtggaggagtttgccaagctgatccagaccatctggaccagcagccccaatgatgtggtgagccccagcgagttcaagacccagatccagagatatgcccccaggtttgtgggctacaaccagcaggatgcccaggagttcctgcgcttcctgctggatggcctgcacaatgaggtgaacagagtgaccctgcggcccaagagcaaccctgagaacctggaccacctgcctgatgatgagaagggccggcagatgtggaggaagtacctggagcgggaggacagccgcatcggggacctgtttgtgggccagctgaagagcagcctgacctgcacagactgtggctactgcagcacagtgtttgaccccttctgggacctgagcctgcccatcgccaagaggggctacccagaggtgaccctgatggactgcatgaggctcttcaccaaggaggatgtgctggatggagatgagaagcccacctgctgccgctgccggggcaggaagcgctgcatcaagaagttcagcatccagcgcttccccaagatcctggtgctgcacctgaagcgcttcagcgagagccgcatccgcaccagcaagctgaccacctttgtgaacttccccctgcgggacctggacctgcgggagtttgccagcgagaacaccaaccacgctgtgtacaacctgtatgctgtgagcaaccacagcggcaccaccatgggcggccactacacagcctactgccgcagccctggcaccggggagtggcacaccttcaatgacagctctgtgacccccatgagcagcagccaggtgaggaccagtgatgcctacctgctcttctatgagctggccagcccccccagcaggatgtag

SEQ ID NO: 21686 - DNA, 1800 bp, synthetic construct
  source 1..1800: mol_type = other DNA; note = Synthetic coding sequence
atggaccctggagatgctgccatcctggagagcagcctgcgcatcctgtaccgcctgtttgagagcgtgctgccccccctgcctgctgccctgcagagcaggatgaatgtcatcgaccacgtgcgggacatggctgctgctggcctgcacagcaatgtgcggctgctgagcagcctgctgctgaccatgagcaacaacaaccctgagctgttcagccccccccagaagtaccagctgctggtgtaccacgccgacagcctcttccatgacaaggagtacagaaatgctgtgtccaagtacaccatggccctgcagcagaagaaggccctgagcaagaccagcaaggtgcggcccagcacaggcaacagcgccagcaccccccagagccagtgcctgcccagcgagattgaggtgaagtacaagatggccgagtgctacaccatgctgaagcaggacaaggatgccatcgccatcctggatggcatccccagccggcagaggacccccaagatcaacatgatgctggccaacctgtacaagaaggccggccaggagcggcccagcgtgaccagctacaaggaggtgctgcggcagtgccccctggccctggatgccatcctgggcctgctgagcctgtctgtgaagggagctgaggtggcctccatgaccatgaatgtcatccagacagtgcccaacctggactggctgtctgtgtggatcaaggcctatgcctttgtgcacactggagacaacagccgggccatcagcaccatctgcagcctggagaagaagagcctgctgcgggacaacgtggacctgctgggcagcctggccgacctgtacttccgggccggggacaacaagaacagcgtgctgaagtttgagcaggcccagatgctggacccctacctgatcaagggcatggatgtgtatggctacctgctggcccgggagggccgcctggaggatgtggagaacctgggctgccgcctcttcaacatcagtgaccagcacgccgagccctgggtggtgtctggctgccacagcttctacagcaagcgctacagccgggccctgtacctgggcgccaaggccatccagctgaacagcaacagcgtgcaggccctgctgctgaagggagctgccctgaggaacatgggccgggtgcaggaggccatcatccacttccgggaggccatccggctggccccctgccgcctggactgctatgagggcctgattgagtgctacctggccagcaacagcatccgggaggccatggtgatggccaacaacgtgtacaagaccctgggcgccaatgcccagaccctgaccctgctggccaccgtgtgcctggaggaccctgtgacccaggagaaggccaagaccctgctggacaaggccctgacccagaggccagactacatcaaggctgtggtgaagaaggccgagctgctgagccgggagcagaagtatgaagatggcatcgccctgctgagaaatgccctggccaaccagagcgactgtgtgctgcaccgcatcctgggggacttcctggtggccgtgaatgagtaccaggaggccatggaccagtacagcatcgccctgagcctggaccccaatgaccagaagagcctggagggcatgcagaagatggagaaggaggagagccccacagatgccacccaggaggaggatgtggatgacatggagggcagcggggaggagggggacctggagggcagtgacagcgaggccgcccagtgggccgaccaggagcagtggtttggcatgcagtag

SEQ ID NO: 21687 - DNA, 507 bp, synthetic construct
  source 1..507: mol_type = other DNA; note = Synthetic coding sequence
atgcctgccaccaggaagcccatgagatatggccacacagagggccacacagaggtgtgctttgatgacagcggcagcttcatcgtgacctgtggcagtgatggagatgtgcgcatctgggaggacctggatgatgatgaccccaagttcatcaacgtgggggagaaggcctacagctgtgccctgaagagcggcaagctggtgacagctgtgagcaacaacaccatccaggtgcacaccttccctgagggcgtgcctgatggcatcctgacccgcttcaccaccaatgccaaccacgtggtgttcaatggagatggcaccaagattgctgctggcagcagtgacttcctggtgaagatcgtggatgtgatggacagcagccagcagaagaccttccggggccatgatgcccctgtgctgagcctgagctttgaccccaaggacatcttcctggccagcgccagctgtgatggctctgtgcgggtgtggcagatcagtgaccagtag

SEQ ID NO: 21688 - DNA, 141 bp, synthetic construct
  source 1..141: mol_type = other DNA; note = Synthetic coding sequence
atggtgaacagctgctgcggctctgtgtgcagcgaccagggctgcggcctggagaactgctgccggcccagctgctgccagaccacctgctgcaggaccacctgctgccggcccctgtgctgtgccagcagctgctgctag

SEQ ID NO: 21689 - DNA, 669 bp, synthetic construct
  source 1..669: mol_type = other DNA; note = Synthetic coding sequence
atggcctctgtggtggagtacaagggcctgcgggccggctaccactgcggctactgtgacagcaaggagggcaaggccagctgtggcatgtgggcccacagcatgacagtgcaggactaccaggacctgattgaccggggctggaggagaagtggcaagtatgtgtacaagcctgtgatgaaccagacctgctgcccccagtacaccatccgctgccggcccctgcagttccagcccagcaagagccacaagaaggtgctgaagaagatgctgaagttcctggccaagggggaggtgcccaagggcagctgtgaagatgagcccatggacagcaccatggatgatgctgtggccggggactttgccctgatcaacaagctggacatccagtgtgacctgaagaccctgagtgatgacatcaaggagagcctggagagcgagggcaagaacagcaagaaggaggagccccaggagctgctgcagagccaggactttgtgggggagaagctgggcagcggggagcccagccacagcgtgaaggtgcacacagtgcccaagccaggaaaaggagctgacctgagcaagccaccctgcaggaaggccaaggagatcaggaaggagaggaagaggctgaagctgatgcagcagaacccagctggggagctgtag

SEQ ID NO: 21690 - DNA, 495 bp, synthetic construct
  source 1..495: mol_type = other DNA; note = Synthetic coding sequence
atgctgaaggccgtcatcctgattggaggcccccagaagggcacccgcttccggcccctgagctttgaggtgcccaagcccctcttccctgtggccggcgtgcccatgatccagcaccacatcgaggcctgtgcccaggtgcccggcatgcaggagatcctgctgattggcttctaccagccagatgagcccctgacccagttcctggaggccgcccagcaggagttcaacctgcctgtgcgctacctgcaggagtttgcccccctgggcactggaggcggcctgtaccacttccgggaccagatcctggccggcagccctgaggccttctttgtgctgaatgctgatgtgtgcagcgacttccccctgagcgccatgctggaggcccaccggcggcagaggcaccccttcctgctgctgggcaccacagccaacagaacccagagcctgaactacggctgcatcgtggagaacccccagacccatgaggtgtag

SEQ ID NO: 21691 - DNA, 339 bp, synthetic construct
  source 1..339: mol_type = other DNA; note = Synthetic coding sequence
atgtttgtgtctgacttcaggaaggagttctatgaggtggtgcagagccagagggtgctgctgtttgtggccagtgatgtggatgccctgtgtgcctgcaagatcctgcaggccctcttccagtgtgaccacgtgcagtacaccctggtgcctgtgtctggctggcaggagctggagacagccttcctggagcacaaggagcagttccactacttcatcctgatcaactgtggggccaacgtggacctgctggacatcctgcagccagatgaggacaccatcttctttgtgtgtgacacccacaggcctgtgaatgtggtgaatgtgtacaatgactag

SEQ ID NO: 21692 - DNA, 942 bp, synthetic construct
  source 1..942: mol_type = other DNA; note = Synthetic coding sequence
accctggtggtgtctggaagagatgacccccccacccacagccagcctgacagtgatgatgaggccgaggagatccagtggagcgatgatgaaaatacagccaccctgacagcccctgagttccctgagtttgccaccaaggtgcaggaggccatcaacagcctgggcggcagcgtcttccccaagctgaactggagcgcccccagagatgcctactggatcgccatgaacagcagcctgaagtgcaagaccctgagtgacatcttcctgctcttcaagagcagtgacttcatcacccgggacttcacccagcccttcatccactgcacagatgacagcccagacccctgcatcgagtatgagctggtgctgaggaagtggtgtgagctgatccctggagctgagttccgctgctttgtgaaggagaacaagctgattggcatcagccagagggactacacccagtactatgaccacatcagcaagcagaaggaggagatccgccgctgcatccaggacttcttcaagaagcacatccagtacaagttcctggatgaggactttgtgtttgacatctacagagacagccgggacagccctgccttccgctgcaccaacagcgaggtgacagtgcagcccagcccctacctgagctaccgcctgcccaaggactttgtggacctgagcactggagaagatgcccacaagctgattgacaagtctgctgggggccgcctgatgtctgtgctggagctggagaagagaagaccccggcccacagcccctggggccgcccaccagccccagctgcctgctgaccctgatgctgggggccccagctctgtggacatcagccacttcctgtacagctgcaccttcacctggggcaagaagagaagagactttgccacctgcaagaacaacatcatcaacagaagctag

SEQ ID NO: 21693 - DNA, 1017 bp, synthetic construct; identical to SEQ ID NO: 21239
  source 1..1017: mol_type = other DNA; note = Synthetic coding sequence

SEQ ID NO: 21694 - DNA, 1119 bp, synthetic construct; identical to SEQ ID NO: 19903
  source 1..1119: mol_type = other DNA; note = Synthetic coding sequence

SEQ ID NO: 21695 - DNA, 408 bp, synthetic construct
  source 1..408: mol_type = other DNA; note = Synthetic coding sequence
tgacagctggcctccatggtgtggaacaaccccagccagcagcagttcatgcagtttggaggcagcagcggcagccagctgccccagatccagacagatgtggtgctgcccagctgcaagaagaaggccccagctgagacccctgtgaaggagcggctcttcatcgtgttcaacccccaccccctgcccctggatgtgctggaggacatcttctgccgcttcggcaacctgattgaggtgtacctggtgtctgggaagaatgtgggctacgccaagtatgctgaccgcatcagcgccaatgatgccatcgccaccctgcacggcaagatcctgaatggagtgcggctgaaggtgatgctggccgacagcccccgggaggagagcaacaagaggcagaggacctactag

SEQ ID NO: 21696 - DNA, 1764 bp, synthetic construct; identical to SEQ ID NO: 19443
  source 1..1764: mol_type = other DNA; note = Synthetic coding sequence

SEQ ID NO: 21697 - DNA, 1842 bp, synthetic construct; identical to SEQ ID NO: 18580
  source 1..1842: mol_type = other DNA; note = Synthetic coding sequence

SEQ ID NO: 21698 - DNA, 477 bp, synthetic construct
  source 1..477: mol_type = other DNA; note = Synthetic coding sequence
atgacccactgctgcagcccctgctgccagcccacctgctgcaggaccacctgctgcaggaccacctgctggaagcccaccaccgtgaccacctgcagcagcaccccctgctgccagcctgcctgctgcgtgagcagctgctgccagccctgctgccggcccacctgctgccagaacacctgctgcaggaccacctgctgccagcccacctgccccacctgctgcggcagcagctgctgcggccagaccagctgtggcagcagctgtggccagagcagcagctgtgcccctgtgtactgcaggaggacctgctactaccccaccaccgtgtgcctgcccggctgcctgaaccagagctgtggcagcaactgctgccagccctgctgcaggcctgcctgctgtgagaccacctgctgcaggaccacctgcttccagcccacctgtgtgagcagctgctgccagcccagctgctgctag

SEQ ID NO: 21699 - DNA, 1620 bp, synthetic construct; identical to SEQ ID NO: 19050
  source 1..1620: mol_type = other DNA; note = Synthetic coding sequence

SEQ ID NO: 21700 - DNA, 2511 bp, synthetic construct
  source 1..2511: mol_type = other DNA; note = Synthetic coding sequence
atggctgctgccctgggccccccagaggtgattgcccagctggagaatgctgccaaggtgctgatgcagaccctggcctgcagcatcctgacagccctgctgtctgagttcagcagcagcagcaagaccagcaacatcggcctgtccatggagttccacggcaactgcaagagggtcttccaggaggaggacctgcggcagatcttcatgctgactgtggaggtgctgcaggagttcagcagaagagagaacctgaatgcccagatgagctctgtgttccagcgctacctggccctggccaaccaggtgctgtcctggaacttcctgccccccaagctgggccgccactacatcgccatgtttgagagcagccagaatgtgctgctgaagcccacagagagctggagggagaccctgctggacagccgggtgatggagctgttcttcaccgtgcacaggaagatcagagaagattctgacatggcccaggacagcctgcagtgcctggcccagctggccagcctgcacggccccatcttcccagatgagggcagccaggtggactacctggcccacttcatcgagggcctgctgaacaccatcaatggcatcgagattgaagattctgaggccgtgggcatcagcagcatcatcagcaacctgatcaccgtcttccccagaaatgtgctgacagccatccccagcgagctgttcagcagctttgtgaactgcctgacccacctgacctgcagctttggccgctctgctgccctggaggaggtgctggacaaggatgacatggtgtacatggaggcctatgacaagctgctggagagctggctgaccctggtgcaggatgacaagcacttccacaagggcttcttcacccagcacgctgtgcaggtgttcaacagctacatccagtgccacctggccgccccagatggcaccaggaacctgacagccaatggagtggccagccgggaggaggaggagatcagcgagctgcaggaggatgaccgggaccagttcagtgaccagctggcctctgtgggcatgctgggcagaattgctgctgagcactgcatccccctgctgaccagcctgctggaggagcgggtgacccggctgcacggccagctgcagaggcaccagcagcagctgctggccagccctggcagcagcacagtggacaacaagatgctggatgacctgtatgaggacatccactggctgatcctggtgacaggctacctgctggctgatgacacccagggcgagacccccctcatccccccagagatcatggagtacagcatcaagcacagcagcgaggtggacatcaacaccaccctgcagatcctgggcagccctggagagaaggccagcagcatccctggctacaacagaacagattctgtcatccggctgctgagcgccatcctgcgggtgtctgaggtggagagccgggccatccgggctgacctgacccacctgctgagcccccagatgggcaaggacatcgtgtggttcctgaagcgctgggccaagacctacctgctggtggatgagaagctgtatgaccagatcagcctgcccttcagcacagccttcggggctgacacagagggcagccagtggatcatcggctacctgctgcagaaggtgatcagcaacctgtctgtgtggagcagcgagcaggacctggccaatgacacagtgcagctgctggtgaccctggtggagcggcgggagcgggccaacctggtgatccagtgtgagaactggtggaacctggccaagcagtttgccagccgcagcccccccctgaacttcctgagcagccctgtgcagaggaccctgatgaaggccctggtgctgggcggctttgcccacatggacacagagaccaagcagcagtactggacagaggtgctgcagcccctgcagcagcgcttcctgcgggtcatcaaccaggagaacttccagcagatgtgccagcaggaggaggtgaagcaggagatcacagccaccctggaggccctgtgtggcattgctgaggccacccagattgacaacgtggccatcctcttcaacttcctgatggacttcctgaccaactgcatcggcctgatggaggtgtacaagaacaccccagagaccgtgaacctgatcatcgaggtgtttgtggaggtggcccacaagcagatctgctacctgggggagagcaaggccatgaacctgtatgaggcctgcctgaccctgctgcaggtgtacagcaagaacaacctgggccggcagagaattgatgtgacagctgaggaggagcagtaccaggacctgctgctgatcatggagctgctgaccaacctgctgagcaaggagttcatcgacttcagtgacacagatgaggtgttccggggccacgagcccggccaggccgccaacagatctgtgtctgctgctgatgtggtgctgtatggagtgaacctgatcctgcccctgatgtag

SEQ ID NO: 21701 - DNA, 1008 bp, synthetic construct
  source 1..1008: mol_type = other DNA; note = Synthetic coding sequence
atggacttcctgctgggcaaccccttcagcagccctgtgggccagagaattgagaaggccacagatggcagcctgcagagcgaggactgggccctgaacatggagatctgtgacatcatcaatgaaacagaggagggccccaaggatgccctgcgggctgtgaagaagagaattgtgggcaacaagaacttccacgaggtgctggagacctgtgtgaagaactgtggccaccgcttccacgtgctggtggccagccaggactttgtggagagcgtgctggtgaggaccatcctgcccaagaacaacccccccaccatcgtgcatgacaaggtgctgaacctgatccagagctgggcagatgccttccgcagcagcccagacctgactggagtggtgaccatctatgaggacctgcggaggaagggcctggagttccccatgacagacctggacatgctgagccccatccacaccccccagaggacagtgttcaacagcgagacccagagcggccaggacagcgtgggcacagacagcagccagcaggaggacagcggccagcacgccgcccccctgcctgccccacccatcctgagcggggacacccccatcgcccccaccccagagcagatcggcaagctgcggtctgagctggagatggtgtctggaaatgtgcgggtgatgtctgagatgctgacagagctggtgcccacccaggccgagcctgctgacctggagctgctgcaggagctgaacagaacctgccgggccatgcagcagagggtgctggagctgatcccccagatcgccaatgagcagctgacagaggagctgctgattgtgaatgacaacctgaacaacgtgttcctgcggcatgaaagatttgagcgcttcagaacaggccagaccaccaaggcccccagcgaggccgagcctgctgctgacctgattgacatgggccctgaccctgctgccaccggcaacctgagcagccagctggccggctag

SEQ ID NO: 21702 - DNA, 5193 bp, synthetic construct
  source 1..5193: mol_type = other DNA; note = Synthetic coding sequence
atgggcaacagcgacagccagtacaccctgcagggcagcaagaaccacagcaacaccatcactggagccaagcagatcccctgcagcctgaagatccggggcatccacgccaaggaggagaagagcctgcacggctggggccacggcagcaatggagctggctacaagagccgcagcctggcccggagctgcctgagccacttcaagagcaaccagccctatgccagccggctgggcggccccacctgcaaggtgtcccggggcgtggcctacagcacccacaggaccaatgcccctgggaaggacttccagggcatctctgctgccttcagcacagaaaatggcttccacagcgtgggccacgagctggccgacaaccacatcaccagccgggactgcaatggccacctgctgaactgctatggaagaaatgaaagcatcgccagcaccccacctggagaggacaggaagagcccccgggtgctgatcaagaccctgggcaagctggatggctgcctgcgggtggagttccacaatggaggcaaccccagcaaggtgcctgctgaggactgcagcgagcctgtgcagctgctgcgctacagccccaccctggccagcgagaccagccctgtgcctgaggcccggcggggcagcagcgctgacagcctgcccagccaccggcccagccccacagacagccggctgcggagcagcaagggcagcagcctgagcagcgagagctcctggtatgacagcccctggggcaatgctggggagctgtctgaggccgagggcagcttcctggcccctggcatgccagaccccagcctgcacgccagcttccccccaggagatgccaagaagcccttcaaccagagcagcagcctgagcagcctgcgggagctgtacaaggatgccaacctgggcagcctgagccccagcggcatccggctgagtgatgagtacatgggcacccacgccagcctgagcaacagagtgtcctttgccagtgacattgatgtgcccagccgggtggcccatggagaccccatccagtacagcagcttcaccctgccctgcaggaagcccaaggcctttgtggaggacacagccaagaaggacagcctgaaggccaggatgaggcgcatcagtgactggacaggcagcctgagcaggaagaagaggaagctgcaggagcccaggagcaaggagggcagtgactactttgacagcagaagtgatggcctgaacacagatgtgcagggcagcagccaggccagcgccttcctgtggagcggcggcagcacccagatcctgagccagaggtctgagagcacccacgccatcggcagtgaccccctgcggcagaacatctatgagaacttcatgagggagctggagatgagcaggaccaacacagagaacatcgagaccagcacagaaacagctgagagcagcagcgagagcctgagcagcctggagcagctggacctgctgtttgagaaggagcagggcgtggtgaggaaggccggctggctgttcttcaagcccctggtgacagtgcagaaggagaggaagctggagctggtggcccggaggaagtggaagcagtactgggtgaccctgaagggctgcaccctgctcttctatgagacctacggcaagaacagcatggaccagagcagcgccccccgctgtgccctgtttgctgaagattccatcgtgcagagcgtgcctgagcaccccaagaaggaaaatgtgttctgcctgagcaacagctttggagatgtgtacctgttccaggccaccagccagacagacctggagaactgggtgacagctgtgcacagcgcctgtgccagcctgtttgccaagaagcacggcaaggaggacaccctgcggctgctgaagaaccagaccaagaacctgctgcagaagattgacatggacagcaagatgaagaagatggccgagctgcagctgtctgtggtgtctgaccccaagaacaggaaggccatcgagaaccagatccagcagtgggagcagaacctggagaagttccacatggacctcttcaggatgcgctgctacctggccagcctgcagggcggggagctgcccaaccccaagagcctgctggccgccgccagccggcccagcaagctggccctgggccgcctgggcatcctgtctgtgagcagcttccacgccctggtgtgcagcagagatgattctgccctgaggaagaggaccctgagcctgacccagagaggaagaaacaagaagggcatcttcagcagcctgaagggcctggacaccctggccaggaagggcaaggagaagaggcccagcatcacccaggtggatgagctgctgcacatctacggcagcacagtggatggagtgccccgggacaatgcctgggagatccagacctacgtgcacttccaggacaaccacggcgtgacagtgggcatcaagccagagcaccgggtggaggacatcctgaccctggcctgcaagatgaggcagctggagcccagccactacggcctgcagctgaggaagctggtggatgacaacgtggagtactgcatcccagccccctatgagtacatgcagcagcaggtgtatgatgaaattgaggtgttccccctgaatgtgtatgatgtgcagctgaccaagacaggctctgtgtgtgactttggatttgctgtgacagcccaggtggatgagcggcagcacctgagccgcatcttcatcagtgatgtgctgcctgatggcctggcctatggagagggcctgaggaaaggaaatgagatcatgaccctgaatggagaggccgtgtctgacctggacctgaagcagatggaggccctcttcagcgagaagtctgtgggcctgaccctgattgcccggcccccagacaccaaggccaccctgtgcacctcctggagcgacagcgacctcttcagccgggaccagaagagcctgctgcccccacccaaccagagccagctgctggaggagttcctggacaacttcaagaagaacacagccaatgacttcagcaatgtgcctgacatcaccaccggcctgaagaggagccagacagatggcaccctggaccaggtgagccaccgggagaagatggagcagaccttccgctctgctgagcagatcacagccctgtgccgctccttcaatgacagccaggccaacggcatggagggcccccgggagaaccaggaccccccacccaggagcctggcccggcacctgagtgatgctgaccggctgaggaaggtgatccaggagctggtggacacagagaagagctatgtgaaggacctgagctgcctgtttgagctgtacctggagcccctgcagaatgagaccttcctgacccaggatgagatggagagcctgtttggcagcctgcctgagatgctggagttccagaaggtgttcctggagaccctggaggatggcatcagcgccagcagtgacttcaacaccctggagacccccagccagttcaggaagctgctcttcagcctgggcggcagcttcctgtactatgctgaccacttcaagctgtacagcggcttctgtgccaaccacatcaaggtgcagaaggtgctggagcgggccaagacagacaaggccttcaaggccttcctggatgccaggaaccccaccaagcagcacagcagcaccctggagagctacctgatcaagcctgtgcagagggtgctgaagtaccccctgctgctgaaggagctggtgtccctgacagaccaggagagcgaggagcactaccacctgacagaggccctgaaggccatggagaaggtggccagccacatcaatgagatgcagaagatctatgaggactatggcaccgtgtttgaccagctggtggccgagcagagcggcacagagaaggagcagcctgagtggagcagcgaggtgatggatgtgctggacccccggggcaagctgaccaagggcaccctggaggagcccaggaccctggtgacagagctgtccatgggagagctgctgatgcacagcacagtgtcctggctgaaccccttcctgagcctgggcaaggccaggaaggacctggagctgactgtgtttgtgttcaagagagctgtgatcctggtgtacaaggagaactgcaagctgaagaagaagctgcccagcaacagcaggcctgcccacaacagcacagacctggaccccttcaagttccgctggctgatccccatcagcgccctgcaggtgcggctgggcaacccagctggaacagagaacaacagcatctgggagctgatccacaccaagtcagaaattgagggccggcctgagaccatcttccagctgtgctgcagcgacagcgagagcaagaccaacatcgtgaaggtgatccgcagcatcctgcgggagaacttccgccgccacatcaagtgtgagctgcccctggagaagacctgcaaggaccggctggtgcccctgaagaacagagtgcctgtgtctgccaagctggccagcagccgcagcctgaaggtgctgaagaacagcagcagcaatgagtggacaggagaaacaggcaagggcaccctgctggacagtgatgagggcagcctgagcagcggcacccagagcagcggctgccccacagctgagggccggcaggacagcaagagcaccagccctgggaagtacccccaccctggcctggccgactttgctgacaacctgatcaaggagagtgacatcctgagtgatgaagatgatgaccaccggcagacagtgaagcagggcagccccaccaaggacatcgagatccagttccagaggctgcgcatcagcgaggaccctgatgtgcaccctgaggccgagcagcagcccggccctgagagcggggagggccagaagggcggggagcagcccaagctggtgcggggccacttctgccccatcaagaggaaggccaacagcaccaagagggaccggggcaccctgctgaaggcccagatccgccaccagagcctggacagccagagtgaaaatgccaccatcgacctgaacagcgtgctggagcgggagttctctgtgcagagcctgacctctgtggtgtctgaggagtgcttctatgaaacagagagccacggcaagagctag

SEQ ID NO: 21703 - DNA, 348 bp, synthetic construct
  source 1..348: mol_type = other DNA; note = Synthetic coding sequence
atggccccagccaagaagggcggggagaagaagaagggccgcagcgccatcaatgaggtggtgacccgggagtacaccatcaacatccacaagaggatccacggcgtgggcttcaagaagagggccccccgggccctgaaggagatcaggaagtttgccatgaaggagatgggcaccccagatgtgagaattgacacccggctgaacaaggctgtgtgggccaagggcatcagaaatgtgccctaccgcatccgggtgcggctgagcaggaagagaaatgaagatgaggacagccccaacaagctgtacaccctggtgacctacgtgcctgtgaccaccttcaagtag

SEQ ID NO: 21704 - DNA, 747 bp, synthetic construct
  source 1..747: mol_type = other DNA; note = Synthetic coding sequence
atggccctggaggtgggggacatggaggatggccagctgagtgacagcgacagcgacatgacagtggcccccagcgaccggcccctgcagctgcccaaggtgctgggcggggacagcgccatgagggccttccagaacacagccacagcctgtgcccctgtgagccactacagagctgtggagagcgtggacagcagcgaggagagcttcagtgacagtgatgatgacagctgcctgtggaagaggaagaggcagaagtgcttcaaccccccacccaagccagagcccttccagtttggccagagcagccagaagccccctgtggccggcggcaagaagatcaacaacatctggggcgctgtgctgcagaagctgaggaaggagagccaggagcacaccaaggacctggacaaggagctggatgagtacatgcatggaggcaagaagatgggcagcaaggaggaggagaatggccagggccacctgaagaggaagaggcctgtgaaggaccggctgggcaacagacctgagatgaactacaagggccgctatgagatcacagctgaggacagccaggagaaggtggctgatgagatctccttccggctgcaggagcccaagaaggacctgattgcccgggtggtgaggaacaagctgcggaccttcagcaccctgaagaccaagaggaacatgaagatcaagaagctgctgggccgcggggagcacaagtgctggggcaagaggtag

SEQ ID NO: 21705 - DNA, 78 bp, synthetic construct
  source 1..78: mol_type = other DNA; note = Synthetic coding sequence
atggccatggcccccagccccagcctggtgcaggtgtacaccagccctgctgctgtggccgtgtgggagtggcagtag

SEQ ID NO: 21706 - DNA, 171 bp, synthetic construct
  source 1..171: mol_type = other DNA; note = Synthetic coding sequence
atgagctactaccagaggcccttcagccccagcgcctacagcctgcctgccagcctgaacagcagcatcgtgatgcagcacggcaccagcctggacagcacagacacctacccccagcacgcccagagcctggatggcaccaccagcagcagcatccccctgtacagatag

SEQ ID NO: 21707 - DNA, 450 bp, synthetic construct
  source 1..450: mol_type = other DNA; note = Synthetic coding sequence
gtgcgggagctggaggccgagctggatgctgagcagaagaagcacgccgaggccctgaagggcgtgaggaagcatgaaagaagagtgaaggagctggcctaccaggccgaggaggacaggaagaacctggccaggatgcaggacctggtggacaagctgcagagcaaggtgaagagctacaagaggcagtttgaggaggccgagcagcaggccaacaccaacctggccaagtacaggaaggcccagcacgagctggatgatgctgaggagagagctgacatggccgagacccaggccaacaagctgcgggcccggaccagagatgccctgggccccaaggtgcgcagcggccggggcatcgccctgtgtgccggcggcctgtggggcctgaccggcagcacagcccacagcgccatccccttcagcagcgcccagggcgtgacagcctag

SEQ ID NO: 21708 - DNA, 468 bp, synthetic construct
  source 1..468: mol_type = other DNA; note = Synthetic coding sequence
agcaatgtgatggaggccaatgctgcccggcaggccaccccagctgagtggagccaggatgacagcaatgacatgtgggaggaccaggaggaggaggaggaggaggaggaggatggcctggccggccagctgctgagtgacatcctggccaccagcaaatatgaggaggactactatgaagatgatgaggaggatgatcctgatgccctgaaggaccccctgtaccagattgacctgcaggccaccctgatgaccatgagaggagagttctaccggcccagcgccagcaagaagggcagcctgagcacctttgcccccagcggccctgctgccaaccactttgctgccctgaccggcctggagatgcacttcctgctgaacctgaagtggcacctggacccctggcccctggccagcgctgtgaccctgatgaccatccagacccggctgactggagctgtgacctag

SEQ ID NO: 21709 - DNA, 1620 bp, synthetic construct; identical to SEQ ID NO: 19050
  source 1..1620: mol_type = other DNA; note = Synthetic coding sequence

SEQ ID NO: 21710 - DNA, 645 bp, synthetic construct
  source 1..645: mol_type = other DNA; note = Synthetic coding sequence
atgcccagcccctggggctggtttgctgtgacagcctgtggggcccagaggaacaactttgaggagcctgtggccctgcaggagatggacaccagcaatggagtgctgctgcccttctatgaccctgacagcagcatcgtgtacctgtgtgggaagggggacagcagcatccgctactttgagatcacagatgagcccccatttgtgcactacctgaacaccttcagcagcaaggagccccagaggggcatgggcttcatgcccaagaggggcctggatgtgtccaaatgtgaaattgcccgcttctacaagctgcacgagaggaaatgtgagcccatcatcatgacagtgcccaggaagagtgacctcttccaggatgctgagcctgtgctgatcagcctgagagatggctacgtgccccccaagcaccgggagctgcgggtgaccaagaggaacatcctggatgtgcggccccccagcggccccaggaggagccagagcgccagtgatgcccccctgagccagcacaccctggagaccctgctggaggagatcaaggccctgcgggagcgggtgcaggcccaggagcagaggatcacagccctggagaacatgctgtgtgagctggtggatggaacagactag

SEQ ID NO: 21711 - DNA, 690 bp, synthetic construct
  source 1..690: mol_type = other DNA; note = Synthetic coding sequence
atgctgcagctgcgggacagcgtggacagcgctggcaccagccccacagctgtgctggccgccggggaggagcccggcagcattgagcaggccgtggaggagatccgggtggtggtgcggcctgtggaggatggagagatccagggcgtgtggctgctgacagaggtggaccactggaacaatgagaaggagcggctggtgctggtgacagagcagagcctgctgatctgcaagtatgacttcatcagcctgcagtgccagcaggtggtgcgcatcgccctgaatgctgtggacaccatctcctatggagagttccagttcccccccaagagcctgaacaagcgggagggcttcggcatccgcatccagtgggacaagcagagccggcccagcttcatcaaccgctggaacccctggagcaccaacgtgccctatgccaccttcacagagcaccccatggccggggctgatgagaagacagccagcctgtgccagctggagagcttcaaggccctgctgatccaggccgtgaagaaggcccagaaggagagccccctgcccggccaggccaatggagtgctgatcctggagcggcccctgctgattgagacctacgtgggcctgatgtccttcatcaacaatgaggccaagctgggctacagcatgacccggggcaagattggcttctag

SEQ ID NO: 21712 - DNA, 390 bp, synthetic construct
  source 1..390: mol_type = other DNA; note = Synthetic coding sequence
atgtgtgaggtgtcccggggctggaagccctgcacagagggcatcctgaaggtgcggcccaccaggaagatctcctatgagggcaacatcacccccaccgtggagctgaatgccctgtgcatgaagctgggcaagaagcccatgtacaagcctgtggacccctacagcaggatgcagagcacctacaactacaacatgaggggcggggcctacccaccccgctacttctaccccttccctgtgccccccctgctgtaccaggtggagctgtctgtgggcggccagcagttcaacgggaagggcaagacccggcaggccgccaagcatgatgctgctgccaaggccctgcgcatcctgcagaatgagcccctgcctgagcggctggagtag

SEQ ID NO: 21713 - DNA, 3042 bp, synthetic construct
  source 1..3042: mol_type = other DNA; note = Synthetic coding sequence
atggacctcttcaggatgcgctgctacctggccagcctgcagggcggggagctgcccaaccccaagagcctgctggccgccgccagccggcccagcaagctggccctgggccgcctgggcatcctgtctgtgagcagcttccacgccctggtgtgcagcagagatgattctgccctgaggaagaggaccctgagcctgacccagagaggaagaaacaagaagggcatcttcagcagcctgaagggcctggacaccctggccaggaagggcaaggagaagaggcccagcatcacccaggtggatgagctgctgcacatctacggcagcacagtggatggagtgccccgggacaatgcctgggagatccagacctacgtgcacttccaggacaaccacggcgtgacagtgggcatcaagccagagcaccgggtggaggacatcctgaccctggcctgcaagatgaggcagctggagcccagccactacggcctgcagctgaggaagctggtggatgacaacgtggagtactgcatcccagccccctatgagtacatgcagcagcaggtgtatgatgaaattgaggtgttccccctgaatgtgtatgatgtgcagctgaccaagacaggctctgtgtgtgactttggatttgctgtgacagcccaggtggatgagcggcagcacctgagccgcatcttcatcagtgatgtgctgcctgatggcctggcctatggagagggcctgaggaaaggaaatgagatcatgaccctgaatggagaggccgtgtctgacctggacctgaagcagatggaggccctcttcagcgagaagtctgtgggcctgaccctgattgcccggcccccagacaccaaggccaccctgtgcacctcctggagcgacagcgacctcttcagccgggaccagaagagcctgctgcccccacccaaccagagccagctgctggaggagttcctggacaacttcaagaagaacacagccaatgacttcagcaatgtgcctgacatcaccaccggcctgaagaggagccagacagatggcaccctggaccaggtgagccaccgggagaagatggagcagaccttccgctctgctgagcagatcacagccctgtgccgctccttcaatgacagccaggccaacggcatggagggcccccgggagaaccaggaccccccacccaggagcctggcccggcacctgagtgatgctgaccggctgaggaaggtgatccaggagctggtggacacagagaagagctatgtgaaggacctgagctgcctgtttgagctgtacctggagcccctgcagaatgagaccttcctgacccaggatgagatggagagcctgtttggcagcctgcctgagatgctggagttccagaaggtgttcctggagaccctggaggatggcatcagcgccagcagtgacttcaacaccctggagacccccagccagttcaggaagctgctcttcagcctgggcggcagcttcctgtactatgctgaccacttcaagctgtacagcggcttctgtgccaaccacatcaaggtgcagaaggtgctggagcgggccaagacagacaaggccttcaaggccttcctggatgccaggaaccccaccaagcagcacagcagcaccctggagagctacctgatcaagcctgtgcagagggtgctgaagtaccccctgctgctgaaggagctggtgtccctgacagaccaggagagcgaggagcactaccacctgacagaggccctgaaggccatggagaaggtggccagccacatcaatgagatgcagaagatctatgaggactatggcaccgtgtttgaccagctggtggccgagcagagcggcacagagaaggaggtgacagagctgtccatgggagagctgctgatgcacagcacagtgtcctggctgaaccccttcctgagcctgggcaaggccaggaaggacctggagctgactgtgtttgtgttcaagagagctgtgatcctggtgtacaaggagaactgcaagctgaagaagaagctgcccagcaacagcaggcctgcccacaacagcacagacctggaccccttcaagttccgctggctgatccccatcagcgccctgcaggtgcggctgggcaacccagctggaacagagaacaacagcatctgggagctgatccacaccaagtcagaaattgagggccggcctgagaccatcttccagctgtgctgcagcgacagcgagagcaagaccaacatcgtgaaggtgatccgcagcatcctgcgggagaacttcagaagacacatcaagtgtgagctgcccctggagaagacctgcaaggaccggctggtgcccctgaagaacagagtgcctgtgtctgccaagctggccagcagccgcagcctgaaggtgctgaagaacagcagcagcaatgagtggacaggagagaccgggaagggcaccctgctggacagtgatgagggcagcctgagcagcggcacccagagcagcggctgccccacagctgagggccggcaggacagcaagagcaccagccctgggaagtacccccaccctggcctggccgactttgctgacaacctgatcaaggagagtgacatcctgagtgatgaagatgatgaccaccggcagacagtgaagcagggcagccccaccaaggacatcgagatccagttccagaggctgcgcatcagtgaagatcctgatgtgcaccctgaggccgagcagcagcccggccctgagagcggggagggccagaagggcggggagcagcccaagctggtgcggggccacttctgccccatcaagaggaaggccaacagcaccaagagggaccggggcaccctgctgaaggcccagatccgccaccagagcctggacagccagagtgaaaatgccaccatcgacctgaacagcgtgctggagcgggagttctctgtgcagagcctgacctctgtggtgtctgaggagtgcttctatgaaacagagagccacggcaagagctag

SEQ ID NO: 21714 - DNA, 1149 bp, synthetic construct
  source 1..1149: mol_type = other DNA; note = Synthetic coding sequence
atggccgccaacctgagcagaaatggacctgccctgcaggaggcctacgtgcgggtggtgacagagaagagccccacagactgggccctcttcacctatgagggcaacagcaatgacatccgggtggccggcactggagagggcggcctggaggagatggtggaggagctgaacagcggcaaggtgatgtatgccttctgccgggtgaaggaccccaacagcggcctgcccaagtttgtgctgatcaactggacaggagagggcgtgaatgatgtgaggaagggggcctgtgccagccacgtgtccaccatggccagcttcctgaagggctctgtgtaccagaagaccaatgctgtgtctgagatcaagagggtgggcaaggacagcttctgggccaaggccgagaaggaggaggagaacagaaggctggaggagaagagaagagctgaggaggcccagaggcagctggagcaggagcggcgggagcgggagctgcgggaggccgcccggcgggagcagcgctaccaggagcagggcggggaggccagcccccagagcaggacctgggagcagcagcaggaggtggtgtccaggaacagaaatgagcaggagagcgctgtgcacccccgggagatcttcaagcagaaggagcgggccatgagcaccaccagcatcagcagcccccagcccgggaagctgcggagccccttcctgcagaagcagctgacccagcctgagacccacttcggccgggagcctgctgctgccatcagccggcccagggctgacctgcctgctgaggagcccgcccccagcaccccaccctgcctggtgcaggccgaggaggaggccgtgtatgaggagcccccagagcaggagaccttctatgagcagccccccctggtgcagcagcagggcgccggcagcgagcacatcgaccaccacatccagggccagggcctgagcggccagggcctgtgtgcccgggccctgtatgactaccaggccgcagatgacacagagatcagctttgatcctgaaaatctcatcactggaattgaggtgattgatgagggctggtggaggggctacggcccagatggccacttcggcatgtttcctgccaactacgtggagctgattgaatag

SEQ ID NO: 21715 - DNA, 660 bp, synthetic construct
  source 1..660: mol_type = other DNA; note = Synthetic coding sequence
atggtggtgctgtctgtgcctgctgaggtgaccgtcatcctgctggacatcgagggcaccaccacccccatcgcctttgtgaaggacatcctcttcccctacattgaagaaaatgtgaaggagtacctgcagacccactgggaggaggaggagtgccagcaggatgtgtccctgctgaggaagcaggccgaggaggatgcccacctggatggagctgtgcccatcccagctgccagcggaaatggagtggatgacctgcagcagatgatccaggccgtggtggacaacgtgtgctggcagatgagcctggacaggaagaccacagccctgaagcagctgcagggccacatgtggagggctgccttcaccgctggccgcatgaaggccgagttctttgctgatgtggtgcctgctgtgaggaagtggagggaggccggcatgaaggtgtacatctacagcagcggctctgtggaggcccagaagctgctgtttggccacagcacagaaggagacatcctggagctggtggatggccactttgacaccaagattggccacaaggtggagagcgagagctacaaggactgccggcagcactgggtgctgaaccagcagcactttgtgtctgaccgctgctacagccggggccagtgctgctag

SEQ ID NO: 21716 - DNA, 1446 bp, synthetic construct; identical to SEQ ID NO: 21094
  source 1..1446: mol_type = other DNA; note = Synthetic coding sequence

SEQ ID NO: 21717 - DNA, 1644 bp, synthetic construct; identical to SEQ ID NO: 19587
  source 1..1644: mol_type = other DNA; note = Synthetic coding sequence

SEQ ID NO: 21718 - DNA, 1887 bp, synthetic construct; identical to SEQ ID NO: 21506
  source 1..1887: mol_type = other DNA; note = Synthetic coding sequence

SEQ ID NO: 21719 - DNA, 474 bp, synthetic construct
  source 1..474: mol_type = other DNA; note = Synthetic coding sequence
atgaggagcggcttccgctgtgatgagcctgctgaggccgtggcccctgagcggcagacagtgtctggagctgtggccctggccagcttcaccagcccccacacccaccctgtggatgatggcggccgccactacagctggggcagccccaagaggatcctgggcctgggccctggagatgctgccaaggaggccggcctggtgcggcccctgcagggccagagcgagaagatcctgctgcggaccaggaaccggcagcccatggagccccccatggagcccagcggcggggagcaggagcctggagctgtgcgcttcctggacctgccctgggaggatgtgctgctgccccacgtgctgaacagagtgcccctgcggcagctgctgcggctgcagagggtgtcccgggccttccgcagcctggtgcagctgcacctggccggcctgcggagatttgatgctgcccaggtgtag

SEQ ID NO: 21720 - DNA, 483 bp, synthetic construct; identical to SEQ ID NO: 20009
  source 1..483: mol_type = other DNA; note = Synthetic coding sequence

SEQ ID NO: 21721 - DNA, 402 bp, synthetic construct
  source 1..402: mol_type = other DNA; note = Synthetic coding sequence
atggccgccctgcggcccctggtgaagcccaagatcgtgaagaagaggaccaagaagttcatccgccaccagagcgaccgctacgtgaagatcaagaggaactggaggaagccccggggcatcgacaacagagtgagaagacgcttcaagggccagatcctgatgcccaacatcggctacggcagcaacaagaagaccaagcacatgctgcccagcggcttcaggaagttcctggtgcacaacgtgaaggagctggaggtgctgctgatgtgcaacaagagctactgtgccgagatcgcccacaacgtgagcagcaagaacaggaaggccatcgtggagagagctgcccagctggccatccgggtgaccaaccccaatgcccggctgcggtctgaggagtag

SEQ ID NO: 21722 - DNA, 639 bp, synthetic construct
  source 1..639: mol_type = other DNA; note = Synthetic coding sequence
atggacctgtttggagacctgcctgagcctgagaggagccccaggcctgctgctgggaaggaggcccagaagggccccctgctgtttgatgacctgcccccagccagcagcacagacagcggcagcggcggccccctgctgtttgatgacctgcccccagccagcagcggggacagcggcagcctggccaccagcatcagccagatggtgaagacagagggcaaaggagccaagaggaagaccagcgaggaggagaagaatggaagtgaggagctggtggagaagaaggtgagcagcagcgtcatcttcggcctgaagggctacgtggccgagaggaaaggagagcgggaggagatgcaggatgcccacgtgatcctgaatgacatcacagaggagtgcaggcctcccagcagcctcatcaccagggtgtcctactttgctgtgtttgatggccacggcggcatccgggccagcaagtttgctgcccagaacctgcaccagaacctgatcaggaagttccccaagggagatgtgatctctgtggagaagacagtgaagcgctgcctgctggacaccttcaagcacacagatgaggagttcctgaagcaggccagcagccagaagccagcctggaagtag

SEQ ID NO: 21723 - DNA, 1131 bp, synthetic construct; identical to SEQ ID NO: 19363
  source 1..1131: mol_type = other DNA; note = Synthetic coding sequence

SEQ ID NO: 21724 - DNA, 1485 bp, synthetic construct
  source 1..1485: mol_type = other DNA; note = Synthetic coding sequence
atggctgctgctgctgaatgtgatgtggtgatggccgccacagagcctgagctgctggatgaccaggaggccaagcgggaggccgagaccttcaaggagcagggcaatgcctactatgccaagaaggactacaatgaggcctacaactactacaccaaggccatcgacatgtgccccaagaatgccagctactacggcaacagagctgccaccctgatgatgctgggccgcttccgggaggccctgggagatgcccagcagagcgtgcggctggatgacagctttgtgcggggccacctgcgggagggcaagtgccacctgagcctgggcaatgccatggccgcctgccgctccttccagagggccctggagctggaccacaagaatgcccaggcccagcaggagttcaagaatgccaatgctgtgatggagtatgagaagattgctgagacagactttgagaagagggacttcaggaaggtggtgttctgcatggaccgggccctggagtttgccccagcctgccaccgcttcaagatcctgaaggccgagtgcctggccatgctgggccgctacccagaggcccagagcgtggccagtgacatcctgaggatggacagcaccaatgctgatgccctgtatgtgcggggcctgtgcctgtactatgaggactgcatcgagaaggctgtgcagttctttgtgcaggccctgaggatggccccagaccacgagaaggcctgcatcgcctgcagaaatgccaaggccctgaaggccaagaaggaggatggcaacaaggccttcaaggagggcaactacaagctggcctatgagctgtacacagaggccctgggcatcgaccccaacaacatcaagaccaatgccaagctgtactgcaacagaggcaccgtgaacagcaagctgaggaagctggatgatgccatcgaggactgcaccaatgctgtgaagctggatgacacctacatcaaggcctacctgcggcgggcccagtgctacatggacacagagcagtatgaggaggccgtgcgggactatgagaaggtgtaccagacagagaagaccaaggagcacaagcagctgctgaagaatgcccagctggagctgaagaagagcaagaggaaggactactacaagatcctgggcgtggacaagaatgcctctgaagatgagatcaagaaggcctacaggaagagggccctgatgcaccacccagacagacacagcggggccagcgctgaggtgcagaaggaggaggagaagaagttcaaggaggtgggggaggccttcaccatcctgagtgaccccaagaagaagaccaggtatgattctggccaggacctggatgaggagggcatgaacatgggagactttgaccccaacaacatcttcaaggccttctttggaggccctgggggcttctcctttgaggccagcggccctggcaacttcttcttccagtttggatag

SEQ ID NO: 21725 - DNA, 1329 bp, synthetic construct
  source 1..1329: mol_type = other DNA; note = Synthetic coding sequence
aatgaggtgtacaacctgacccaggagttcttcagacatgacaagcctgtgaatgctgagagccagaacagcgtgggcgtcttcacccgggaggaggtgaggaaccgcatcagaaatgaccctgatgatcctgaggccaccaagaggctgaagctggccatgatccagcagtacctgaaggtggagagctgtgagagcagcagccacagcatggatgaggtgtccctgagcgcctttggagagtggacagagatccctggggcccaccacatcatccccagcggcttcatgagggtggtggagctgctggccgagggcatcccagcccacgtgatccagctgggcaagcctgtgcgctgcatccactgggaccaggccagcgcccggccccggggccctgagattgagcccagaggagagggggaccacaaccacgacacaggagagggcggccagggcggggaggagccccggggcggccgctgggatgaagatgagcagtggagcgtggtggtggagtgtgaggactgtgagctgatcccagctgaccacgtgattgtgacagtgtccctgggcgtgctgaagaggcagtacaccagcttcttccggcccggcctgcccacagagaaggtggccgccatccaccggctgggcatcggcaccacagacaagatcttcctggagtttgaggagcccttctggggccctgagtgcaacagcctgcagtttgtgtgggaggatgaagctgagagccacaccctgacctacccacctgagctgtggtacaggaagatctgtggctttgatgtgctgtacccacctgagagatatggccacgtgctgagcggctggatctgtggggaggaggccctggtgatggagaagtgtgatgatgaggccgtggccgagatctgcacagagatgctgcggcagttcaccggcaaccccaacatccccaagccccggcgcatcctgcggagcgcctggggcagcaacccctacttccggggcagctacagctacacccaggtgggcagcagtggagcagatgtggagaagctggccaagcccctgccctacacagagagcagcaagacagcccacggcagcagcaccaagcagcagcccggccacctgttcagcagcaaatgtcctgagcagcccctggatgccaacagaggagctgtgaagcccatgcaggtgctcttcagcggggaggccacccacaggaagtactacagcaccacccatggagccctgctgagcggccagcgggaggccgcccggctgattgagatgtacagagacctcttccagcagggcacctag

SEQ ID NO: 21726 - DNA, 180 bp, synthetic construct
  source 1..180: mol_type = other DNA; note = Synthetic coding sequence
atgagctactaccagaggcccttcagccccagcgcctacagcctgcctgccagcctgaacagcagcatcgtgatgcagcacggcaccagcctggacagcacagacacctacccccagcacgcccagagcctggatggcaccaccagcagcagcatccccctgtaccgcagcagcgagtag

SEQ ID NO: 21727 - DNA, 837 bp, synthetic construct
  source 1..837: mol_type = other DNA; note = Synthetic coding sequence
atgaagtgtgagcactgcaccaggaaggagtgcagcaagaagaccaagacagatgaccaggagaatgtgtctgcagatgcccccagccctgcccaggagaatggagagaagggggagttccacaagctggctgatgccaagatcttcctgagtgactgcctggcctgtgacagctgcatgacagctgaggagggcgtgcagctgagccagcagaatgccaaggacttcttccgggtgctgaacctgaacaagaagtgtgacaccagcaagcacaaggtgctggtggtgtctgtgtgcccccagagcctgccctactttgctgccaagttcaacctgtctgtgacagatgccagccggcggctgtgtggcttcctgaagagcctgggctgggtgcgctatgcagagcgggtgctgggccggcccatcacagcccacctgtgcacagccaagagcccccagcaggtgatgggcagcctggtgaaggactactttgcccggcagcagaacctgagccctgagaagatcttccacgtgattgtggccccctgctatgacaagaagctggaggccctgcaggagagcctgcccccagccctgcacggcagcagaggagctgactgtgtgctgaccagcggcaccggcagcctgtgggagtgcacccctgtgatcacagccacccaggaggccgccgcccgggagagcctggagcccggccggcagaggctgcagagggacaagatcgcccccctggacagcagcctgggcggcggcggggagatcgcccagatcatggagcagggcgacctgtctgtgagagatgctgctgtggacacctag

SEQ ID NO: 21728 - DNA, 471 bp, synthetic construct
  source 1..471: mol_type = other DNA; note = Synthetic coding sequence
tgaggaaaggcccagaggaagatcagcgccatccacatcctggatgtgctggtgctgaatggaacagatgtgcgggagcagcacttcaaccagaggatccagctggccgagaagtttgtgaaggctgtgtccaagcccagcaggccagacatgaaccccatccgggtgaaggaggtgtaccgcctggaggagatggagaagatctttgtgcggctggagatgaagatcatcaagggcagcagcggcacccccaagctgagctacacaggaagagatgacagacactttgtgcccatgggcctgtacatcgtgaggacagtgaatgagccctggaccatgggcttcagcaagagcttcaagaagaagttcttctacaacaagaagaccaaggacagcacctttgacctgcctgctgacagcatcgcccccttccacctgcccagcctggcctgcctgagcaagatggactag

SEQ ID NO: 21729 - DNA, 1200 bp, synthetic construct; identical to SEQ ID NO: 21077
  source 1..1200: mol_type = other DNA; note = Synthetic coding sequence

SEQ ID NO: 21730 - DNA, 819 bp, synthetic construct
  source 1..819: mol_type = other DNA; note = Synthetic coding sequence
atggccagcctgctgcaggaccagctgaccacagaccaggacctgctgctgatgcaggagggcatgcccatgaggaaggtgcgcagcaagtcctggaagaagctgcgctacttccggctgcagaatgatggcatgacagtgtggcacgcccggcaggcccggggcagcgccaagcccagcttcagcatcagtgatgtggagaccatcagaaatggacatgattctgagctgctgcggagcctggccgaggagctgcccctggagcagggcttcaccatcgtgttccacggccgccgcagcaacctggacctgatggccaacagcgtggaggaggcccagatctggatgaggggcctgcagctgctggtggacctggtgacctccatggaccaccaggagcggctggaccgctggctgagtgactggttccagagaggagacaagaaccaggacggcaagatgtccttccaggaggtgcagaggctgctgcacctgatgaatgtggagatggaccaggagtatgccttcagcctcttccaggccgctgacaccagccagagcggcaccctggagggggaggagtttgtgcagttctacaaggccctgaccaagagagctgaggtgcaggagctgtttgagagcttcagcgcagatggccagaagctgaccctgctggagttcctggacttcctgcaggaggagcagaaggagcgggactgcaccagcgagctggccctggagctgattgacagatatgagcccagcgacagcggggccagcgaggaggaccccggggagggggaggaggtgaacacctag

SEQ ID NO: 21731 - DNA, 360 bp, synthetic construct; identical to SEQ ID NO: 20655
  source 1..360: mol_type = other DNA; note = Synthetic coding sequence

SEQ ID NO: 21732 - DNA, 1881 bp, synthetic construct; identical to SEQ ID NO: 19875
  source 1..1881: mol_type = other DNA; note = Synthetic coding sequence

SEQ ID NO: 21733 - DNA, 189 bp, synthetic construct
  source 1..189: mol_type = other DNA; note = Synthetic coding sequence
atggccatggcccccagccccagcctggtgcaggtgtacaccagccctgctgctgtggccgtgtgggagtggcaggacggcctgggcacctggcacccctacagcgccaccgtgtgcagcttcatcgagcagcagtttgtgcagcagaagggccagcgcttcggcctgggcagcctggcccacagctag

SEQ ID NO: 21734 - DNA, 228 bp, synthetic construct
  source 1..228: mol_type = other DNA; note = Synthetic coding sequence
atgaggctgagcctgcccctgctgctgctgctgctgggcgcctgggccatccctgggggcctgggggaccgggcccccctgacagccacagccccccagctggatgatgaggagatgtacagcgcccacatgcctgcccacctgcgctgtgatgcctgcagagctgtggcctaccagaggctgtgcagctacccaccccacctgcccctgacagagcagcagagctag

SEQ ID NO: 21735 - DNA, 2619 bp, synthetic construct
  source 1..2619: mol_type = other DNA; note = Synthetic coding sequence
atgggagacagtgatgatgaatatgacagaagaagaagagacaagttcagaagagagaggagtgactatgacaggagccgggagagagatgagaggagaagaggagatgactggaatgaccgggagtgggaccggggccgggagaggaggagcagaggagagtacagagattatgacaggaacagaagagagcgcttcagcccccccaggcatgagctgagccccccccagaagaggatgagaagagactgggatgagcacagcagtgacccctaccacagcggctatgagatgccctatgccggcggcggcggcggccccacctacggccccccccagccctggggccacccagatgtgcacatcatgcagcaccacgtgctgcccatccaggcccggctgggcagcattgctgagattgacctgggcgtgcccccacctgtgatgaagaccttcaaggagttcctgctgagcctggatgacagcgtggatgaaacagaggccgtgaagcgctacaatgactacaagctggacttccggcggcagcagatgcaggacttcttcctggcccacaaggatgaggagtggttccgcagcaagtaccacccagatgaggtgggcaagaggcggcaggaggcccggggggccctgcagaaccggctgcgggtcttcctgagcctgatggagaccggctggtttgacaacctgctgctggacatcgacaaggcagatgccatcgtgaagatgctggatgctgctgtgatcaagatggagggcggcacagaaaatgacctgcgcatcctggagcaggaggaggaggaggagcaggccggcaagccaggagagcccagcaagaaggaggagggccgggccggggccggcctgggagatggagagaggaagaccaatgacaaggatgagaagaaggaggatggcaagcaggccgagaatgacagcagcaatgatgacaagaccaagaagtcagaaggagatggagacaaggaggagaagaaggaggacagcgagaaggaggccaagaagagcagcaagaagaggaacaggaagcacagcggagatgacagctttgatgagggctctgtgtctgagagcgagagcgagagcgagagcggccaggccgaggaggagaaggaggaggccgaggaggccctgaaggagaaggagaagcccaaggaggaggagtgggagaagcccaaggatgctgctggcctggagtgcaagccccggcccctgcacaagacctgcagcctcttcatgaggaacatcgcccccaacatcagcagagctgagatcatcagcctgtgcaagcgctacccaggcttcatgagggtggccctgtctgagccccagcctgagcggcgcttcttcagaagaggctgggtgacctttgacagatctgtgaacatcaaggagatctgctggaacctgcagaacatccggctgagagaatgtgagctgagccctggggtgaacagagacctgacccggcgggtgaggaacatcaatggcatcacccagcacaagcagatcgtgagaaatgacatcaagctggccgccaagctgatccacaccctggatgacaggacccagctgtgggccagcgagcccggcaccccacccctgcccaccagcctgcccagccagaaccccatcctgaagaacatcacagactacctgattgaggaggtgtctgctgaggaggaggagctgctgggcagcagcggcggggcccctcctgaggagccccccaaggagggcaacccagctgagatcaacgtggagagagatgagaagctgatcaaggtgctggacaagctgctgctgtacctgcgcatcgtgcacagcctggactactacaacacctgtgagtacccaaatgaagatgagatgcccaacagatgtggcatcatccacgtgcggggccccatgccacccaaccgcatcagccacggggaggtgctggagtggcagaagacctttgaggagaagctgacccccctgctgtctgtgcgggagagcctgtctgaggaggaggcccagaagatgggcaggaaggaccctgagcaggaggtggagaagtttgtgaccagcaacacccaggagctgggcaaggacaagtggctgtgccccctgagcggcaagaagttcaagggccctgagtttgtgaggaagcacatcttcaacaagcatgctgagaagattgaggaggtgaagaaggaggtggccttcttcaacaacttcctgacagatgccaagaggcctgccctgcctgagatcaagccagcccagcccccaggccctgcccagagcctgaccccaggcctgccctacccccaccagaccccccagggcctgatgccctacggccagcccaggcctcccatcctgggctacggggccggggctgtgcggcctgctgtgcccactggaggccccccctacccccacgccccctatggagctggccggggcaactatgatgccttccggggccagggcggctacccaggcaagcccaggaacaggatggtgcggggggacccccgggccatcgtggagtacagagacctggatgccccagatgatgtggacttcttctag

SEQ ID NO: 21736 - DNA, 483 bp, synthetic construct
  source 1..483: mol_type = other DNA; note = Synthetic coding sequence
tgaccagaagatgtgcaggccctggtgtctgggaagctggccctgcgctatgccggccggcagacagaggccctgaagtgtgtggcccaggccagcaagaacagaagcctggccgactttgagaaggccctgacagactacagagctgagctgagagatgaccccatcatcagcacccacctggccaagctgtatgacaacctgctggagcagaacctgatccgggtgattgagcccttcagccgggtgcagatcgagcacatcagcagcctcatcaagctgagcaaggcagatgtggagaggaagctgagccagatgatcctggacaagaagttccacggcatcctggaccagggcgagggcgtgctgatcatctttgatgagccccctgtggacaagacctatgaagctgccctggagaccatccagaacatgagcaaggtggtggacagcctgtacaacaaggccaagaagctgacctag

SEQ ID NO: 21737 - DNA, 3906 bp, synthetic construct
  source 1..3906: mol_type = other DNA; note = Synthetic coding sequence
atgtggaggaggaagcaccccaggaccagcggcggcacccggggcgtgctgagcggcaacagaggagtggagtatggcagcggccggggccacctgggcacctttgagggccgctggaggaagctgcccaagatgcctgaggccgtgggcacagaccccagcaccagcaggaagatggccgagctggaggaggtgaccctggatggcaagcccctgcaggccctgcgggtgacagacctgaaggccgccctggagcagaggggcctggccaagagcggccagaagagcgccctggtgaagaggctgaagggggccctgatgctggagaacctgcagaagcacagcacccctcatgctgccttccagcccaacagccagattggagaggagatgagccagaacagcttcatcaagcagtacctggagaagcagcaggagctgctgcggcagaggctggagcgggaggcccgggaggccgctgagctggagggcaagagcagcagcatcagcgaggagaagggggacagtgatgatgagaagcccaggaaaggagagcggcgcagcagccgggtgcggcaggcccgggccgccaagctgtctgagggcagccagcctgctgaggaggaggaggaccaggagacccccagcaggaacctgcgggtgcgggctgacaggaacctgaagacagaggaggaggaggaggaggaggaggaggaggaggaggatgatgaggaggaggagggagatgatgagggccagaagagccgggaggcccccatcctgaaggagttcaaggaggagggggaggagatcccccgggtgaagccagaggagatgatggatgagcggcccaagaccaggagccaggagcaggaggtgctggagcggggcggccgcttcaccaggagccaggaggaggccaggaagagccacctggcccggcagcagcaggagaaggagatgaagaccaccagccccctggaggaggaggagcgggagatcaagagcagccagggcctgaaggagaagagcaagagccccagccccccccggctgacagaggacaggaagaaggccagcctggtggccctgcctgagcagacagccagcgaggaggagaccccaccacccctgctgaccaaggaggccagcagccccccaccccacccccagctgcacagcgaggaggagattgagcccatggagggccctgccccagctgtgctgatccagctgagcccccccaacacagatgctgacacccgggagctgctggtgtcccagcacacagtgcagctggtgggcggcctgagccccctgagcagccccagcgacaccaaggccgagagccctgctgagaaggtgcctgaggagagcgtgctgcccctggtgcagaagagcaccctggccgactacagcgcccagaaggacctggagcctgagagtgacagaagtgcccagcccctgcccctgaagattgaggagctggccctggccaagggcatcacagaagaatgtctgaagcagcccagcctggagcagaaggagggccggcgggccagccacaccctgctgcccagccaccggctgaagcagagcgctgacagcagcagcagccgcagcagcagcagcagcagcagcagcagccgcagccgcagccgcagcccagacagcagcggcagccgcagccacagccccctgcggagcaagcagagagatgtggcccaggcccggacccacgccaacccccggggccggcccaagatgggcagccgcagcaccagcgagagccgcagccgcagccgcagccgcagccgcagcgccagcagcaacagcaggaagagcctgagccctggggtgtcccgggacagcagcaccagctacacagagaccaaggaccccagcagcggccaggaggtggccaccccacctgtgccccagctgcaggtgtgtgagcccaaggagaggaccagcaccagcagcagctctgtgcaggcccggcggctgagccagcctgagagcgctgagaagcacgtgacccagaggctgcagcctgagcggggcagccccaagaagtgtgaggccgaggaggccgagcccccagctgccacccagccccagaccagcgagacccagaccagccacctgcctgagagcgagcgcatccaccacacagtggaggagaaggaggaggtgaccatggacaccagcgagaacagaccagaaaatgatgtgcctgagccccccatgcccatcgctgaccaggtgtccaatgatgacaggcctgagggctctgtggaggatgaggagaagaaggagagcagcctgcccaagagcttcaagaggaagatctctgtggtgtctgccaccaagggcgtgcctgctggcaacagcgacacagagggcggccagcccggcaggaagaggcgctggggcgccagcacagccaccacccagaagaagcccagcatcagcatcaccacagagagcctgaagagcctcatcccagacatcaagcccctggccggccaggaggccgtggtggacctgcacgcagatgacagccgcatcagtgaagatgaaacagaaagaaatggagatgatggcacccatgacaagggcctgaagatctgcaggacagtgacccaggtggtgcctgctgagggccaggagaatggccagcgggaggaggaggaggaggagaaggagcctgaggccgagccccctgtgcccccccaggtgtctgtggaggtggccctgcccccacctgctgagcacgaggtgaagaaggtgaccctgggggacaccctgaccaggaggagcatcagccagcagaagtctggagtgtccatcaccattgatgatcctgtgaggacagcccaggtgcccagccccccccggggcaagatcagcaacatcgtgcacatcagcaacctggtgcggcccttcaccctgggccagctgaaggagctgctgggccgcacaggcaccctggtggaggaggccttctggattgacaagatcaagagccactgctttgtgacctacagcacagtggaggaggccgtggccaccaggacagccctgcacggcgtgaagtggccccagagcaaccccaagttcctgtgtgccgactatgcagagcaggatgagctggactaccaccggggcctgctggtggaccggcccagcgagaccaagacagaggagcagggcatcccccggcccctgcaccccccacctcctcctcctgtgcagcccccccagcaccccagggctgagcagcgggagcaggagagagctgtgcgggagcagtgggccgagcgggagcgggagatggagcggcgggagaggaccaggtctgagcgggagtgggaccgggacaaggtgcgggagggccccaggagccgcagccgcagccgggacagaagaaggaaggagcgggccaagagcaaggagaagaagtctgagaagaaggagaaggcccaggaggagcccccagccaagctgctggatgacctcttcaggaagaccaaggccgccccctgcatctactggctgcccctgacagacagccagatcgtgcagaaggaggccgagcgggcagagcgggccaaggagcgggagaagaggaggaaggagcaggaggaggaggagcagaaggagcgggagaaggaggccgagcgggagaggaaccggcagctggagcgggagaagaggcgggagcacagccgggagcgggaccgggagcgggagcgggagcgggagcgggacagaggagaccgggaccgggaccgggagcgggaccgggagcggggccgggagcgggaccggcgggacaccaagaggcacagccgcagccgcagccgcagcacccctgtgcgggaccggggcggcagaagatag

SEQ ID NO: 21738 - DNA, 231 bp, synthetic construct
  source 1..231: mol_type = other DNA; note = Synthetic coding sequence
atgctgctggagaacctgacagacaatgaaagtgagaacaccaacctgaagaagaaggtgtttgagaaggaggcccacatccaggagctgagctgcctcttccagagcgagaagagcctggagaccaagatcgccaagtggaacctgcagagcaggatgaacaagaatgaggccatcgtgatgaaggaggccagccggcagaagacagtggccctgaagaaggccagctag

SEQ ID NO: 21739 - DNA, 1749 bp, synthetic construct
  source 1..1749: mol_type = other DNA; note = Synthetic coding sequence
atggaggtgcgggccagcctgcagaaggtgtctggcagcagtgacagcgtggccaccatgaacagcgaggagtttgtgctggtgccccagtatgcagatgacaacagcaccaagcatgaggagaagccccagctgaagatcgtgtccaatggagatgagcagctggagaaggccatggaggagatcctgcgggacagcgagaagaggcccagcagcctgctggtggactgccagagcagcagcgagatcagtgaccacagctttggagacatcccagccagccagaccaacaagcccagcctgcagctgatcctggaccccagcaacacagagatcagcaccccccggcccagcagccctgggggcctgcctgaggaggacagcgtgctcttcaacaagctgacctacctgggctgcatgaaggtgagcagccccagaaatgaggtggaggccctgcgggccatggccaccatgaagagcagcagccagtaccccttccctgtgaccctgtatgtgcccaacgtgcctgagggctctgtgcgcatcatcgaccagagcagcaatgtggagatcgccagcttccccatctacaaggtgctcttctgtgcccggggccatgatggcaccacagagagcaactgctttgccttcacagagagcagccacggcagcgaggagttccagatccacgtgttcagctgtgagatcaaggaggccgtgagccgcatcctgtacagcttctgcacagccttcaagaggagcagccggcaggtgtctgatgtgaaggacagcgtcatccccaccccagacagtgatgtgttcaccttctctgtgtccctggaggtgaaggaggatgatggcaagggcaacttccggctgctggtgatccccatcccctttgagtacttcagccctgtgcccaaggaccgggacaagttctacttcaagctgaagcagggcatcgagaagaaggtggtgatcaccgtgcagcagctgagcaacaaggagctggccatcgagcgctgcttcggcatgctgctgagccctggaagaaatgtgaagaacagcgacatgcacctgctggacatggagagcatgggcaagagctatgatggccgggcctacgtgatcaccggcatgtggaaccccaatgcccctgtgttcctggccctgaatgaggagacccccaaggacaagcaggtgtacatgacagtggccgtggacatggtggtgacagaggtggtggagcctgtgcgcttcctgctggagaccgtggtgcgggtgtacccagccaatgaacgcttctggtacttcagcaggaagaccttcacagagaccttcttcatgaggctgaagcagagcgagggcaagggccacaccaatgctggagatgccatctatgaggtggtgtccctgcagcgggagagtgacaaggaggagcctgtgacccccaccagcggcggcggccccatgagcccccaggatgatgaggccgaggaggagagtgacaatgagctgagcagcggcactggagatgtgtccaaggactgcccagagaagatcctgtacagctggggcgagctgctgggcaagtggcacagcaacctgggcgcccggcccaagggcctgagcaccctggtgaagtctggagtgcctgaggccctgcgggcagaggtgtggcagctgctggccggctgccacgacaaccaggccatgctggaccgctaccgcatcctgatcaccaagtag

SEQ ID NO: 21740 - DNA, 138 bp, synthetic construct
  source 1..138: mol_type = other DNA; note = Synthetic coding sequence
atggatgctgacagtgatgtggccctggacatcctgatcaccaacgtggtgtgtgtgttccgcacccgctgccacctgaacctgaggaagatcgccctggagggcgccaacgtcatctacaagagagatgtgggctag

SEQ ID NO: 21741 - DNA, 762 bp, synthetic construct
  source 1..762: mol_type = other DNA; note = Synthetic coding sequence
atggaggatgccccccagaggctgcgctggcaggcccacctggagttcacccacaaccatgatgtgggggacctgacctgggacaagattgctgtgtccctgcccaggtctgagaagctgcggagcctggtgctggccggcatcccccacggcatgaggccccagctgtggatgaggctgagcggggccctgcagaagaagaggaacagcgagctgagctaccgggagatcgtgaagaacagcagcaatgatgagaccatcgccgccaagcagatcgagaaggacctgctgcggaccatgcccagcaatgcctgctttgcctccatgggcagcattggagtgccccggctgcggcgggtgctgcgggccctggcctggctgtacccagaaattggctactgccagggcaccggcatggtggccgcctgcctgctgctcttcctggaggaggaggatgccttctggatgatgtctgccatcatcgaggacctgctgcctgccagctacttcagcaccaccctgctgggcgtgcagacagaccagagggtgctgcggcacctgattgtgcagtacctgccccggctggacaagctgctgcaggagcatgacatcgagctgagcctcatcaccctgcactggttcctgacagcctttgcctctgtggtggacatcaagctgctgctgcgcatctgggacctcttcttctatgagggcagccgggtgctcttccagctgaccctgggcatgctgcacctgaagtag

SEQ ID NO: 21742 - DNA, 336 bp, synthetic construct
  source 1..336: mol_type = other DNA; note = Synthetic coding sequence
tgacccctggtgaaggtgcagatctttggagtgcggctggacacagcccggcaggagaccaactacgtggagaacaacggcttcaacccctactggggccagaccctgtgcttccgggtgctggtgcctgagctggccatgctgcgctttgtggtgatggactatgactggaagagcagaaatgacttcatcggccagtacaccctgccctggacctgcatgcagcagggctaccgccacatccacctgctgagcaaggatggcatcagcctgcggcctgccagcatctttgtgtacatctgcatccaggagggcctggagggagatgagagctag

SEQ ID NO: 21743 - DNA, 552 bp, synthetic construct; identical to SEQ ID NO: 19200
  source 1..552: mol_type = other DNA; note = Synthetic coding sequence

SEQ ID NO: 21744 - DNA, 1215 bp, synthetic construct
  source 1..1215: mol_type = other DNA; note = Synthetic coding sequence
atgatgctgagcacagagggccgggagggctttgtggtgaaggtgcggggcctgccctggagctgcagcgcagatgaggtgatgaggttcttcagtgactgcaagatccagaatggcaccagcggcatccgcttcatctacacccgggagggccggcccagcggggaggcctttgtggagctggagagcgaggaggaggtgaagctggccctgaagaaggaccgggagaccatgggccaccgctacgtggaggtgttcaagagcaacagcgtggagatggactggatgaccctgcctgtggacttccagggccgcagcactggagaggcctttgtgcagtttgccagccaggagattgctgagaaggccctgaagaagcacaaggagagaattggccaccgctacatcgagatcttcaagagcagcagagctgaggtgaggacccactatgacccccccaggaagctgatggccatgcagaggcctggcccctatgacaggcctggggccggccggggctacaacagcatcggcagaggagctggctttgagaggatgagaagaggagcctatggaggcggctatggaggctatgatgattatggaggctacaatgatggctacggcttcggcagtgacagatttggccgggacctgaactactgcttcagcggcatgtctgaccacagatatggagatggcggcagcagcttccagagcaccaccggccactgtgtgcacatgaggggcctgccctaccgggccacagaaaatgacatctacaacttcttcagccccctgaaccccatgagggtgcacatcgagatcggcccagatggccgggtgactggagaggctgatgtggagtttgccacccatgaagatgctgtggccgccatggccaaggacaaggccaacatgcagcacagatatgtggagctgttcctgaacagcacagctggcaccagcggcggggcctatgaccacagctatgtggagctgttcctgaacagcacagctggggccagcggcggggcctacggcagccagatgatgggcggcatgggcctgagcaaccagagcagctatggaggccctgccagccagcagctgagcggcggctatggaggcggctatggaggccagagctccatgagcggctatgaccaggtgctgcaggagaacagcagtgactaccagagcaacctggcctag

SEQ ID NO: 21745 - DNA, 1545 bp, synthetic construct; identical to SEQ ID NO: 21159
  source 1..1545: mol_type = other DNA; note = Synthetic coding sequence

SEQ ID NO: 21746 - DNA, 2928 bp, synthetic construct
  source 1..2928: mol_type = other DNA; note = Synthetic coding sequence
atgaagtttgtgtctgaggacctgcaccgctgtgccctgctgacagctgacagctttggagaccccttcttccccaggaccacccagatcctgctggagtaccagctgggccgctgggtgccccggctgcgggagccccgggacctgtatggagtgagcagcagcggccccctgagccccacccgctggccctaccactgtgaggtgattgatgagaaggtgcagcacatcgactggacccccagctgcccagagcctgtgtacatccccaccggcctggagacagagcccctgtacccagacagcaaggaggccaccgtggtgtacctggccgaggatgcctacaaggagccctgctttgtgtacagccgggtgggcggcaacagaacacccctgaagcagcctgtggactacagagacaacaccctgatgtttgaggccaggtttgaaagtggcaacctgcagaaggtggtgaaggtggccgagtatgagtaccagctgactgtgcggccagacctcttcaccaacaagcacacccagtggtactacttccaggtgaccaacatgagagctggcatcgtgtaccgcttcaccatcgtgaacttcaccaagccagccagcctgtacagccggggcatgaggcccctcttctacagcgagaaggaggccaaggcccaccacatcggctggcagagaattggagaccagatcaagtactacagaaacaaccctggccaggacggccgccactacttcagcctgacctggaccttccagttcccccacaacaaggacacctgctactttgcccactgctacccctacacctacaccaacctgcaggagtacctgagcggcatcaacaatgaccctgtgcgcagcaagttctgcaagatccgggtgctgtgccacaccctggccaggaacatggtgtacatcctgaccatcaccacccccctgaagaacagcgacagcaggaagaggaaggccgtcatcctgacagcccgggtgcaccctggagagaccaacagctcctggatcatgaagggcttcctggactacatcctgggcaacagcagtgatgcccagctgctgcgggacacctttgtgttcaaggtggtgcccatgctgaacccagatggagtgattgtgggcaactaccgctgcagcctggccggccgggacctgaacagaaactacaccagcctgctgaaggagagcttccccagcgtgtggtacaccaggaacatggtgcaccggctgatggagaagcgggaggtgatcctgtactgtgacctgcacggccacagcaggaaggagaacatcttcatgtatggctgtgatggcagtgacaggagcaagaccctgtacctgcagcagaggatcttccccctgatgctgagcaagaactgcccagacaagttctccttcagcgcctgcaagttcaacgtgcagaagagcaaggagggcaccggccgggtggtgatgtggaagatgggcatccggaacagcttcaccatggaggccaccttctgtggcagcaccctgggcaacaagaggggcacccacttcagcaccaaggacctggagagcatgggctaccacttctgtgacagcctgctggactactgtgaccctgacaggaccaagtactaccgctgcctgaaggagctggaggagatggagcggcacatcaccctggagaaggtgtttgaggacagcgacacccctgtgattgacatcaccctggatgtggagagcagcagccggggcagtgacagcagcgagagcattgacagcctgacctacctgctgaagctgaccagccagaagaagcacctgaagaccaagaaggagaggaacagcaccatcgccagccaccagaatgcccggggccaggaggtgtatgaccggggccacctgctgcagaggcacacccagagcaacagtgatgtgaaggacacccggcccaatgaaccagatgactacatggtggactacttccggcggcagctgcccaaccagggcctggcccactgcaagctgcggctgcccggcagccgccacagccctgccagcgccagccgggtggccggcaccaccggcaccaggcaccacacctggctgatctttgtgttcctggtggagatgggcaagaagatccccctgaagggcacagacctgtatggcaactgcttcaaggtgaccagcctgcagagccccatgggcaagcagaccagcacctggacagagaagacccgcatccccacagaggacctgcaccacaacctgaagagcaagatcaaggagtgcatctccttccagagcaagaagacaggcatcaactggacagatgatgagaagaggagctacaaggacaagggcatcgtgcagacccaggagatcctgcagtacctgctgcccatcgtgcacagcaccaagaacatgcagaccacccagatcaagcagctgttcaaccccaggaccaacttccagatccagcaccagctgaacccagccacctgcaggaacatcaagaagtacagcacctcctggacagcccccaggaaccaccccttcgtcatccagggagatgtgatggccaacagcagcgagtgggtgcagagcaagccccacaggagcctggagagcctgagccccctgaagggccccaagaagaacaagcacagccagatctgggccatcaagaatgaagacatcaagcccctgagcagcaagtgggagacagccagcagcagctttggcatggatgccaacgtgctgaagtacaagagcctgcaggccgaggagaccaaccagcagagcagcaagcacacagccctgcacctgaccaagaacaaggatgagcaggccaacaagaatgatggccagcccaccctgtacctgaagttccagcgggagagctag

SEQ ID NO: 21747 - DNA, 1626 bp, synthetic construct
  source 1..1626: mol_type = other DNA; note = Synthetic coding sequence
atgagcagcagcggctacccacccaaccagggcgccttcagcacagagcagagccgctacccaccccacagcgtgcagtacaccttccccaacaccaggcaccagcaggagtttgctgtgcctgactaccgcagcagccacctggaggtgtcccaggccagccagctgctgcagcagcagcagcagcagcagctgcggcggcggcccagcctgctgtctgagttccaccctggcagtgaccggccccaggagaggaggaccagctatgagcccttccaccctggccccagccctgtggaccatgacagcctggagagcaagaggccccggctggagcaggtgtctgacagccacttccagagggtgtctgctgctgtgctgcccctggtgcaccccctgcctgagggcctgcgggccagcgcagatgccaagaaggaccctgcctttggaggcaagcatgaggcccccagcagccccatcagcggccagccctgtggagatgaccagaatgccagccccagcaagctgagcaaggaggagctgatccagagcatggacagagtggaccgggagatcgccaaggtggagcagcagatcctgaagctgaagaagaagcagcagcagctggaggaggaggccgccaagcccccagagcctgagaagcctgtgtccccacctcctgtggagcagaagcacaggagcatcgtgcagatcatctatgatgagaacaggaagaaggccgaggaggcccacaagatctttgagggcctgggccccaaggtggagctgcccctgtacaaccagcccagcgacaccaaggtgtaccacgagaacatcaagacaggagtgcctgcccggaggatgatgaagaaccaggtgatgaggaagaagctgatcctcttcttcaagagaagaaatcatgccaggaagcagcgggagcagaagatctgccagagatatgaccagctgatggaggcctgggagaagaaggtggacagaattgagaacaaccccaggaggaaggccaaggagagcaagacccgggagtactatgagaagcagtttcctgagatcaggaagcagcgggagcagcaggagcgcttccagagggtgggccagagaggagctggcctgagcgccaccatcgcccggagtgaacatgagatcagcgagatcattgatggcctgtctgagcaggagaacaatgagaagcagatgaggcagctgagcgtcatcccccccatgatgtttgatgctgagcagaggagagtgaagttcatcaacatgaatggcctgatggaggaccccatgaaggtgtacaaggaccggcagttcatgaatgtgtggacagaccacgagaaggagatcttcaaggacaagttcatccagcaccccaagaactttggcctgattgccagctacctggagaggaagtctgtgcctgactgtgtgctgtactactacctgaccaagaagaatgaaaactacaaggccctggtgagaagaaactacggcaagagaagaggaagaaaccagcagatcgcccggcccagccaggaggagaaggtggaggagaaggaggaggacaaggccgagaagacagagaagaaggaggaggagaagtag

SEQ ID NO: 21748 - DNA, 840 bp, synthetic construct
  source 1..840: mol_type = other DNA; note = Synthetic coding sequence
atgaagttccccttcctgcccatcctggtgatgaagttcatcgagaaggcccagaacatgagcaaatatgtgctgattgacaccccaggccagatcgaggtgttcacctggagcgccagcggcaccatcatcacagaggccctggccagcagcttccccaccgtggtgatctacgtgatggacaccagccgcagcaccaaccctgtgaccttcatgagcaacatgctgtatgcctgcagcatcctgtacaagaccaagctgcccttcatcgtggtgatgaacaagacagacatcatcgaccacagctttgctgtggagtggatgcaggactttgaggccttccaggatgccctgaaccaggagaccacctacgtgagcaacctgaccaggtccatgagcctggtgctggatgagttctacagcagcctgcgggtggtgggcgtgtctgctgtgctgggcaccggcctggatgagctgtttgtgcaggtgaccagcgctgctgaggagtatgaaagagagtacagaccagaatatgaaaggctgaagaagagcctggccaatgctgagagccagcagcagcgggagcagctggagcggctgaggaaggacatgggctctgtggccctggatgctggaacagccaaggacagcctgagccctgtgctgcaccccagcgacctgatcctgacccggggcaccctggatgaagaagatgaggaggccgacagcgacacagatgacatcgaccaccgggtgacagaggagagccatgaggagcccgccttccagaacttcatgcaggagagcatggcccagtactggaagaggaacaacaagtag

SEQ ID NO: 21749 - DNA, 1230 bp, synthetic construct
  source 1..1230: mol_type = other DNA; note = Synthetic coding sequence
atgaaggacacccaggacatccaggaggccagcaaggccatgcagaacaaggtgcatgagcaggaggacaagaatgagaagcagaagcagcgggaggacaagctgggcgtgtacagcctggtgcacttcagccccaagatgctgggctctgtggccaccaccctgcccctgagcagcagcaacagcagcggcatgcccctgggctactacctgagcagcccccagatcagccgggtgaccatcagcaccaccggccagctgaccagcaaggccaccgtgggcagctgcagccgggtggagaacagcctggatgccagccccttctctgtgcccaagaagcaggatgagagccccatgattggagatggagaggactacttcctgagcctgtttggagacagcaagaagctgacagcccacagcaactacacccagaagaccctgaagtacttctccatgatcctggaggaggtgggccagttcaccagcagcagcctgggagatgtggagattgctgaggtgaatgtgaagggcctgtttgtgaagctgatcaacagcagcctggacaaggagatggccatcggggaccacatcctgcagcagaatgtgaatggccagaccatcagcctgtaccgcttcctgcccaacatcgtgatgcaggccaacagcacagtgacagtgtgggccgccgccagcgaggccaagcaccagccccccagcgacttcctgtggaaggagcaggacaagttccgggccagcccagactgcatcaccatcctgtgcaagcccaacggccaggccatcgcctggtacacccccatccactggaagcaggcctgggagaagctggatgctgatgtggagttcaaccgctgcagcgtggtgagccccaccttcaggaagagggtcttccagtggacagccagcacagccaccatcaccaaggagaagcaggaccagcccaagaaggacatcagcaactaccaggtggagcaggcccaggtgctgctgaagcgggagaaggagatcccccccaccgtcttccccaacagaagcccctggtgccagaacccctacgtgtctgcccacccctactgccccctgattgagccccacaacaccagcacagctgggggccgcctggaccggcagcccaggaccaggagcacccggcccaacagagccagcggcagcaagaagaagaagaccagcgagagccagaagcagtag

SEQ ID NO: 21750 - DNA, 2442 bp, synthetic construct; identical to SEQ ID NO: 20895
  source 1..2442: mol_type = other DNA; note = Synthetic coding sequence

SEQ ID NO: 21751 - DNA, 1773 bp, synthetic construct
  source 1..1773: mol_type = other DNA; note = Synthetic coding sequence
atgcccagcccccagctgctggtgctgtttggcagccagacaggaacagcccaggatgtgtctgagcggctgggccgggaggccaggagaagaaggctgggctgccgggtgcaggccctggacagctaccctgtggtgaacctgatcaatgagcccctggtgatctttgtgtgtgccaccaccggccagggcgaccccccagacaacatgaagaacttctggaggttcatcttcaggaagaacctgcccagcacagccctgtgccagatggactttgctgtgctgggcctgggggacagcagctatgccaagttcaactttgtggccaagaagctgcaccggcggctgctgcagctgggcggcagcgccctgctgcctgtgtgcctgggagatgaccagcacgagctgggcccagatgctgctgtggacccctggctgcgggacctgtgggacagagtgctgggcctgtacccacctcctcctggcctgacagagatccccccaggagtgcccctgcccagcaagttcaccctgctcttcctgcaggaggcccccagcactggaagtgagggccagagggtggcccaccctggcagccaggagccccccagcgagagcaagcccttcctggcccccatgatcagcaaccagagggtgacaggccccagccacttccaggatgtgcggctgattgaatttgacatcctgggcagcggcatcagctttgctgctggagatgtggtgctgatccagcccagcaacagcgctgcccacgtgcagcgcttctgccaggtgctgggcctggaccctgaccagctgttcatgctgcagccccgggagccagatgtgagcagccccacccggctgccccagccctgcagcatgaggcacctggtgagccactacctggacatcgcctctgtgccccggcgctccttctttgagctgctggcctgcctgagcctgcacgagctggagcgggagaagctgctggagttcagcagcgcccagggccaggaggagctgtttgagtactgcaaccggcccaggaggaccatcctggaggtgctgtgtgacttcccccacacagctgctgccatccccccagactacctgctggacctgatccctgtgatccggccccgggccttcagcatcgccagcagcctgctgatcctggtggccgtggtgcagttccagacccggctgaaggagccccggcggggcctgtgcagctcctggctggccagcctggaccccggccagggccctgtgcgggtgcccctgtgggtgcggcccggcagcctggccttccctgagaccccagacacccctgtgatcatggtgggccctggcactggagtggcccccttccgggccgccatccaggagcgggtggcccagggccagacaggcaacttcctgttcttcggctgccgctggagggaccaggacttctactgggaggccgagtggcaggagctggagaagagggactgcctgaccctcatcccagccttcagccgggagcaggagcagaaggtgtatgtgcagcaccggctgcgggagctgggcagcctggtgtgggagctgctggaccggcagggcgcctacttctacctggccggaaatgccaagtccatgccagcagatgtgtctgaggccctgatgagcatcttccaggaggagggcggcctgtgcagcccagatgctgctgcctacctggcccggctgcagcagacccggcgcttccagacagagacctgggcctag

SEQ ID NO: 21752 - DNA, 2436 bp, synthetic construct; identical to SEQ ID NO: 19035
  source 1..2436: mol_type = other DNA; note = Synthetic coding sequence

SEQ ID NO: 21753 - DNA, 189 bp, synthetic construct
  source 1..189: mol_type = other DNA; note = Synthetic coding sequence
atgcctgagatccgggtgacccccctgggcgcctgccctgtgctgtcctggaacctggtgctgcccccaggccggggcagccgggcccccagcagcacagacaccaggacaggcttccacgtgctgccccacggcgtgtctgccagcagcgagggcgcccccaggcctggggtggacacagtgctgtag

SEQ ID NO: 21754 - DNA, 948 bp, synthetic construct
  source 1..948: mol_type = other DNA; note = Synthetic coding sequence
atgagcggcctggtgctgggccagagagatgagcctgctggccaccggctgagccaggaggagatcctgggcagcacccggctggtgtcccagggcctggaggccctgcggtctgagcaccaggccgtgctgcagagcctgagccagaccatcgagtgcctgcagcagggcggccacgaggagggcctggtgcatgagaaggcccggcagctgcggcgctccatggagaacatcgagctgggcctgtctgaggcccaggtgatgctggccctggccagccacctgagcacagtggagagcgagaagcagaagctgcgggcccaggtgcggcggctgtgccaggagaaccagtggctgagagatgagctggccggcacccagcagaggctgcagaggtctgagcaggccgtggcccagctggaggaggagaagaagcacctggagttcctgggccagctgcggcagtatgatgaagatggccacaccagcgaggagaaggagggagatgccaccaaggacagcctggatgacctcttccccaatgaggaggaggaggaccccagcaatggcctgagccggggccagggcgccacagctgcccagcagggcggctatgagatcccagcccggctgcggaccctgcacaacctggtgatccagtatgctgcccagggccgctatgaggtggccgtgcccctgtgcaagcaggccctggaggacctggagaggaccagcggccggggccacccagatgtggccaccatgctgaacatcctggccctggtgtacagagaccagaacaagtacaaggaggccgcccacctgctgaatgatgccctgagcatccgggagagcaccctgggccctgaccaccctgctgtgtccatcccctgccccccccaccccacccccaggaccccccaccactgctgcttcggcctgtcctag

SEQ ID NO: 21755 - DNA, 2055 bp, synthetic construct; identical to SEQ ID NO: 18417
  source 1..2055: mol_type = other DNA; note = Synthetic coding sequence

SEQ ID NO: 21756 - DNA, 4050 bp, synthetic construct
  source 1..4050: mol_type = other DNA; note = Synthetic coding sequence
atggaggagaatgaaagccagaagtgtgagccctgcctgccctacagcgctgaccggcggcagatgcaggagcagggcaaaggaaacctgcacgtgaccagcccagaagatgctgaatgtagaaggaccaaggagcggctgagcaatggaaacagccggggctctgtgtccaagagcagcaggaacatccccaggaggcacaccctgggcggccccaggagcagcaaggagatcctgggcatgcagaccagcgagatggacaggaagcgggaggccttcctggagcacctgaagcagaagtacccccaccacgccagcgccatcatgggccaccaggagcggctgcgggaccagaccaggagccccaagctgagccacagcccccagccccccagcctgggggaccctgtggagcacctgtctgagaccagcgctgacagcctggaggccatgtctgaaggagatgcccccacccccttcagccggggcagcaggacccgggccagcctgcctgtggtgcgcagcaccaaccagaccaaggagaggagcctgggcgtgctgtacctgcagtatggagatgagaccaagcagctgaggatgcccaatgagatcaccagcgctgacaccatccgggccctgtttgtgtctgccttcccccagcagctgaccatgaagatgctggagagccccagcgtggccatctacatcaaggatgagagcagaaatgtgtactatgagctgaatgatgtgaggaacatccaggacaggagcctgctgaaggtgtacaacaaggaccctgcccacgccttcaaccacacccccaagaccatgaatggagacatgaggatgcagcgggagctggtgtatgcccggggagatggccctggggccccccggcccggcagcacagcccaccccccccacgccatccccaacagcccccccagcacccctgtgccccacagcatgccacccagccccagccgcatcccctacggcggcaccaggtccatggtggtgcctggaaatgccaccatcccccgggaccgcatcagcagcctgcctgtgtcccggcccatcagccccagccccagcgccatcctggagaggagagatgtgaagccagatgaggacatgtctgggaagaacatcgccatgtacagaaatgaaggcttctacgccgacccctacctgtaccacgagggccgcatgagcatcgccagcagccacggcggccaccccctggatgtgcctgaccacatcatcgcctaccacaggacagccatccgcagcgccagcgcctactgcaaccccagcatgcaggccgagatgcacatggagcagagcctgtaccggcagaagagcaggaagtacccagacagccacctgcccaccctgggcagcaagaccccaccagccagcccccaccgggtgtctgacctgaggatgattgacatgcacgcccactacaatgcccacggccccccccacaccatgcagcctgaccgggccagccccagccggcaggccttcaagaaggagcccggcaccctggtgtacatcgagaagcccaggtctgctgctggcctgagcagcctggtggacctgggcccccccctgatggagaagcaggtgtttgcctacagcacagccaccatccccaaggaccgggagaccagcgagaagatgatgaagaccacagccaacagaaaccacacagattctgctggcaccccccacgtgtctgggggcaagatgctgagcgccctggagagcacagtgccccccagccagcccccacctgtgggcaccagcgccatccacatgagcctgctggagatgagaagatctgtggccgagctgcggctgcagctgcagcagatgaggcagctgcagctgcagaaccaggagctgctgcgggccatgatgaagaaggccgagctggagatcagcggcaaggtgatggagaccatgaagaggctggaggaccctgtgcagaggcagagggtgctggtggagcaggagcggcagaagtacctgcacgaggaggagaagatcgtgaagaagctgtgtgagctggaggactttgtggaggacctgaagaaggacagcacagctgccagccggctggtgaccctgaaggatgtggaggatggagccttcctgctgcggcaggtgggggaggccgtggccaccctgaagggggagttccccaccctgcagaacaagatgagggccatcctgcgcatcgaggtggaggccgtgcgcttcctgaaggaggagccccacaagctggacagcctgctgaagagggtgcgctccatgacagatgtgctgaccatgctgcggagacatgtgacagatggcctgctgaagggcacagatgctgcccaggccgcccagtacatggccatggagaaggccacagctgctgaggtgctgaagagccaggaggaggccgcccacaccagcggccagcccttccacagcactggagcccctggagatgccaagtctgaggtggtgcccctgagcggcatgatggtgagacatgcccagagcagccctgtggtgatccagcccagccagcacagcgtggccctgctgaacccagcccagaacctgccccacgtggccagcagccctgctgtgccccaggaggccaccagcaccctgcagatgagccaggccccccagagcccccagatccccatgaatggcagcgccatgcagagcctcttcatcgaggagatccacagcgtgtctgccaagaacagagctgtgtccattgagaaggccgagaagaagtgggaggagaagaggcagaacctggaccactacaacgggaaggagtttgagaagctgctggaggaggcccaggccaacatcatgaagagcatccccaacctggagatgcccccagccaccggccccctgcccagaggagatgcccctgtggacaaggtggagctgtctgaggacagccccaacagcgagcaggacctggagaagctgggcggcaagagccccccacctcctcctcctccaccccggcgcagctacctgcccggcagcggcctgaccaccaccaggtctggagatgtggtgtacacaggcaggaaggagaacatcacagccaaggccagcagtgaagatgctggccccagcccccagacccgggccaccaagtacccagctgaggagcccgccagcgcctggacccccagccccccacctgtgaccaccagcagcagcaaggatgaggaggaggaggaggaggagggggacaagatcatggccgagctgcaggccttccagaagtgcagcttcatggatgtgaacagcaacagccatgctgagcccagcagagctgacagccacgtgaaggacaccaggtctggggccaccgtgccccccaaggagaagaagggcagcagcggggccccccagaccagcaggatgcctgtgcccatgtctgccaagaaccggcccggcaccctggacaagccaggcaagcagagcaagctgcaggacccccggcagtaccggcaggccaacggcagcgccaagaagagcggcggggacttcaagcccaccagccccagcctgcctgccagcaagatcccagccctgagccccagcagcggcaagagcagcagcctgcccagcagcagcggggacagcagcaacctgcccaaccccccagccaccaagcccagcatcgccagcaaccccctgagcccccagacaggccccccagcccacagcgccagcctcatccccagcgtgtccaatggcagcctgaagttccagagcctgacccacacaggcaagggccaccacctgtccttcagcccccagagccagaatggccgggcccccccacccctgtccttcagcagcagcccccccagccctgccagctctgtgtccctgaaccagggcgccaagggcaccaggaccatccacacccccagcctgaccagctacaaggcccagaatggcagcagcagcaaggccacccccagcacagccaaggagaccagctag

SEQ ID NO: 21757 - DNA, 177 bp, synthetic construct
  source 1..177: mol_type = other DNA; note = Synthetic coding sequence
tgaatcatccacaagctggccatgcagctgcggcacatcggggacaacatcgaccacaggatggtgcgggaggacctgcagcaggacggcagagatgccctggaccactttgtgttcttcttcttcagaagagtgcaggtgctgctgcacttcttctggaacaaccacctgctgtag

SEQ ID NO: 21758 - DNA, 429 bp, synthetic construct
  source 1..429: mol_type = other DNA; note = Synthetic coding sequence
atgcctgaggaccaggtgggcaagctggaggccacagagaacaccatcagcgccatggctgctgctgctgctgagcagcagcagttctacctgctgctgggcaacctgctgagcccagacaacgtggtgaggaagcaggccgaggagacctatgagaacatccctggccagagcaagatcaccttcctgctgcaggccatccggaacaccacagctgctgaggaggcccggcagatggctgctgtgctgctgcggcggctgctgagcagcgcctttgatgaggtgtacccagccctgcccagtgatgtgcagacagccatcaagtctgagctgctgatgatcatccagatggagacccagagctccatgaggaagaaggtgtgtgacattgctgctgagctggccaggaacctgattggagtgtactag

SEQ ID NO: 21759 - DNA, 93 bp, synthetic construct
  source 1..93: mol_type = other DNA; note = Synthetic coding sequence
atgggcagcaggaagaaggagatcgccctgcaggtgaacatcagcacccaggagctgtgggaggagatgctgagcagcaagggcctgacctag

SEQ ID NO: 21760 - DNA, 645 bp, synthetic construct; identical to SEQ ID NO: 18781
  source 1..645: mol_type = other DNA; note = Synthetic coding sequence

SEQ ID NO: 21761 - DNA, 1158 bp, synthetic construct; identical to SEQ ID NO: 18912
  source 1..1158: mol_type = other DNA; note = Synthetic coding sequence

SEQ ID NO: 21762 - DNA, 255 bp, synthetic construct
  source 1..255: mol_type = other DNA; note = Synthetic coding sequence
atgagcggcctggtgctgggccagagagatgagcctgctggccaccggctgagccaggaggagatcctgggcagcacccggctggtgtcccagggcctggaggccctgcggtctgagcaccaggccgtgctgcagagcctgagccagaccatcgagtgcctgcagcagggcggccacgaggagggcctggtgcatgagaaggcccggcagctgcggcgctccatggagaacatcgagctgggcctgtctgagtag

SEQ ID NO: 21763 - DNA, 483 bp, synthetic construct
  source 1..483: mol_type = other DNA; note = Synthetic coding sequence
atgtctgtgaacagcgagaagagcagcagcagcgagaggcctgagccccagcagaaggcccccctggtgcccccacctcctcctcctcctcctcctcctcctccacccctgcctgaccccaccccacctgagcctgaggaggagatcctgggcagtgatgatgaggagcaggaggaccctgctgactactgcaagggcggctaccaccctgtgaagattggagacctcttcaacggccgctaccacgtgatcaggaagctgggctggggccacttcagcacagtgtggctgtgctgggacatgcagggcaagagatttgtggccatgaaggtggtgaagagcgcccagcactacacagaaacagccctggatgagatcaagctgctgaagtgtgtgcgggagagtgaccccagcgaccccaacaaggacatggtggtgcagctgattgatgacttcaagatcagcggcatgaatggcatctag

SEQ ID NO: 21764 - DNA, 66 bp, synthetic construct
  source 1..66: mol_type = other DNA; note = Synthetic coding sequence
atgaacccagccagcgcccccccacccctgcccccacctggccagcaggtgattcatgtgacctag

SEQ ID NO: 21765 - DNA, 1212 bp, synthetic construct; identical to SEQ ID NO: 18994
  source 1..1212: mol_type = other DNA; note = Synthetic coding sequence

SEQ ID NO: 21766 - DNA, 5106 bp, synthetic construct; identical to SEQ ID NO: 18955
  source 1..5106: mol_type = other DNA; note = Synthetic coding sequence

SEQ ID NO: 21767 - DNA, 408 bp, synthetic construct
  source 1..408: mol_type = other DNA; note = Synthetic coding sequence
atgggcaagagctgcaaggtggtggtgtgtggccaggcctctgtgggcaagaccagcatcctggagcagctgctgtatggcaaccacgtggtgggcagcgagatgattgagacccaggaggacatctacgtgggcagcattgaaacagaccggggcgtgcgggagcaggtgaccatcgtggtgctgggcaacaagtgtgacctgcaggagcagaggagagtggaccctgatgtggcccagcactgggccaagtctgagaaggtgaagctgtgggaggtgtctgtggccgaccggcgcagcctgctggagccctttgtgtacctggccagcaagatgacccagccccagagcaagagcgccttccccctgagcaggaagaacaagggcagcggcagcctggatggatag

SEQ ID NO: 21768 - DNA, 3693 bp, synthetic construct; identical to SEQ ID NO: 19544
  source 1..3693: mol_type = other DNA; note = Synthetic coding sequence

SEQ ID NO: 21769 - DNA, 267 bp, synthetic construct
  source 1..267: mol_type = other DNA; note = Synthetic coding sequence
atgcctgaggaccaggtgggcaagctggaggccacagagaacaccatcagcgccatggctgctgctgctgctgagcagcagcagttctacctgctgctgggcaacctgctgagcccagacaacgtggtgaggaagcaggccgaggagacctatgagaacatccctggccagagcaagatcaccttcctgctgcaggccatccggaacaccacagctgctgaggaggcccggcagatggctgctgtgctgctgcggcggctgctgtag

SEQ ID NO: 21770 - DNA, 3627 bp, synthetic construct; identical to SEQ ID NO: 19599
  source 1..3627: mol_type = other DNA; note = Synthetic coding sequence

SEQ ID NO: 21771 - DNA, 1743 bp, synthetic construct
  source 1..1743: mol_type = other DNA; note = Synthetic coding sequence
atggtgctggtgggcacccaggatgccatctctgctgccaacccccgggtgattgatgacagccgggccaggaagctgagcacagacctgaagcgctgcacctactatgagacctgtgccacctacggcctgaatgtggagagggtcttccaggatgtggcccagaaggtggtggccctgaggaagaagcagcagctggccatcggcccctgcaagagcctgcccaacagccccagccacagcgctgtgtctgctgccagcatcccagctgtgcacatcaaccaggccaccaacggcggcggcagcgccttcagtgactacagcagctctgtgcccagcacccccagcatcagccagcgggagctgcgcatcgagaccatcgccgccagcagcacccccacccccatcaggaagcagagcaagaggaggagcaacatcttcaccagcaggaaaggagctgacctggaccgggagaagaaggctgctgagtgcaaggtggacagcatcggcagcggccgggccatccccatcaagcagggcatcctgctgaagaggtctgggaagagcctgaacaaggagtggaagaagaagtatgtgaccctgtgtgacaatggcctgctgacctaccaccccagcctgcatgactacatgcagaacatccacggcaaggagattgacctgctgcggaccaccgtgaaggtgcctgggaagaggctgccccgggccaccccagccacagcccctggcaccagcccccgggccaacggcctgtctgtggagaggagcaacacccagctgggcggcggcacagaggccgaggagagctttgaatttgtggtggtgtccctgaccggccagacctggcactttgaggccagcacagctgaggagcgggagctgtgggtgcagagcgtgcaggcccagatcctggccagcctgcagggctgccgcagcgccaaggacaagacccggctgggcaaccagaatgctgccctggccgtgcaggccgtgaggacagtgcggggcaacagcttctgcatcgactgtgatgcccccaacccagactgggccagcctgaacctgggcgccctgatgtgcatcgagtgcagcggcatccaccgccacctgggcgcccacctgagccgggtgcgcagcctggacctggatgactggcccccagagctgctggccgtgatgacagccatgggaaatgccctggccaacagcgtgtgggagggcgccctgggcggctacagcaagccaggcccagatgcctgccgggaggagaaggagcgctggatccgggccaagtatgagcagaagctgttcctggcccccctgcccagcagtgatgtgcccctgggccagcagctgctgcgggctgtggtggaggatgacctgcggctgctggtgatgctgctggcccacggcagcaaggaggaggtgaatgagacctatggagatggagatggccgcacagccctgcacctgagcagcgccatggccaacgtggtgttcacccagctgctgatctggtatggagtggatgtgcgcagcagagatgcccggggcctgacccccctggcctatgcccggcgggccggcagccaggagtgtgccgacatcctgatccagcacggctgccctggagagggctgcggcctggcccccacccccaaccgggagcccgccaacggcaccaaccccagcgctgagctgcacaggagccccagcctgctgtag

SEQ ID NO: 21772 - DNA, 312 bp, synthetic construct
  source 1..312: mol_type = other DNA; note = Synthetic coding sequence
atggccgagctgatccagaagaagctgcagggcgaggtggagaagtaccagcagctgcagaaggacctgagcaagtccatgagcggccggcagaagctggaggcccagctgacagagaacaacatcgtgaaggaggagctggccctgctggatggcagcaatgtggtgttcaagctgctgggccctgtgctggtgaagcaggagctgggggaggcccgggccaccgtgggcaagaggctggactacatcacagctgagatcttcctgcggaccatcccagaccctggagatgtgcctgacagcttcttctag

SEQ ID NO: 21773 - DNA, 453 bp, synthetic construct
  source 1..453: mol_type = other DNA; note = Synthetic coding sequence
atgaccagcaggaagaaggtgctgctgaaggtgatcatcctgggggacagcggcgtgggcaagaccagcctgatgaaccagtatgtgaacaagaagttcagcaaccagtacaaggccaccatcggggctgacttcctgaccaaggaggtgatggtggatgaccggctggtgaccatgcagatctgggacacagctggccaggagcgcttccagagcctgggcgtggccttctacagaggagctgactgctgcgtgctggtgtttgatgtgacagcccccaacaccttcaagaccctggacagctggagagatgagttcctgatccaggccagcccccgggaccctgagaacttcccctttgtggtgctgggcaacaagattgacctggagaaccggcaggtggccaccaagagggcccaggcctggtgctacagcaagaacaacatcccctag

SEQ ID NO: 21774 - DNA, 540 bp, synthetic construct; identical to SEQ ID NO: 20359
  source 1..540: mol_type = other DNA; note = Synthetic coding sequence

SEQ ID NO: 21775 - DNA, 171 bp, synthetic construct
  source 1..171: mol_type = other DNA; note = Synthetic coding sequence
atggacagcagcatccacctgagcagcctcatcagcagacatgatgatgaggccaccaggaccagcaccagcgagggcctggaggagggggaggtggagggggagaccctgctgattgtggagagcgaggaccaggcctctgtggacctgagccatgaccagagcggctag

SEQ ID NO: 21776 - DNA, 153 bp, synthetic construct
  source 1..153: mol_type = other DNA; note = Synthetic coding sequence
atgtgcagcaccagcggctgtgacctggaggagatccccctggatgatgatgacctgaacaccatcgagttcaagatcctggcctactacaccaggcaccacgtgttcaagagcaccccagccctcttcagccccaagctgctgcggacctag

SEQ ID NO: 21777 - DNA, 1203 bp, synthetic construct; identical to SEQ ID NO: 19568
  source 1..1203: mol_type = other DNA; note = Synthetic coding sequence

SEQ ID NO: 21778 - DNA, 513 bp, synthetic construct
  source 1..513: mol_type = other DNA; note = Synthetic coding sequence
atgcccaggaagggcacccagcccagcacagccaggagaagagaggagggccccccaccacccagcccagatggagccagcagtgatgctgagcctgagccccccagcggccgcacagagagccctgccacagctgctgagacagccagcgaggagctggacaacagaagcctggaggagatcctgaacagcatccccccacctcctcctccagccatgaccaatgaagctggggccccccggctgatgatcacccacatcgtgaaccagaacttcaagagctatgctggggagaagatcctgggccccttccacaagcgcttcagctgcatcatcggccccaatggaagtggcaagagcaatgtgattgacagcatgctgtttgtgtttggctaccgggcccagaagatccgcagcaagaagctgtctgtgctgatccacaacagtgatgagcacaaggacatccagagctgcaccgtggaggtgcacttccagaagatcatcgacaagtag

SEQ ID NO: 21779 - DNA, 504 bp, synthetic construct
  source 1..504: mol_type = other DNA; note = Synthetic coding sequence
atggagaaggctgtgaatgatggcagccacagcgaggagctgttctgccacctgaagaccatcagcgagaaggaggacctgccccgctgcaccagcgagagccacctgagctgcctgaagcaggacatcctgaatgagaagacagagctggaggccaccctgaaggaggccgagctggtgacccacagcgtggagctgctgctgcccctcttcaaggacaccatcgagaagatcaactttgaaaatgccaacctgagcgccctgaacctgaagatcagcgagcagaaggagatcctgatcaaggagctggacaccttcaagtctgtgaagctggccctggagcacctgctgaggaagagggactacaagcagacaggagacaacctgagctccatgctgctggagaacctgacagacaatgaaagtgagaacaccaacctgaagaagaaggtgtttgagaaggaggcccacatccaggagctgagctgcctcttccagagctag

SEQ ID NO: 21780 - DNA, 2376 bp, synthetic construct; identical to SEQ ID NO: 19027
  source 1..2376: mol_type = other DNA; note = Synthetic coding sequence

SEQ ID NO: 21781 - DNA, 687 bp, synthetic construct
  source 1..687: mol_type = other DNA; note = Synthetic coding sequence
atgacagaccagacctactgtgaccggctggtgcaggacacccccttcctgaccggccacggccgcctgtctgagcagcaggtggaccgcatcatcctgcagctgaaccgctactacccccagatcctgaccaacaaggaggccgagaagttcaggaaccccaaggccagcctgcgggtgcggctgtgtgacctgctgagccacctgcagaggtctggagagcgggactgccaggagttctaccgggccctgtacatccacgcccagcccctgcacagccggctgcccagcagacatgccctgaggaagttccacatcaccaaccacgcctgcctggtgctggcccggggcggccaccccagcctgcccctgatggcctggatgagctccatgaccacccaggtgtgctgcagccctggcctggccagccccctggccagcgccccaccccagaggcctccttctggccctgagggccgggtgtggcaggcccaggccgtgcagatgctggtgtctgtgagccacttcctgcccctgccccccagcctgagccacggcagcttccacacagcctggggcatcctgtatgtgcacagctgccccagcttcagcaacctgatcccccggggcagcctgcacgtgtgtgtggacagcaacctggtgcccacagctgcctggaggagctag

SEQ ID NO: 21782 - DNA, 948 bp, synthetic construct; identical to SEQ ID NO: 18394
  source 1..948: mol_type = other DNA; note = Synthetic coding sequence

SEQ ID NO: 21783 - DNA, 1203 bp, synthetic construct; identical to SEQ ID NO: 19568
  source 1..1203: mol_type = other DNA; note = Synthetic coding sequence

SEQ ID NO: 21784 - DNA, 381 bp, synthetic construct
  source 1..381: mol_type = other DNA; note = Synthetic coding sequence
atggtgctgatcctgggccgccgcctgaaccgggaggacctgggcgtgcgggacagccctgccaccaagaggaaggtgtttgagatggaccccaagagcctgactggacatgagttctttgacttcagcagcggcagcagccatgctgagaacatcctgcagatcttcaatgagttccgggacagccgcctcttcacagatgtgatcatctgtgtggagggcaaggagttcccctgccacagagctgtgctgagcgcctgcagcagctacttccgggccatgttctgcaatgaccaccgggagagccgggagatgctggtggagatcaatggcatcctggccgaggccatggagtgcttcctgcagtatgtgtacacctag

SEQ ID NO: 21785 - DNA, 312 bp, synthetic construct; identical to SEQ ID NO: 21772
  source 1..312: mol_type = other DNA; note = Synthetic coding sequence

SEQ ID NO: 21786 - DNA, 237 bp, synthetic construct
  source 1..237: mol_type = other DNA; note = Synthetic coding sequence
atggtgctgatcctgggccgccgcctgaaccgggaggacctgggcgtgcgggacagccctgccaccaagaggaaggtgtttgagatggaccccaagagcctgactggacatgagttctttgacttcagcagcggcagcagccatgctgagaacatcctgcagatcttcaatgagttccgggacagccgcctcttcacagatgtgatcatctgtgtggagggcaaggagttcccctag

SEQ ID NO: 21787 - DNA, 1320 bp, synthetic construct
  source 1..1320: mol_type = other DNA; note = Synthetic coding sequence
atggccgccaacctgagcagaaatggacctgccctgcaggaggcctacgtgcgggtggtgacagagaagagccccacagactgggccctcttcacctatgagggcaacagcaatgacatccgggtggccggcactggagagggcggcctggaggagatggtggaggagctgaacagcggcaaggtgatgtatgccttctgccgggtgaaggaccccaacagcggcctgcccaagtttgtgctgatcaactggacaggagagggcgtgaatgatgtgaggaagggggcctgtgccagccacgtgtccaccatggccagcttcctgaagggggcccacgtgaccatcaatgcccgggcagaagaagatgtggagcctgagtgcatcatggagaaggtggccaaggccagcggggccaactacagcttccacaaggagagcggccgcttccaggatgtgggcccccaggcccctgtgggctctgtgtaccagaagaccaatgctgtgtctgagatcaagagggtgggcaaggacagcttctgggccaaggccgagaaggaggaggagaacagaaggctggaggagaagagaagagctgaggaggcccagaggcagctggagcaggagcggcgggagcgggagctgcgggaggccgcccggcgggagcagcgctaccaggagcagggcggggaggccagcccccagagcaggacctgggagcagcagcaggaggtggtgtccaggaacagaaatgagcagggcagcacctgtgccagcctgcaggagagcgctgtgcacccccgggagatcttcaagcagaaggagcgggccatgagcaccaccagcatcagcagcccccagcccgggaagctgcggagccccttcctgcagaagcagctgacccagcctgagacccacttcggccgggagcctgctgctgccatcagccggcccagggctgacctgcctgctgaggagcccgcccccagcaccccaccctgcctggtgcaggccgaggaggaggccgtgtatgaggagcccccagagcaggagaccttctatgagcagccccccctggtgcagcagcagggcgccggcagcgagcacatcgaccaccacatccagggccagggcctgagcggccagggcctgtgtgcccgggccctgtatgactaccaggccgcagatgacacagagatcagctttgatcctgagaacctgatcaccggcatcgaggtgattgatgagggctggtggaggggctacggcccagatggccacttcggcatgtttcctgccaactacgtggagctgattgaatag

SEQ ID NO: 21788 - DNA, 219 bp, synthetic construct
  source 1..219: mol_type = other DNA; note = Synthetic coding sequence
atgagctaccagcagcagcagtgcaagcagccctgccagcccccacctgtgtgcccagcccccaagtgcccagagccctgccccccacccaagtgcccagagccctgcccccccagcaagtgcccccagagctgccccccccagcagtgccagcagaagtgcccccctgtgacccccagccccccctgccagcccaagtgcccccccaagagcaagtag

SEQ ID NO: 21789 - DNA, 342 bp, synthetic construct
  source 1..342: mol_type = other DNA; note = Synthetic coding sequence
atgtctgccatccagaacctgcacagctttgacccctttgctgatgccagcaaaggagatgacctgctgcctgctggaacagaggactacatccacatccgcatccagcagagaaatggaaggaagaccctgaccaccgtgcagggcattgctgatgattatgacaagaagaagctggtgaaggccttcaagaagaagtttgcctgcaatggcaccgtcatcgagcacccagaatatggagaggtgatccagctgcagggcgaccagaggaagaacatctgccagttcctggtggagatcggcctggccaaggatgaccagctgaaggtgcacggcttctag

SEQ ID NO: 21790 - DNA, 927 bp, synthetic construct; identical to SEQ ID NO: 18993
  source 1..927: mol_type = other DNA; note = Synthetic coding sequence

SEQ ID NO: 21791 - DNA, 1809 bp, synthetic construct
  source 1..1809: mol_type = other DNA; note = Synthetic coding sequence
atgattgagaagatgcagggcagcaggatggatgagcagcgctgcagcttccccccacccctgaagacagaggaggactacatcccctaccccagcgtgcatgaggtgctgggccgggagggccccttccccctcatcctgctgccccagtttggaggctactggattgagggcaccaaccacgagatcaccagcatccctgagacagagcccctgcagagccccaccaccaaggtgaagctggagtgcaaccccacagcccgcatctacaggaagcacttcctgggcaaggagcacttcaactactacagcctggatgctgccctgggccacctggtgttcagcctgaagtatgatgtgattggagaccaggagcacctgcggctgctgctgcggaccaagtgcaggacctaccatgatgtgatccccatcagctgcctgacagagttccccaacgtggtgcagatggccaagctggtgtgtgaagatgtgaatgtggaccgcttctaccctgtgctgtaccccaaggccagccggctgattgtgacctttgatgaacatgtgatcagcaacaacttcaagtttggagtcatctaccagaagctgggccagaccagcgaggaggagctgttcagcaccaatgaggagagccctgcctttgtggagttcctggagttcctgggccagaaggtgaagctgcaggacttcaagggcttccggggcggcctggatgtgacccacggccagacaggaacagagagcgtgtactgcaacttcaggaacaaggagatcatgtttcatgtgtccaccaagctgccctacacagaaggagatgcccagcagctgcagaggaagaggcacatcggaaatgacatcgtggccgtggtgttccaggatgagaacaccccatttgtgcctgacatgattgccagcaacttcctgcacgcctacgtggtggtgcaggccgagggcggcggcccagatggccccctgtacaaggtgtctgtgacagccagagatgatgtgcccttctttggaccacccctgcctgaccctgctgtgttcagaaaaggacctgagttccaggagttcctgctgaccaagctgatcaatgcagaatatgcctgctacaaggccgagaagtttgccaagctggaggagaggaccagggctgccctgctggagaccctgtatgaggagctgcacatccacagccagagcatgatgggcctgggcggagatgaggacaagatggagaatggcagcggcggcggcggcttctttgagagcttcaagagggtcatccgcagccgcagccagagcatggatgccatgggcctgagcaacaagaagcccaacacagtgtccaccagccacagcggcagctttgcccccaacaacccagacctggccaaggccgccggcatcagcctgattgtgcctgggaagagccccaccaggaagaagagcggccccttcggcagccgccgcagcagcgccatcggcatcgagaacatccaggaggtgcaggagaagcgggagagccccccagctggccagaagaccccagattctggccacgtgtcccaggagcccaagtctgagaacagcagcacccagagcagccctgagatgcccaccaccaagaacagagctgagacagctgcccagagagctgaggccctgaaggacttcagccgcagcagcagcagcgccagcagctttgcctctgtggtggaggagacagagggcgtggatggagaggacaccggcctgcacgtggccggcggccagtgccagcaccactag

SEQ ID NO: 21792 - DNA, 177 bp, synthetic construct
  source 1..177: mol_type = other DNA; note = Synthetic coding sequence
atgggccgggtgtgggacctgcccggggtgctgaaggtggagggcttccgggccaccatggcccagaggctggtgcgggtgctgcagatctgtgccggccacgtgcctggggtgtctgccctgaacctgctgagcctgctgcggagcagcgagggccccagcctggaggacctgtag

SEQ ID NO: 21793 - DNA, 2199 bp, synthetic construct
  source 1..2199: mol_type = other DNA; note = Synthetic coding sequence
atgctgccctgtgccgccggggcccggggccgcggggccatggtggtgctgcgggccggcaagaagaccttcctgccccccctgtgccgggcctttgcctgccggggctgccagctggcccctgagagaggagctgagcggcgggacacagcccccagcggcgtgagccgcttctgcccccccaggaagagctgccacgactggattggccccccagacaagtacagcaacctgcggcctgtgcacttctacatcccagaaaatgaaagccccctggagcagaagctgaggaagctgcggcaggagacccaggagtggaaccagcagttctgggccaaccagaacctgaccttcagcaaggagaaggaggagttcatccacagccggctgaagaccaagggcctgggcctgaggacagaaagtggccagaaggccaccctgaatgctgaggagatggctgacttctacaaggagttcctgagcaagaacttccagaagcacatgtactacaacaggatgtatgacaacatgagcaccatggtgtacatcaaggaggacaagctggagaagctgacccaggatgagatcatcagcaagaccaagcaggtgatccagggcctggaggccctgaagaatgagcacaacagcatcctgcagagcctgctggagaccctgaagtgcctgaagaaggatgatgagagcaacctggtggaggagaagagcaacatgatcaggaagagcctggagatgctggagctgggcctgtctgaggcccaggtgatgatggccctgagcaaccacctgaatgctgtggagagcgagaagcagaagctgcgggcccaggtgcggcggctgtgccaggagaaccagtggctgagagatgagctggccaacacccagcagaagctgcagaagtctgagcagagcgtggcccagctggaggaggagaagaagcacctggagttcatgaaccagctgaagaagtatgatgatgacatcagccccagcgaggacaaggacacagacagcaccaaggagcccctggatgacctcttccccaatgatgaagatgatcctggccagggcatccagcagcagcacagcagcgctgctgctgctgcccagcagggcggctatgagatcccagcccggctgcggaccctgcacaacctggtgatccagtatgccagccagggccgctatgaggtggccgtgcccctgtgcaagcaggccctggaggacctggagaagaccagcggccatgaccacccagatgtggccaccatgctgaacatcctggccctggtgtacagagaccagaacaagtacaaggatgctgccaacctgctgaatgatgccctggccatccgggagaagaccctgggcaaggaccaccctgctgtggccgccaccctgaacaacctggccgtgctgtatggcaagaggggcaagtacaaggaggccgagcccctgtgcaagagggccctggagatccgggagaaggtgctgggcaaggaccacccagatgtggccaagcagctgaacaacctggccctgctgtgccagaaccagggcaagtatgaggaggtggagtactactaccagagggccctggagatctaccagaccaagctgggcccagatgaccccaacgtggccaagaccaagaacaacctggccagctgctacctgaagcagggcaagttcaagcaggccgagaccctgtacaaggagatcctgacccgggcccacgagcgggagtttggatctgtggatgatgagaacaagcccatctggatgcacgccgaggagcgggaggagtgcaagggcaagcagaaggatggcaccagctttggagaatatggaggctggtacaaggcctgcaaggtggacagccccaccgtgaccaccaccctgaagaacctgggcgccctgtaccgccggcagggcaagtttgaggccgctgagaccctggaggaggccgccatgaggagcaggaagcagggcctggacaacgtgcacaagcagagggtggccgaggtgctgaatgaccctgagaacatggagaagagaagaagccgggagagcctgaatgtggatgtggtgaagtatgagagcggcccagatggaggagaggaggtgtccatgtctgtggagtggaatggcatgaggaagatgaagctgggcctggtgaactag

SEQ ID NO: 21794 - DNA, 249 bp, synthetic construct
  source 1..249: mol_type = other DNA; note = Synthetic coding sequence
atgagcggcctggtgctgggccagagagatgagcctgctggccaccggctgagccaggaggagatcctgggcagcacccggctggtgtcccagggcctggaggccctgcggtctgagcaccaggccgtgctgcagagcctgagccagaccatcgagtgcctgcagcagggcggccacgaggagggcctggtgcatgagaaggcccggcagctgcggcgctccatggagaacatcgagctgggcctgtag

SEQ ID NO: 21795 - DNA, 222 bp, synthetic construct
  source 1..222: mol_type = other DNA; note = Synthetic coding sequence
atggtgctgatcctgggccgccgcctgaaccgggaggacctgggcgtgcgggacagccctgccaccaagaggaaggtgtttgagatggaccccaagagcctgactggacatgagttctttgacttcagcagcggcagcagccatgctgagaacatcctgcagatcttcaatgagttccgggacagccgcctcttcacagatgtgatcatctgtgtggagtag

SEQ ID NO: 21796 - DNA, 1191 bp, synthetic construct
  source 1..1191: mol_type = other DNA; note = Synthetic coding sequence
atgaacttccaggccggcggcggccagagcccccagcagcagcagagcctggccgcccctgggggcggcggggccgccgcccagcagctggtgtgtggcggccagtttggaggagctggccctggagctgggggcggcggcggccccagccagcagctggccggcggccccccccagcagtttgccctgagcaacagcgctgccatccgggcagagatccagagatttgagagcgtgcaccccaacatctatgccatctatgacctgattgaaagaattgaggacctggccctgcagaaccagatccgggagcacgtgatcagcattgaggacagctttgtgaacagccaggagtggaccctgagccgctctgtgcctgagctgaaggtgggcatcgtgggcaacctgagcagcggcaagagcgccctggtgcaccgctacctgaccggcacctacgtgcaggaggagagccctgagggcggccgcttcaagaaggagatcgtggtggatggccagagctacctgctgctgatcagagatgagggcggccccccagagctgcagtttgctgcctgggtggatgctgtggtgtttgtgttcagcctggaggatgagatctccttccagacagtgtacaactacttcctgcggctgtgcagcttcagaaatgccagcgaggtgcccatggtgctggtgggcacccaggatgccatctctgctgccaacccccgggtgattgatgacagccgggccaggaagctgagcacagacctgaagcgctgcacctactatgagacctgtgccacctacggcctgaatgtggagagggtcttccaggatgtggcccagaaggtggtggccctgaggaagaagcagcagctggccatcggcccctgcaagagcctgcccaacagccccagccacagcgctgtgtctgctgccagcatcccagctgtgcacatcaaccaggccaccaacggcggcggcagcgccttcagtgactacagcagctctgtgcccagcacccccagcatcagccagcgggagctgcgcatcgagaccatcgccgccagcagcacccccacccccatcaggaagcagagcaagaggaggagcaacatcttcaccatctgtgccaccgtgagcaacttcagcagcaccaagaggcccttccagctgctgcccaactag

SEQ ID NO: 21797 - DNA, 1110 bp, synthetic construct
  source 1..1110: mol_type = other DNA; note = Synthetic coding sequence
atggacagctgcctgatggtgtggcacatgaagccccagagccgggcctaccgcttcaccggccacaaggatgctgtgacctgtgtgaacttcagccccagcggccacctgctggccagcggcagccgggacaagacagtgcgcatctgggtgcccaacgtgaagggggagagcacagtgttccgggcccacacagccaccgtgcgctctgtgcacttctgcagtgatggccagagctttgtgacagccagtgatgacaagacagtgaaggtgtgggccacccaccggcagaagttcctgttcagcctgagccagcacatcaactgggtgcgctgtgccaagttctccccagatggccgcctcatcgtgtctgccagtgatgacaagacagtgaagctgtgggacaagagcagccgggagtgtgtgcacagctactgtgagcacggcggctttgtgacctacgtggacttccaccccagcggcacctgcatcgctgctgctggcatggacaacacagtgaaggtgtgggatgtgaggacccaccggctgctgcagcactaccagctgcacagcgctgctgtgaatggcctgtccttccaccccagcggcaactacctgatcacagccagcagtgacagcaccctgaagatcctggacctgatggagggccgcctgctgtacaccctgcacggccaccagggccctgccaccaccgtggccttcagcaggactggagagtactttgccagcggcggcagtgatgagcaggtgatggtgtggaagagcaactttgacatcgtggaccatggagaggtgaccaaggtgccccggcccccagccaccctggccagctccatgggcaacctgcctgaggtggacttccctgtgcccccaggccggggccgctctgtggagagcgtgcagagccagccccaggagcctgtgtctgtgccccagaccctgaccagcaccctggagcacatcgtgggccagctggatgtgctgacccagacagtgtccatcctggagcagaggctgaccctgacagaggacaagctgaagcagtgcctggagaaccagcagctgatcatgcagagggccaccccctag

SEQ ID NO: 21798 - DNA, 312 bp, synthetic construct; identical to SEQ ID NO: 21772
  source 1..312: mol_type = other DNA; note = Synthetic coding sequence

SEQ ID NO: 21799 - DNA, 270 bp, synthetic construct; identical to SEQ ID NO: 20498
  source 1..270: mol_type = other DNA; note = Synthetic coding sequence

SEQ ID NO: 21800 - DNA, 1140 bp, synthetic construct
  source 1..1140: mol_type = other DNA; note = Synthetic coding sequence
atgtggcacctggactttggcctgcacacaggcaagaccttccagcccctgcccttcatcatcgtggtgtacccaggagctggaagacgctggggcctggtgctgagcctggccagccacagaagaagaacagaggccggcggcggcaccggccccaccagtgacaccggctggggctgcatgctgcgctgtggccagatgatctttgcccaggccctggtgtgccgccacctgggccgggactggcgctggacccagaggaagaggcagcctgacagctacttctctgtgctgaatgccttcatcgacaggaaggacagctactacagcatccaccagatcgcccagatgggcgtgggggagggcaagagcatcggccagtggtacggccccaacacagtggcccaggtgctgaagaagctggccgtgtttgacacctggagcagcctggccgtgcacatcgccatggacaacacagtggtgatggaggagatccggcggctgtgcaggacctctgtgccctgtgccggggccacagccttccctgctgacagcgacagacactgcaatggcttccctgctggagctgaggtgaccaaccggcccagcccctggaggcccctggtgctgctgatccccctgcggctgggcctgacagacatcaatgaggcctacgtggagaccctgaagcactgcttcatgatgccccagagcctgggcgtcatcggcggcaagcccaacagcgcccactacttcatcggctacgtgggggaggagctgatctacctggacccccacaccacccagcctgctgtggagcccacagatggctgcttcatcccagatgagagcttccactgccagcaccccccctgcaggatgagcattgctgagctggaccccagcattgctgtgggcttcttctgcaagacagaagatgacttcaatgactggtgccagcaggtgaagaagctgagcctgctgggcggggccctgcccatgtttgagctggtggagctgcagcccagccacctggcctgcccagatgtgctgaacctgagcctggacagcagtgatgtggagcggctggagcgcttctttgattctgaagatgaggactttgagatcctgagcctgtag

SEQ ID NO: 21801 - DNA, 1683 bp, synthetic construct; identical to SEQ ID NO: 20948
  source 1..1683: mol_type = other DNA; note = Synthetic coding sequence

SEQ ID NO: 21802 - DNA, 330 bp, synthetic construct
  source 1..330: mol_type = other DNA; note = Synthetic coding sequence
atgaacccagccagcgcccccccacccctgcccccacctggccagcaggtgattcatgtgacccaggacctggacacagacctggaggccctcttcaacagcgtgatgaaccccaagcccagctcctggaggaagaagatcctgcctgagagcttcttcaaggagccagacagcggcagccacagccggcagagcagcacagacagcagcggcggccaccctggcccccggctggccggcggggcccagcacgtgcgcagccacagcagccctgccagcctgcagctgggcaccggggccggggctgctggcagccctgcccagcagtag

SEQ ID NO: 21803 - DNA, 609 bp, synthetic construct
  source 1..609: mol_type = other DNA; note = Synthetic coding sequence
atgggcagcaggaagaaggagatcgccctgcaggtgaacatcagcacccaggagctgtgggaggagatgctgagcagcaagggcctgactgtggtggatgtgtaccagggctggtgtggcccctgcaagcctgtggtgtccctcttccagaagatgagaattgaggtgggcctggacctgctgcactttgccctggccgaggccgaccggctggatgtgctggagaagtaccggggcaaatgtgagcccaccttcctgttctacgccggcggggagctggtggccgtggtgcggggggccaatgcccccctgctgcagaagaccatcctggaccagctggaggccgagaagaaggtgctggccgagggccgggagaggaaggtgatcaaggatgaggccctgagtgatgaagatgaatgtgtgagccacggcaagaacaatggagaagatgaggacatggtgagcagcgagaggacctgcaccctggccatcatcaagccagatgctgtggcccacggcaagacagatgagatcatcatgaagatccaggaggccggctttgagatcctgaccaatgaggagaggaccatgacagaggccgaggtgtag

SEQ ID NO: 21804 - DNA, 195 bp, synthetic construct
  source 1..195: mol_type = other DNA; note = Synthetic coding sequence
atggccccccagaaggacaggaagcccaagaggagcacctggaggttcaacctggacctgacccaccctgtggaggatggcatctttgattctggcaactttggcaccttccccagcgagtacctgggcttcagcagcctggtgctgcacttcttctgcttcaagatcggggccatcagcactggagagggctag

SEQ ID NO: 21805 - DNA, 372 bp, synthetic construct
  source 1..372: mol_type = other DNA; note = Synthetic coding sequence
atggagaacctgcagaccaacttcagcctggtgcagggcagcaccaagaagctgaatggcatgggagatgatggcagccccccagccaagaagatgatcacagacatccacgccaacgggaagaccatcaacaaggtgcccaccgtgaagaaggagcacctggatgattatggagaggcccctgtggagacagatggagagcacgtgaagaggacctgcacctctgtgcctgagaccctgcacctgaaccccagcctgaagcacaccctggcccagttccacctgagcagccagagcagcctgggcggccctgctgccttcagcgcccggcacagccaggagagcatgagccccaccgtcttcctgccctag

SEQ ID NO: 21806 - DNA, 201 bp, synthetic construct
  source 1..201: mol_type = other DNA; note = Synthetic coding sequence
atgaaccccagcatgaagcagaagcaggaggagatcaaggagaacatcaagaacagctctgtgcccaggaggaccctgaagatgatccagcccagcgccagcggcagcctggtgggcagagaaaatgagctgtctgctggcctgagcaagaggaagcacagaaatgaccacctgaccagcaccaccagcagccctggatag

SEQ ID NO: 21807 - DNA, 1614 bp, synthetic construct
  source 1..1614: mol_type = other DNA; note = Synthetic coding sequence
atggtgctgatcctgggccgccgcctgaaccgggaggacctgggcgtgcgggacagccctgccaccaagaggaaggtgtttgagatggaccccaagagcctgactggacatgagttctttgacttcagcagcggcagcagccatgctgagaacatcctgcagatcttcaatgagttccgggacagccgcctcttcacagatgtgatcatctgtgtggagggcaaggagttcccctgccacagagctgtgctgagcgcctgcagcagctacttccgggccatgttctgcaatgaccaccgggagagccgggagatgctggtggagatcaatggcatcctggccgaggccatggagtgcttcctgcagtatgtgtacaccgggaaggtgaagatcaccacagaaaatgtgcagtacctgtttgagaccagcagcctcttccagatctctgtgctgagagatgcctgtgccaagttcctggaggagcagctggacccctgcaactgcctgggcatccagagatttgctgacacccacagcctgaagaccctcttcaccaagtgcaagaactttgccctgcagacctttgaagatgtgtcccagcacgaggagttcctggagctggacaaggatgagctgattgactacatctgcagtgatgagctggtgattggcaaggaggagatggtgtttgaggccgtgatgcgctgggtgtacagagctgtggacctgcggcggcccctgctgcacgagctgctgacccacgtgcggctgcccctgctgcaccccaactactttgtgcagacagtggaggtggaccagctgatccagaacagccctgagtgctaccagctgctgcacgaggcccggcgctaccacatcctgggcaatgagatgatgagccccaggacccggccccggcgcagcacaggctacagcgaggtgattgtggtggtgggcggctgtgagcgggtgggcggcttcaacctgccctacacagaatgttatgaccctgtgactggagagtggaagagcctggccaagctgcctgagttcaccaagtcagaatatgctgtgtgtgccctgagaaatgacatcctggtgtctgggggccgcatcaacagcagagatgtgtggatctacaacagccagctgaacatctggatccgggtggccagcctgaacaagggccgctggaggcacaagatggctgtgctgctgggcaaggtgtatgtggtgggcggctatgatggccagaaccggctgagctctgtggagtgctatgacagcttcagcaaccgctggacagaggtggcccccctgaaggaggccgtgagcagccctgctgtgaccagctgtgtgggcaagctgtttgtgattggaggcggcccagatgacaacacctgcagcgacaaggtgcagagctatgaccctgagaccaacagctggctgctgcgggccgccatccccatcgccaagcgctgcatcacagctgtgtccctgaacaacctgatctacgtggccggcggcctgaccaaggccatctactgctatgaccctgtggaggactactggatgcacgtgcagaacaccttcagccggcaggtgatcacctag

SEQ ID NO: 21808 - DNA, 1611 bp, synthetic construct
  source 1..1611: mol_type = other DNA; note = Synthetic coding sequence
atgaggctggaggagctgaagaggctgcagaaccccctggagcaggtgaatgatggcaagtacagctttgagaacatccagagggcctggagggagtacctgcagaggcaggagcccctgggcaagaggagccccagccccccatctgtgagcagcgagaagctgagcagctctgtgtccatgaacaccttcagtgacagcagcaccccagactaccgggaggatggcatggacctgggcagtgatgctggcagcagcagcagcagcagccgggccagcagccagagcaacagcaccaaggtgaccccctgcagcgagtgcaagagcagcagcagccctgggggcagcctggacctggtgtctgccctggaggactatgaggagcccttccctgtgtaccagaagaaggtgattgatgagtgggccccagaagaagatggagaggaggaggaggaggaggatgagcgggaccagaggggctacagagatgacaggagccctgcccgggagcctggagatgtgtctgcccggaccaggtctgggggcggcggcggccgcagcgccaccacagccatgcctcctcctgtgcccaacggcaacctgcaccagcacgacccccaggacctgcggcacaatggaaatgtggtggtggccggccggcccagctgcagccggggcccccggcgggccatccagaagccccagcctgctgggggccgccgcagcggccggggccctgctgctgggggcctgtgcctgcagcccccagatggcggcacctgtgtgcctgaggagccccctgtgccccccatggactgggaggccctggagaagcacctggccggcctgcagttccgggagcaggaggtgaggaaccagggccaggcccggaccaacagcaccagcgcccagaagaatgaaagagagagcatccggcagaagctggccctgggcagcttctttgatgatggccctggcatctacaccagctgcagcaagagcggcaagcccagcctgagcagccggctgcagagcggcatgaacctgcagatctgctttgtgaatgattctggcagtgacaaggacagtgatgctgatgacagcaagacagagaccagcctggacacccccctgagccccatgagcaagcagagcagcagctacagcgaccgggacaccacagaggaggagagcgagagcctggatgacatggacttcctgacccggcagaagaagctgcaggccgaggccaagatggccctggccatggccaagcccatggccaagatgcaggtggaggtggagaagcagaacaggaagaagagccctgtggccgacctgctgccccacatgccccacatcagcgagtgcctgatgaagaggagcctgaagcccacagacctgcgggacatgaccatcggccagctgcaggtgattgtgaatgacctgcacagccagatcgagagcctgaatgaggagctggtgcagctgctgctgatcagagatgagctgcacacagagcaggatgccatgctggtggacatcgaggacctgaccaggcatgctgagagccagcagaagcacatggccgagaagatgcctgccaagtag

SEQ ID NO: 21809 - DNA, 630 bp, synthetic construct
  source 1..630: mol_type = other DNA; note = Synthetic coding sequence
atgtctgaaaatgctgcccctggcctcatcagcgagctgaagctggccgtgccctggggccacatcgccgccaaggcctggggcagcctgcagggcccccctgtgctgtgcctgcacggctggctggacaatgccagcagctttgacaggctcatccccctgctgccccaggacttctactacgtggccatggactttggaggccacggcctgagcagccactacagccctggggtgccctactacctgcagacctttgtgtctgagatcagaagagtggtggccgccctgaagtggaaccgcttcagcatcctgggccacagctttggaggagtggtgggcggcatgttcttctgcaccttccctgagatggtggacaagctgatcctgctggacacccccctcttcctgctggagagtgatgagatggagaacctgctgacctacaagagaagagccatcgagcacgtgctgcaggtggaggccagccaggagcccagccacgtgttcagcctgaagcagctgctgcagaggctgctgaagagcaacagccacctgtctgaagaatgtggggagctgctgctgcagaggggcaccaccaaggtggccaccggccgggagcagcactag

SEQ ID NO: 21810 - DNA, 201 bp, synthetic construct
  source 1..201: mol_type = other DNA; note = Synthetic coding sequence
atgcctgaggaccaggtgggcaagctggaggccacagagaacaccatcagcgccatggctgctgctgctgctgagcagcagcagttctacctgctgctgggcaacctgctgagcccagacaacgtggtgaggaagcaggccgaggagacctatgagaacatccctggccagagcaagatcaccttcctgctgcaggcctag

SEQ ID NO: 21811 - DNA, 2061 bp, synthetic construct
  source 1..2061: mol_type = other DNA; note = Synthetic coding sequence
atggccatcagccagcaccagttctacctggacaggaagcagagcaaggccaagatccccagcgcccggagcctggatgagatcgccatggacctgacagaaacaggcacccagagggccagcaagctggtgaccctggagaccaagagccagttcatcatggccagcaatggcagcctcatcagcagcggcagccaggacagcgaggtgtctgaggagcagaagcgggagaagatcctggagctgaagaagaaggagaagctgctgcaggagaagctgctgaagaaggtggaggagctgaagaagatctgcctgcgggaggccgagctgaccgggaagatgcccaaggagtaccccctgaacatcggggagaagccaccccaggtgagaagaagagtgggcacagccttcaagctggatgacaacctgctgcccagcgaggaggaccctgccctgcaggagctggagagcaacttcctgatccagcagaagctggtggaggccgccaagaagctggccaatgaaccagacctgtgcaagacagtgaagaagaagaggaagcaggactacacagatgccatgaagaagctgcaggagattgaaaatgccatcaatgagtaccgcatccgctgtgggaagaagcccagccagaaggccaccgtgctgcctgaggacatcatccccagcgagagcagcagcctgagtgacaccaccacctatgatgaccccagtgatgccttcaccttccctggccagaggagcagctctgtgccccacagcccccgcatcctgccccccaagagcctgggcatcgagcgcatccacttcaggaagagcagcatcaatgagcagtttgtggacacccggcagagccgggagatgctgagcacccacagcagcccctacaagaccctggagcggcggccccagggcggccgctccatgcccaccacccctgtgctgaccagaaatgcctacagcagcagccacctggagcctgagagcagcagccagcactgccggcagaggagcggcagcctggagagccagagccacctgctgtctgagatggacagcgacaagcccttcttcagcctgagcaagagccagaggagcagcagcacagagatcctggatgatggcagcagctacaccagccagagcagcacagagtactactgtgtgacccctgtgacaggcccctactacaccacccagaccctggacaccaggacccggggcagaagaagaagcaagaagcagaatgtgtccaccagcaacagcggctccatgcccaacctggcccagaaggacagcctgagaaatggagtgtacagcaagagccaggagccccccagcagcagctactacatcgccggctacaccccctatgcagaatgtgacttctactacagcggcggctacgtgtatgaaaatgacacagagggccagtacagcgtgaaccccagctaccgcagcagcgcccactacggctatgagcggcagagggactacagccgctccttccatgaagatgaggtggacagagtgccccacaacccctatgccaccctgcggctgcccaggaaggccgccgccaagtctgagcacatcaccaagaacatccacaaggccctggtggccgagcacctgcggggctggtaccagagggccagcggccagaaggaccagggccacagcccccagaccagctttgacagcgaccggggcagccagcgctgcctgggctttgctggcctgcaggtgccctgcagccccagcagccgggccagcagctacagctctgtgagcagcaccaatgccagcggcaactggaggacccagctgaccatcggcctgagtgactatgagaccccagcccacagcagctacaccagctgctatggaaatgtgtacaaccccctgcccagccccagccggcagtacacagagatcagccagctggatggaacagatggcaaccagctggaggacaacctggagagcagcgagcagaggctcttctggcatgaggacagcaagccaggcaccctggtgtag

SEQ ID NO: 21812 - DNA, 219 bp, synthetic construct
  source 1..219: mol_type = other DNA; note = Synthetic coding sequence
atgatggaggagatcagcatcatggtggcctatgatgcccacgtgttcagccagctgcatgatgaggacttcctgaccagcctggtggccatcagcaagcccaggtccatggtgcccaccaagaagctgaagaagtatgagaaggagtaccagaccatgagggagagccagctgcagcaggaggaccccatggaccgctacaagtttgtgtacctgtag

SEQ ID NO: 21813 - DNA, 1965 bp, synthetic construct
  source 1..1965: mol_type = other DNA; note = Synthetic coding sequence
atggacagcctgcctgatgagttctttgtgcgccaccctgctgtggaggaccagaggaaggaggagacagagaacaagctggagaagagcagcggccagctgaacaagcaggagaatgacatccccacagacctggtgcctgtgaacctgctgctggaggtgaagaagctgctgaatgccatcaacaccctgcccaagggcgtggtgccccacatcaagaagttcctgcaggaggacttctccttccagaccatgcagcgggaggtggccgccaacagccagaatggagaggagatcgtgcctgccctgaccctgcgcttcctgatcacccagctggaggccgccctgaggaacatccaggccggcaactacacagcccaccagatcaacatcggctactacctgaccctgctcttcctgtatggagtggccctgacagagcggggcaagaaggaggactacacagaagctgagaacaagttcctggtgatgaagatgatgatccaggagaatgagatctgtgagaacttcatgagcctggtgtacttcggccggggcctgctgcgctgtgcccagaagcgctacaacggcggcctgctggagttccacaagagcctgcaggagattggagacaagaatgaccactggtttgatattgaccccacagaagatgaggacctgcccaccaccttcaaggacctgctgaacaacttcatcaagaccacagagagcaacatcatgaagcagaccatctgcagctacctggactgtgagaggagctgtgaggccgacatcctgaagaacaccagctacaagggcttcttccagctgatgtgcagcaagagctgctgcgtgtacttccacaagatctgctggaagaagttcaagaacctgaagtacccaggagaaaatgaccagagcttcagcggcaagaagtgcctgaaggagggctgcacaggagacatggtgaggatgctgcagtgtgatgtgcccggcatcgtgaagatcctgtttgaggtggtgaggaaggatgagtacatcaccatcgagaacctgggcgccagctacaggaagctgatcagcctgaagatcacagacacagacatccggcccaagatcagcctgaagttcaacaccaaggatgagatgcccatcttcaagctggactacaactacttctaccacctgctgcacatcatcatcatctctggaacagacatcgtgcggcagatctttgatgaggccatgcccccacccctgctgaagaaggagctgctgatccacaagaatgtgctggagagctactacaaccacctgtggaccaaccaccccctgggcggctcctggcacctgctgtacccacccaacaaggagctgccccagagcaagcagtttgacctgtgcctgctgctggccctgatcaagcacctgaatgtgtttcctgcccccaagaagggctggaacatggagccccccagcagtgacatcagcaagtctgctgacatcctgcggctgtgcaagtacagagacatcctgctgtctgagatcctgatgaatggcctgacagagagccagttcaacagcatctggaagaaggtgtctgacatcctgctgcggctgggcatgatgcaggaggacatcgacaaggtgaaggagaaccccatcgagaacatcagcctggactaccaccagctgtctgtgtacctgggcatccctgtgcctgagatcatccagaggatgctgagctgctaccagcagggcatcgccctgcagagcatcaccggcagccagagaattgaaattgaggagctgcagaatgaggaggaggagctgagcccccccctgatggagtacaacatcaacgtgaagagccaccctgagatccagtttgctgagatcaacaaggatggcaccagcatccccagcgagagcagcacagagagcctgaaggacctgcaggagtag

SEQ ID NO: 21814 - DNA, 570 bp, synthetic construct
  source 1..570: mol_type = other DNA; note = Synthetic coding sequence
atgaacccagccagcgcccccccacccctgcccccacctggccagcaggtgattcatgtgacccaggacctggacacagacctggaggccctcttcaacagcgtgatgaaccccaagcccagctcctggaggaagaagatcctgcctgagagcttcttcaaggagccagacagcggcagccacagccggcagagcagcacagacagcagcggcggccaccctggcccccggctggccggcggggcccagcacgtgcgcagccacagcagccctgccagcctgcagctgggcaccggggccggggctgctggcagccctgcccagcagcacgcccacctgcggcagcagagctatgatgtgacagatgagctgcccctgcccccaggctgggagatgaccttcaccgccaccggccagcgctacttcctgaaccacatcgagaagatcaccacctggcaggaccccaggaaggccatgaaccagcccctgaaccacatgaacctgcaccctgctgtgagcagcacccctgtgccccagaggtccatggctgtgtcccagcccaacctgtag

SEQ ID NO: 21815 - DNA, 849 bp, synthetic construct
  source 1..849: mol_type = other DNA; note = Synthetic coding sequence
atgggccccctgcccaggacagtggagctgttctatgatgtgctgagcccctacagctggctgggctttgagatcctgtgccgctaccagaacatctggaacatcaacctgcagctgcggcccagcctcatcaccggcatcatgaaggacagcggcaacaagcccccaggcctgctgcccaggaagggcctgtacatggccaatgacctgaagctgctgcggcaccacctgcagatccccatccacttccccaaggacttcctgtctgtgatgctggagaagggcagcctgagcgccatgaggttcctgacagctgtgaacctggagcaccctgagatgctggagaaggccagccgggagctgtggatgagggtgtggagccgggtgtctgtgggcctgtgggagagcagcggccgcaccctggatgacttcctgaccttccccaggcatgtgttccgggtgatgatcctgcccccacctgggggcagcacagtgctgcctgtgacccccctgagcccccaccggctgcctgctgtgttcagcagcagccagaatgaagacatcacagagccccagagcatcctggccgctgctgagaaggccggcatgtctgctgagcaggcccagggcctgctggagaagatcgccacccccaaggtgaagaaccagctgaaggagaccacagaggccgcctgccgctacggggccttcggcctgcccatcaccgtggcccacgtggatggccagacccacatgctgtttggaagtgacaggatggagctgctggcccacctgctgggggagaagtggatgggccccatccccccagctgtgaatgcccggctgtag

SEQ ID NO: 21816 - DNA, 1221 bp, synthetic construct
  source 1..1221: mol_type = other DNA; note = Synthetic coding sequence
atggaccagctggagaatgccaagatggagcacaccaatgccagctttgacaccttcttctgtgagaccagggctgggaagcacgtgccccgggccctgtttgtggacctggagcccaccgtgattgatggcatcagaacaggccagcacaggagcctcttccaccctgagcagctgctgagcggcaaggaggatgctgccaacaactatgcccggggccgctacagcgtgggcagcgaggtgattgacctggtgctggagaggaccaggaagctggccgagcagtgtggcggcctgcagggcttcctgatcttccgcagctttggaggcggcaccggcagcggcttcaccagcctgctgatggagcggctgactggagagtacagcaggaagaccaagctggagttctctgtgtacccagccccccgcatcagcacagctgtggtggagccctacaacagcgtgctgaccacccacagcaccacagagcacacagactgcaccttcatggtggacaatgaagctgtgtatgacatctgccacaggaagctgggcgtggagtgccccagccacgccagcatcaaccggctggtggtgcaggtggtgagcagcatcacagccagcctgcgctttgagggccccctgaatgtggacctgattgagttccagaccaacctggtgccctacccccgcatccacttccccatgacagcctttgcccccatcgtgtctgctgacaaggcctaccacgagcagttctctgtgtctgacatcaccacagcctgctttgagagcagcaaccagctggtgaagtgtgacccccggctgggcaagtacatggcctgctgcctgctgtacagaggagatgtggtgcccaaggaggtgaatgctgccatcgccgccaccaagagccgccacagcgtgcagtttgtggactggtgccccaccggcttcaaggtgggcatcaacaaccggccccccaccgtgatgcctggaggagacctggccaaggtgcacaggagcatctgcatgctgagcaacaccacagccatcgtggaggcctgggcccggctggaccacaagtttgacctgatgtatgccaagagggccttcctgcactggtacctgcgggagggcatggaggaggccgagttcctggaggcccgggaggacctggccgccctggagcgggactatgaggaggtggcccagagcttctag

SEQ ID NO: 21817 - DNA, 1860 bp, synthetic construct; identical to SEQ ID NO: 19352
  source 1..1860: mol_type = other DNA; note = Synthetic coding sequence

SEQ ID NO: 21818 - DNA, 294 bp, synthetic construct; identical to SEQ ID NO: 21555
  source 1..294: mol_type = other DNA; note = Synthetic coding sequence

SEQ ID NO: 21819 - DNA, 387 bp, synthetic construct
  source 1..387: mol_type = other DNA; note = Synthetic coding sequence
atgacagacctggtggccgtgtgggatgtggccctgagtgatggagtgcacaagattgaatttgaacatggcaccaccagcggcaagagggtggtgtatgtggatggcaaggaggagatcaggaaggagtggatgttcaagctggtgggcaaggagaccttctacgtgggcgccgccaagaccaaggccaccatcaacattgatgccatcagcggctttgcctatgagtacaccctggagatcaacgggaagagcctgaagaagtacatggaggacaggagcaagaccaccaacacctgggtgctgcacatggatggagagaacttcagaattgtgctggagaaggatgccatggatgtgtggtgcaatggcaagaagctggagtag

SEQ ID NO: 21820 - DNA, 879 bp, synthetic construct
  source 1..879: mol_type = other DNA; note = Synthetic coding sequence
atgacagtgtccaagttcatggccatccagaaggccctgcagcctgactggttccagtgcctgagtgatggagaggtgtcctgcaaggaggccaccagcatcaagagggtgaggaagtctgtggacaggagcctgctcttcctggacaactgcctgcggctgcaggaggagagcgaggtgctgcagaagagcgtcatcattggagtcatcgagggcggagatgtgatggaggagcggctgcggagcgcccgggagacagccaagaggcctgtgggcggcttcctgctggatggcttccagggcaaccccaccaccctggaggcccggctgcggctgctgagctctgtgacagctgagctgcctgaggacaagcccaggctcatctctggagtgtccaggccagatgaggtgctggagtgcatcgagcggggcgtggacctgtttgagagcttcttcccctaccaggtgacagagcggggctgtgccctgaccttctcctttgactaccagcccaaccctgaggagaccctgctgcagcagaatggcacccaggaggagatcaagtgcatggaccagatcaagaagattgagaccaccggctgcaaccaggagatcaccagctttgagatcaacctgaaggagaagaagtaccaggaggacttcaaccccctggtgcggggctgcagctgctactgctgcaagaaccacacccgggcctacatccaccacctgctggtgaccaatgagctgctggccggcgtgctgctgatgatgcacaactttgagcactacttcggcttcttccactacatccgggaggccctgaagagtgacaagctggcccagctgaaggagctgatccaccggcaggccagctag

SEQ ID NO: 21821 - DNA, 600 bp, synthetic construct; identical to SEQ ID NO: 18542
  source 1..600: mol_type = other DNA; note = Synthetic coding sequence

SEQ ID NO: 21822 - DNA, 354 bp, synthetic construct
  source 1..354: mol_type = other DNA; note = Synthetic coding sequence
atgcctgaggaccaggtgggcaagctggaggccacagagaacaccatcagcgccatggctgctgctgctgctgagcagcagcagttctacctgctgctgggcaacctgctgagcccagacaacgtggtgaggaagcaggccgaggagacctatgagaacatccctggccagagcaagatcaccttcctgctgcaggccatccggaacaccacagctgctgaggaggcccggcagatggctgctgtgctgctgcggcggctgctgagcagcgcctttgatgaggtgtacccagccctgcccagtgatgtgcagacagccatcaagtctgagctgctgatgatcatccagatgtag

SEQ ID NO: 21823 - DNA, 888 bp, synthetic construct
  source 1..888: mol_type = other DNA; note = Synthetic coding sequence
tgaaccaagctggccaccggcagcaaggacaccaccgtcatcatctggcaggtggaccctgacacccacctgctgaagctgctgaagaccctggagggccacgcctacggcgtgtcctacatcgcctggagcccagatgacaactacctggtggcctgtggcccagatgactgcagcgagctgtggctgtggaatgtgcagacaggagagctgcggaccaagatgagccagagccatgaggacagcctgacctctgtggcctggaacccagatggcaagagatttgtgactggaggccagaggggccagttctaccagtgtgacctggatggcaacctgctggacagctgggagggcgtgcgggtgcagtgcctgtggtgcctgagtgatggcaagacagtgctggccagtgacacccaccagaggatccggggctacaactttgaggacctgacagacaggaacatcgtgcaggaggaccaccccatcatgtccttcaccatcagcaagaatggccgcctggccctgctgaatgtggccacccagggcgtgcacctgtgggacctgcaggacagagtgctggtgaggaagtaccagggcgtgacccagggcttctacaccatccacagctgcttcggcggccacaatgaagacttcatcgccagcggcagcgaggaccacaaggtgtacatctggcacaagaggtctgagctgcccatcgccgagctgaccggccacaccaggacagtgaactgtgtgtcctggaacccccagatccccagcatgatggccagcgccagtgatgatggcaccgtgcgcatctggggccctgcccccttcatcgaccaccagaacatcgaggaggagtgcagctccatggacagctag

SEQ ID NO: 21824 - DNA, 1053 bp, synthetic construct
  source 1..1053: mol_type = other DNA; note = Synthetic coding sequence
atggcccgctggatccccaccaagaggcagaagtatggagtggccatctacaactacaatgccagccaggatgtggagctgagcctgcagattggagacacagtgcacatcctggagatgtatgagggctggtaccggggctacaccctgcagaacaagagcaagaagggcatcttccctgagacctacatccacctgaaggaggccaccgtggaggacctgggccagcatgaaacagtcatccctggagagctgcccctggtgcaggagctgaccagcaccctgcgggagtgggccgtcatctggaggaagctgtatgtgaacaacaagctgaccctcttccggcagctgcagcagatgacctacagcctgattgagtggaggagccagatcctgagcggcaccctgcccaaggatgagctggccgagctgaagaagaaggtgacagccaagattgaccacggcaacaggatgctgggcctggacctggtggtgagagatgacaatggaaacatcctggaccctgatgagaccagcaccatcgccctcttcaaggcccacgaggtggccagcaagagaattgaggagaagatccaggaggagaagagcatcctgcagaacctggacctgcggggccagagcatcttcagcaccatccacacctacggcctgtatgtgaacttcaagaactttgtgtgcaacattggagaagatgctgagctgttcatggccctgtatgaccctgaccagagcaccttcatcagcgagaactacctgatccgctggggcagcaatggcatgcccaaggagattgagaagctgaacaacctgcaggccgtgttcacagacctgagctccatggacctgatccggccccgggtgtccctggtgtgccagatcgtgcgggtgggccacatggagctgaaggagggcaagaagcacacctgtggcctgcggcggcccttcggcgtggccgtgatggacatcacagacatcatccacggcaaggtggatgatgaggagaagcagcacttcatccccttccagcagtag

SEQ ID NO: 21825 - DNA, 360 bp, synthetic construct
  source 1..360: mol_type = other DNA; note = Synthetic coding sequence
atgcctgaggaccaggtgggcaagctggaggccacagagaacaccatcagcgccatggctgctgctgctgctgagcagcagcagttctacctgctgctgggcaacctgctgagcccagacaacgtggtgaggaagcaggccgaggagacctatgagaacatccctggccagagcaagatcaccttcctgctgcaggccatccggaacaccacagctgctgaggaggcccggcagatggctgctgtgctgctgcggcggctgctgagcagcgcctttgatgaggtgtacccagccctgcccagtgatgtgcagacagccatcaagtctgagctgctgatgatcatccagatggagacctag

SEQ ID NO: 21826 - DNA, 279 bp, synthetic construct
  source 1..279: mol_type = other DNA; note = Synthetic coding sequence
atgagcggcctggtgctgggccagagagatgagcctgctggccaccggctgagccaggaggagatcctgggcagcacccggctggtgtcccagggcctggaggccctgcggtctgagcaccaggccgtgctgcagagcctgagccagaccatcgagtgcctgcagcagggcggccacgaggagggcctggtgcatgagaaggcccggcagctgcggcgctccatggagaacatcgagctgggcctgtctgaggcccaggtgatgctggccctggcctag

SEQ ID NO: 21827 - DNA, 405 bp, synthetic construct
  source 1..405: mol_type = other DNA; note = Synthetic coding sequence
atggtgctgatcctgggccgccgcctgaaccgggaggacctgggcgtgcgggacagccctgccaccaagaggaaggtgtttgagatggaccccaagagcctgactggacatgagttctttgacttcagcagcggcagcagccatgctgagaacatcctgcagatcttcaatgagttccgggacagccgcctcttcacagatgtgatcatctgtgtggagggcaaggagttcccctgccacagagctgtgctgagcgcctgcagcagctacttccgggccatgttctgcaatgaccaccgggagagccgggagatgctggtggagatcaatggcatcctggccgaggccatggagtgcttcctgcagtatgtgtacaccgggaaggtgaagatcaccacagaatag

SEQ ID NO: 21828 - DNA, 312 bp, synthetic construct; identical to SEQ ID NO: 21772
  source 1..312: mol_type = other DNA; note = Synthetic coding sequence

SEQ ID NO: 21829 - DNA, 1923 bp, synthetic construct
  source 1..1923: mol_type = other DNA; note = Synthetic coding sequence
atgggcagaagaagtggcctgctgggcctgcggcccggccctgagcctgtggccctggagagggtcatcaacaaggtgcacctgaaggccaaccacgtggtgaagagagatgtggatgagcacctgcgcatcaagacagtgtatgacaagtctgtggaggagctgctgcctgagaagaagaacctggtgaagaacaagctgttcccccaggccatctcctacctggagaagaccttccaggtgcggcggcctgctggcaccatcctgctgagccggcagtgtgccaccaaccagtacctgaggaaagaaaatgacccccaccgctactgcacaggagaatgtgccgcccacaccaagtgtggccctgtgattgtgcctgaggagcacctgcagcagtgccgggtgtaccggggcggcaagtggccccatggagctgtgggcgtgcctgaccaggagggcatcagtgatgctgactttgtgctgtatgtgggcgccctggccacagagcgctgcagccatgagaacatcatctcctatgctgcctactgccagcaggaggccaacatggaccggcccatcgccggctacgccaacctgtgccccaacatgatcagcacccagccccaggagtttgtgggcatgctgagcacagtgaagcatgaggtgatccacgccctgggcttctctgctggcctgtttgccttctaccatgacaaggatggcaaccccctgaccagcagatttgctgatggcctgccccccttcaactacagcctgggcctgtaccagtggagcgacaaggtggtgaggaaggtggagcggctgtgggatgtgcgggacaacaagatcgtgcgccacacagtgtacctgctggtgaccccccgggtggtggaggaggccaggaagcactttgactgccctgtgctggagggcatggagctggagaaccagggcggcgtgggcacagagctgaaccactgggagaagaggctgctggagaatgaggccatgacaggcagccacacccagaacagagtgctgagccgcatcaccctggccctgatggaggacaccggctggtacaaggccaactacagcatggccgagaagctggactggggccggggcatgggctgtgactttgtgaggaagagctgcaagttctggattgaccagcagaggcagaagaggcagatgctgagcccctactgtgacaccctgcggagcaaccccctgcagctgacctgccggcaggaccagagagctgtggccgtgtgcaacctgcagaagttccccaagcccctgccccaggagtaccagtactttgatgagctgagcggcatcccagctgaggacctgccctactacggcggctctgtggagattgctgactactgccccttcagccaggagttctcctggcacctgtctggagagtaccagaggagcagtgactgccgcatcctggagaaccagcctgagatcttcaagaactatggagctgagaagtatggcccccacagcgtgtgcctgatccagaagagcgcctttgtgatggagaagtgtgagaggaagctgagctacccagactggggcagcggctgctaccaggtgtcctgcagcccccagggcctgaaggtgtgggtgcaggacaccagctacctgtgcagcagagctggccaggtgctgcctgtgtccatccagatgaatggctggattcatgatggcaacctgctgtgccccagctgctgggacttctgtgagctgtgccccccagagacagaccccccagccaccaacctgacccgggccctgcccctggacctgtgcagctgcagcagcagcctggtggtgaccctgtggctgctgctgggcaacctcttccccctgctggccggcttcctgctgtgcatctggcactag

SEQ ID NO: 21830 - DNA, 783 bp, synthetic construct
  source 1..783: mol_type = other DNA; note = Synthetic coding sequence
atgaacctggacagtgatggcatggatgacatcatcagccaggagagcagcctggacatggagggcaactacaagaaggcccagaagaatgaaagagagagcatccggcagaagctggccctgggcagcttctttgatgatggccctggcatctacaccagctgcagcaagagcggcaagcccagcctgagcagccggctgcagagcggcatgaacctgcagatctgctttgtgaatgattctggcagtgacaaggacagtgatgctgatgacagcaagacagagaccagcctggacacccccctgagccccatgagcaagcagagcagcagctacagcgaccgggacaccacagaggaggagagcgagagcctggatgacatggacttcctgacccggcagaagaagctgcaggccgaggccaagatggccctggccatggccaagcccatggccaagatgcaggtggaggtggagaagcagaacaggaagaagagccctgtggccgacctgctgccccacatgccccacatcagcgagtgcctgatgaagaggagcctgaagcccacagacctgcgggacatgaccatcggccagctgcaggtgattgtgaatgacctgcacagccagatcgagagcctgaatgaggagctggtgcagctgctgctgatcagagatgagctgcacacagagcaggatgccatgctggtggacatcgaggacctgaccaggcatgctgagagccagcagaagcacatggccgagaagatgcctgccaagtag

SEQ ID NO: 21831 - DNA, 633 bp, synthetic construct; identical to SEQ ID NO: 19581
  source 1..633: mol_type = other DNA; note = Synthetic coding sequence

SEQ ID NO: 21832 - DNA, 381 bp, synthetic construct
  source 1..381: mol_type = other DNA; note = Synthetic coding sequence
atgaaccagaggagccacctgggcaccacctacctggacacagccaagggagctgtggagaccttcatgaagctgcgggcccgggaccctgccagcagaggagaccgctacatgctggtgacctttgaggagcccccctatgccatcaaggccggctggaaggaaaatcatgccaccttcatgaatgagctgaagaacctgcaggccgagggcctgaccaccctgggccagagcctgaggacagcctttgacctgctgaacctgaaccggctggtgactggaattgacaactacggccagggcaggaaccccttcttcctggagcccgccatcatcatcaccatcacagatggcagcaagctgaccaccaccagcggctag

SEQ ID NO: 21833 - DNA, 1188 bp, synthetic construct
  source 1..1188: mol_type = other DNA; note = Synthetic coding sequence
atggccaatgaccccctggagggcttccacgaggtgaacctggccagccccaccagcccagacctgctgggcgtgtatgagagcggcacccaggagcagaccaccagccccagcgtcatctaccggccccaccccagcgccctgagctctgtgcccatccaggccaatgccctggatgtgtctgagctgcccacccagcctgtgtacagcagcccccggcggctgaactgtgccgagatcagcagcatctccttccacgtgacagatcctgccccctgcagcaccagcggcgtgacagctggcctgaccaagctgaccaccaggaaggacaactacaatgctgagcgggagttcctgcagggcgccaccatcacagaggcctgtgatggcagtgatgacatcttcggcctgagcacagacagcctgagccggctgcggagccccagcgtgctggaggtgcgggagaagggctatgaaaggctgaaggaggagctggccaaggcccagcgggagctgaagctgaaggatgaggagtgtgagcggctgagcaaggtgcgggaccagctgggccaggagctggaggagctgacagccagcctgtttgaggaggcccacaagatggtgcgggaggccaacatcaagcaggccacagctgagaagcagctgaaggaggcccagggcaagattgatgtgctgcaggccgaggtggccgccctgaagaccctggtgctgagcagcagccccaccagccccacccaggagcccctgcccggcggcaagacccccttcaagaagggccacaccaggaacaagagcaccagcagcgccatgagcggcagccaccaggacctgagcgtcatccagcccatcgtgaaggactgcaaggaggccgacctgagcctgtacaatgagttccggctgtggaaggatgagcccaccatggacaggacctgccccttcctggacaagatctaccaggaggacatcttcccctgcctgaccttcagcaagtctgagctggccagcgctgtgctggaggccgtggagaacaacaccctgagcattgagcctgtgggcctgcagcccatccgctttgtgaaggccagcgctgtggagtgtggcggccccaagagcctgctgtatgtgaccttcctgcacacctttgacaccttcagccgggacagctag

SEQ ID NO: 21834 - DNA, 786 bp, synthetic construct; identical to SEQ ID NO: 19275
  source 1..786: mol_type = other DNA; note = Synthetic coding sequence

SEQ ID NO: 21835 - DNA, 1284 bp, synthetic construct
  source 1..1284: mol_type = other DNA; note = Synthetic coding sequence
atggtgtgctggcaggacctggaggagagcctgaggatgaagctgagcctgaccaaggtggtgaatggctgccgcctgggcaagatcaagaacctgggcaagacaggagaccacaccatggacatccctggctgcctgctgtacaccaagacaggcagcgccccccacctgacccaccacaccctgcacaacatccacggcgtgcctgccatggcccagctgaccctgagcagcctggccgagcaccacgaggtgctgacagagtacaaggagggcgtgggcaagttcatcggcatgcctgagagcctgctgtactgcagcctgcatgaccctgtgagcccctgcccagctggctacgtgaccaacaagtctgtgtctgtgtggagcgtggccggccgggtggagatgacagtgtccaagttcatggccatccagaaggccctgcagcctgactggttccagtgcctgagtgatggagaggtgtcctgcaaggaggccaccagcatcaagagggtgaggaagtctgtggacaggagcctgctcttcctggacaactgcctgcggctgcaggaggagagcgaggtgctgcagaagagcgtcatcatcggcgtgattgaaggaggagatgtgatggaggagcggctgcggagcgcccgggagacagccaagaggcctgtgggcggcttcctgctggatggcttccagggcaaccccaccaccctggaggcccggctgcggctgctgagctctgtgacagctgagctgcctgaggacaagcccaggctcatcagcggcgtgtccaggccagatgaggtgctggagtgcatcgagcggggcgtggacctgtttgagagcttcttcccctaccaggtgacagagcggggctgtgccctgaccttctcctttgactaccagcccaaccctgaggagaccctgctgcagcagaatggcacccaggaggagatcaagtgcatggaccagatcaagaagattgagaccaccggctgcaaccaggagatcaccagctttgagatcaacctgaaggagaagaagtaccaggaggacttcaaccccctggtgcggggctgcagctgctactgctgcaagaaccacacccgggcctacatccaccacctgctggtgaccaatgagctgctggccggcgtgctgctgatgatgcacaactttgagcactacttcggcttcttccactacatccgggaggccctgaagagtgacaagctggcccagctgaaggagctgatccaccggcaggccagctag

SEQ ID NO: 21836 - DNA, 393 bp, synthetic construct
  source 1..393: mol_type = other DNA; note = Synthetic coding sequence
atgaaccagaggagccacctgggcaccacctacctggacacagccaagggagctgtggagaccttcatgaagctgcgggcccgggaccctgccagcagaggagaccgctacatgctggtgacctttgaggagcccccctatgccatcaaggccggctggaaggaaaatcatgccaccttcatgaatgagctgaagaacctgcaggccgagggcctgaccaccctgggccagagcctgaggacagcctttgacctgctgaacctgaaccggctggtgactggaattgacaactacggccagggcaggaaccccttcttcctggagcccgccatcatcatcaccatcacagatggcagcaagctgaccaccaccagcggcgtgcaggatgaatag

SEQ ID NO: 21837 - DNA, 417 bp, synthetic construct
  source 1..417: mol_type = other DNA; note = Synthetic coding sequence
atgaacccagccagcgcccccccacccctgcccccacctggccagcaggtgattcatgtgacccaggacctggacacagacctggaggccctcttcaacagcgtgatgaaccccaagcccagctcctggaggaagaagatcctgcctgagagcttcttcaaggagccagacagcggcagccacagccggcagagcagcacagacagcagcggcggccaccctggcccccggctggccggcggggcccagcacgtgcgcagccacagcagccctgccagcctgcagctgggcaccggggccggggctgctggcagccctgcccagcagcacgcccacctgcggcagcagagctatgatgtgacagatgagctgcccctgcccccaggctgggagatgaccttcaccgccactggatag

SEQ ID NO: 21838 - DNA, 1692 bp, synthetic construct
  source 1..1692: mol_type = other DNA; note = Synthetic coding sequence
atgaggctggaggagctgaagaggctgcagaaccccctggagcaggtgaatgatggcaagtacagctttgagaaccaccagctggccatggatgctgagaacaacatcgagaagtaccccctgaacctgcagcccctggagagcaaggtgaagatcatccagagggcctggagggagtacctgcagaggcaggagcccctgggcaagaggagccccagcccccccagcgtgtcctctgagaagctgagcagctctgtgtccatgaacaccttcagtgacagcagcaccccagactacagagaagatggcatggacctgggcagtgatgctggcagcagcagcagcagcagccgggccagcagccagagcaacagcaccaaggtgaccccctgcagcgagtgcaagagcagcagcagccctgggggcagcctggacctggtgtctgccctggaggactatgaggagcccttccctgtgtaccagaagaaggtgattgatgagtgggcccctgaggaggatggagaggaggaggaggaggaggatgagcgggaccagaggggctacagagatgacaggagccctgcccgggagcctggagatgtgtctgcccggaccaggtctgggggcggcggcggccgcagcgccaccacagccatgcctcctcctgtgcccaatggaaacctgcaccagcacgacccccaggacctgcggcacaatggaaatgtggtggtggccggccggcccagctgcagccggggcccccggcgggccatccagaagccccagcctgctgggggcagaagaagtggccggggccctgctgctgggggcctgtgcctgcagcccccagatggcggcacctgtgtgcctgaggagccccctgtgccccccatggactgggaggccctggagaagcacctggccggcctgcagttccgggagcaggaggtgaggaaccagggccaggcccggaccaacagcaccagcgcccagaagaatgaaagagagagcatccggcagaagctggccctgggcagcttctttgatgatggccctggcatctacaccagctgcagcaagagcggcaagcccagcctgagcagccggctgcagagcggcatgaacctgcagatctgctttgtgaatgacagcggcagtgacaaggacagtgatgctgatgacagcaagacagagaccagcctggacacccccctgagccccatgagcaagcagagcagcagctacagcgaccgggacaccacagaggaggagagcgagagcctggatgacatggacttcctgacccggcagaagaagctgcaggccgaggccaagatggccctggccatggccaagcccatggccaagatgcaggtggaggtggagaagcagaacaggaagaagagccctgtggccgacctgctgccccacatgccccacatcagtgaatgtctgatgaagaggagcctgaagcccacagacctgcgggacatgaccatcggccagctgcaggtgattgtgaatgacctgcacagccagatcgagagcctgaatgaggagctggtgcagctgctgctgatcagagatgagctgcacacagagcaggatgccatgctggtggacatcgaggacctgaccaggcatgctgagagccagcagaagcacatggccgagaagatgcctgccaagtag

SEQ ID NO: 21839 - DNA, 228 bp, synthetic construct
  source 1..228: mol_type = other DNA; note = Synthetic coding sequence
atgcctgaggaccaggtgggcaagctggaggccacagagaacaccatcagcgccatggctgctgctgctgctgagcagcagcagttctacctgctgctgggcaacctgctgagcccagacaacgtggtgaggaagcaggccgaggagacctatgagaacatccctggccagagcaagatcaccttcctgctgcaggccatccggaacaccacagctgctgaggagtag

SEQ ID NO: 21840 - DNA, 2712 bp, synthetic construct; identical to SEQ ID NO: 19194
  source 1..2712: mol_type = other DNA; note = Synthetic coding sequence

SEQ ID NO: 21841 - DNA, 522 bp, synthetic construct
  source 1..522: mol_type = other DNA; note = Synthetic coding sequence
atgcccaggaagggcacccagcccagcacagccaggagaagagaggagggccccccaccacccagcccagatggagccagcagtgatgctgagcctgagccccccagcggccgcacagagagccctgccacagctgctgagacagccagcgaggagctggacaacagaagcctggaggagatcctgaacagcatccccccacctcctcctccagccatgaccaatgaagctggggccccccggctgatgatcacccacatcgtgaaccagaacttcaagagctatgctggggagaagatcctgggccccttccacaagcgcttcagctgcatcatcggccccaatggaagtggcaagagcaatgtgattgacagcatgctgtttgtgtttggctaccgggcccagaagatccgcagcaagaagctgtctgtgctgatccacaacagtgatgagcacaaggacatccagagctgcaccgtggaggtgcacttccagaagatcatcgacaaggagggggactag

SEQ ID NO: 21842 - DNA, 2262 bp, synthetic construct
  source 1..2262: mol_type = other DNA; note = Synthetic coding sequence
atgtacagccccatcatctaccaggccctgtgtgaacatgtgcagacccagatgagcctgatgaatgacctgaccagcaagaacatccccaacggcatcccagctgtgccctgccacgcccccagccacagcgagagccaggccaccccccacagcagctatggcctgtgcaccagcacccctgtgtggagcctgcagaggcctccctgcccccccaaggtgcacagcgaggtgcagacagatggcaacagccagtttgccagccagggcaagacagtgtctgccacctgcacagatgtgctgaggaacagcttcaacaccagccctggggtgccctgcagcctgcccaagacagacatcagcgccatccccaccctgcagcagctgggcctggtgaatggcatcctgccccagcagggcatccacaaggagacagacctgctgaagtgcatccagacctacctgagcctcttccgcagccacggcaaggagacccacctggacagccagacccacaggagccccacccagagccagcctgccttcctggccaccaatgaggagaagtgtgcccgggagcagatccgggaggccaccagcgagaggaaggacctgaacatccacgtgcgggacaccaagacagtgaaggatgtgcagaaggccaagaatgtgaacaagacagctgagaaggtgcgcatcatcaagtacctgctgggggagctgaaggccctggtggccgagcaggaggacagcgagatccagaggctcatcacagagatggaggcctgcatctctgtgctgcccaccgtgtctggcaacacagacatccaggtggagatcgccctggccatgcagcccctgcggagtgaaaatgcccagctgcggcggcagctgcgcatcctgaaccagcagctgcgggagcagcagaagacccagaagcccagcggggctgtggactgcaacctggagctgttcagcctgcagagcctgaacatgagcctgcagaaccagctggaggagagcctgaagagccaggagctgctgcagagcaagaatgaggagctgctgaaggtgattgagaaccagaaggatgagaacaagaagttcagcagcatcttcaaggacaaggaccagaccatcctggagaacaagcagcagtatgacatcgagatcacccgcatcaagattgagctggaggaggccctggtgaatgtgaagagcagccagttcaagctggagacagctgagaaggagaaccagatcctgggcatcaccctgcggcagagagatgctgaggtgacccggctgcgggagctgaccaggaccctgcagacctccatggccaagctgctgagtgacctgtctgtggacagcgcccgctgcaagccaggcaacaacctgaccaagagcctgctgaacatccatgacaagcagctgcagcacgaccctgccccagcccacaccagcatcatgagctacctgaacaagctggagaccaactacagcttcacccacagcgagcccctgagcaccatcaagaatgaggagaccatcgagccagacaagacctatgaaaatgtgctgagcagccggggcccccagaacagcaacacccggggcatggaggaggccagcgcccctggcatcatcagcgccctgagcaagcaggacagtgatgagggcagcgagaccatggccctgattgaagatgagcacaacctggacaacaccatctacatcccctttgcccggagcaccccagagaagaagagccccctgagcaagaggctgagcccccagccccagatccgggccgccaccacccagctggtgagcaacagcggcctggccgtgtctgggaaggagaacaagctgtgcacccctgtgatctgcagcagcagcaccaaggaggctgaagatgcccctgagaagctgagccgggccagtgacatgaaggacacccagctgctgaagaagatcaaggaggccatcggcaagatcccagctgccaccaaggagcctgaggagcagacagcctgccacggccccagcggctgcctgagcaacagcctgcaggtgaagggcaacacagtgtgtgatggcagcgtcttcaccagtgacctgatgtctgactggagcatcagcagcttcagcaccttcaccagcagagatgagcaggacttcagaaatggcctggccgccctggatgccaacatcgcccggctgcagaagagcctgaggacaggcctgctggagaagtag

SEQ ID NO: 21843 - DNA, 219 bp, synthetic construct; identical to SEQ ID NO: 21812
  source 1..219: mol_type = other DNA; note = Synthetic coding sequence

SEQ ID NO: 21844 - DNA, 588 bp, synthetic construct
  source 1..588: mol_type = other DNA; note = Synthetic coding sequence
atgtggcacatgaccaggaactggcccctggtgggcaagaccagcctcatcacccgcttcatgtatgacagctttgacaacacctaccaggccaccatcggcatcgacttcctgagcaagaccatgtacctggaggacagaacagtgcggctgcagctgtgggacacagctggccaggagcgcttccgcagcctcatccccagctacatccgggacagcacagtggccgtggtggtgtatgacatcaccaacctgaacagcttccagcagaccagcaagtggattgatgatgtgaggacagagcggggcagtgatgtgatcatcatgctggtgggcaacaagacagacctggccgacaagaggcagatcaccatcgaggagggggagcagagggccaaggagctgtctgtgatgttcatcgagaccagcgccaagacaggctacaacgtgaagcagctgttcagaagagtggccagcgccctgcccggcatggagaatgtgcaggagaagagcaaggagggcatgattgacatcaagctggacaagccccaggagcccccagccagcgagggcggctgcagctgctag

SEQ ID NO: 21845 - DNA, 1047 bp, synthetic construct; identical to SEQ ID NO: 20002
  source 1..1047: mol_type = other DNA; note = Synthetic coding sequence

SEQ ID NO: 21846 - DNA, 2862 bp, synthetic construct
  source 1..2862: mol_type = other DNA; note = Synthetic coding sequence
atgaagaggggcatccggcgggaccccttcaggaagaggaagctgggcggccgggccaagaaggtgcgggagcccacagctgtgaacagcttctaccgggaggccagcctgcccagcgtgtgggccagcctgcggcggcgggagatggtgcgcagcggggcccggcccggccaggtgctgagcagcggccgccacacaggccctgccaagctgaccaacgggaagaaggccacctacctgaggaagatcccccgcttcaatgctgacagcggctacagcatccacagcgacagcgagagccaggccgagaccgtgcacggcctggatggctgtgccagcctgctgcgggacatcctgagaaatgaagacagcggcagcgagacagcctacctggagaacagaagcaacagccggcccctggagagcaagagatatggcagcaagaagaagagacatgagaagcacaccatccccctggtggtgcagaaggagaccagcagcagtgacaacaagaagcagatccccaatgaggccagcgcccggtctgagcgggacaccagtgacctggagcagaactggagcctgcaggaccactacaggatgtacagccccatcatctaccaggccctgtgtgaacatgtgcagacccagatgagcctgatgaatgacctgaccagcaagaacatccccaacggcatcccagctgtgccctgccacgcccccagccacagcgagagccaggccaccccccacagcagctatggcctgtgcaccagcacccctgtgtggagcctgcagaggcctccctgcccccccaaggtgcacagcgaggtgcagacagatggcaacagccagtttgccagccagggcaagacagtgtctgccacctgcacagatgtgctgaggaacagcttcaacaccagccctggggtgccctgcagcctgcccaagacagacatcagcgccatccccaccctgcagcagctgggcctggtgaatggcatcctgccccagcagggcatccacaaggagacagacctgctgaagtgcatccagacctacctgagcctcttccgcagccacggcaaggagacccacctggacagccagacccacaggagccccacccagagccagcctgccttcctggccaccaatgaggagaagtgtgcccgggagcagatccgggaggccaccagcgagaggaaggacctgaacatccacgtgcgggacaccaagacagtgaaggatgtgcagaaggccaagaatgtgaacaagacagctgagaaggtgcgcatcatcaagtacctgctgggggagctgaaggccctggtggccgagcaggaggacagcgagatccagaggctcatcacagagatggaggcctgcatctctgtgctgcccaccgtgtctggcaacacagacatccaggtggagatcgccctggccatgcagcccctgcggagtgaaaatgcccagctgcggcggcagctgcgcatcctgaaccagcagctgcgggagcagcagaagacccagaagcccagcggggctgtggactgcaacctggagctgttcagcctgcagagcctgaacatgagcctgcagaaccagctggaggagagcctgaagagccaggagctgctgcagagcaagaatgaggagctgctgaaggtgattgagaaccagaaggatgagaacaagaagttcagcagcatcttcaaggacaaggaccagaccatcctggagaacaagcagcagtatgacatcgagatcacccgcatcaagattgagctggaggaggccctggtgaatgtgaagagcagccagttcaagctggagacagctgagaaggagaaccagatcctgggcatcaccctgcggcagagagatgctgaggtgacccggctgcgggagctgaccaggaccctgcagacctccatggccaagctgctgagtgacctgtctgtggacagcgcccgctgcaagccaggcaacaacctgaccaagagcctgctgaacatccatgacaagcagctgcagcacgaccctgccccagcccacaccagcatcatgagctacctgaacaagctggagaccaactacagcttcacccacagcgagcccctgagcaccatcaagaatgaggagaccatcgagccagacaagacctatgaaaatgtgctgagcagccggggcccccagaacagcaacacccggggcatggaggaggccagcgcccctggcatcatcagcgccctgagcaagcaggacagtgatgagggcagcgagaccatggccctgattgaagatgagcacaacctggacaacaccatctacatcccctttgcccggagcaccccagagaagaagagccccctgagcaagaggctgagcccccagccccagatccgggccgccaccacccagctggtgagcaacagcggcctggccgtgtctgggaaggagaacaagctgtgcacccctgtgatctgcagcagcagcaccaaggaggctgaagatgcccctgagaagctgagccgggccagtgacatgaaggacacccagctgctgaagaagatcaaggaggccatcggcaagatcccagctgccaccaaggagcctgaggagcagacagcctgccacggccccagcggctgcctgagcaacagcctgcaggtgaagggcaacacagtgtgtgatggcagcgtcttcaccagtgacctgatgtctgactggagcatcagcagcttcagcaccttcaccagcagagatgagcaggacttcagaaatggcctggccgccctggatgccaacatcgcccggctgcagaagagcctgaggacaggcctgctggagaagtag

SEQ ID NO: 21847 - DNA, 1683 bp, synthetic construct; identical to SEQ ID NO: 20948
  source 1..1683: mol_type = other DNA; note = Synthetic coding sequence

SEQ ID NO: 21848 - DNA, 153 bp, synthetic construct
  source 1..153: mol_type = other DNA; note = Synthetic coding sequence
atgcctgaggaccaggtgggcaagctggaggccacagagaacaccatcagcgccatggctgctgctgctgctgagcagcagcagttctacctgctgctgggcaacctgctgagcccagacaacgtggtgaggaagcaggccgaggtgacctag

SEQ ID NO: 21849 - DNA, 288 bp, synthetic construct
  source 1..288: mol_type = other DNA; note = Synthetic coding sequence
atggccatcggcaagaggctggccaccctgcccaccaaggagcagaagacccagaggctcatcagcgagctgagcctgctgaaccacaagctgcctgcccgggtgtggctgcccacagctggctttgaccaccacgtggtgcgggtgccccacacccaggccgtggtgctgaacagcaaggacaaggccccctacctgatctacgtggaggtgctggagtgtgaaaattttgacaccacctctgtgcctgcccgcatccctgagaaccgcatccgcagcaccaggtag

SEQ ID NO: 21850 - DNA, 1260 bp, synthetic construct
  source 1..1260: mol_type = other DNA; note = Synthetic coding sequence
atggccggcagcggctgtgcctggggcgctgagcccccacgcttcctggaggccttcggccgcctgtggcaggtgcagagccggctgggcagcggcagcagcgcctctgtgtacagagtgcgctgctgcggcaaccctggcagccccccaggggccctgaagcagttcctgcccccaggcaccaccggggctgctgccagcgctgctgaatatggcttcaggaaggagcgggccgccctggagcagctgcagggccacagaaatattgtgaccctgtatggagtcttcaccatccacttcagccccaacgtgcccagccgctgcctgctgctggagctgctggatgtgtctgtgtctgagctgctgctgtacagcagccaccagggctgcagcatgtggatgatccagcactgtgccagagatgtgctggaggccctggccttcctgcaccacgagggctacgtgcatgctgacctgaagcccaggaacatcctgtggagcgcagaaaatgaatgcttcaagctgattgactttggcctgtccttcaaggagggcaaccaggatgtgaagtacatccagacagatggctaccgggcccctgaggccgagctgcagaactgcctggcccaggccggcctgcagagcgacacagagtgcaccagcgctgtggacctgtggagcctgggcatcatcctgctggagatgttttctggcatgaagctgaagcacacagtgcgcagccaggagtggaaggccaacagcagcgccatcatcgaccacatctttgccagcaaggctgtggtgaatgctgccatcccagcctaccacctgcgggacctgatcaagtccatgctgcatgatgaccccagccgccgcatcccagctgagatggccctgtgcagccccttcttcagcatcccctttgccccccacatcgaggacctggtgatgctgcccacccctgtgctgcggctgctgaatgtgctggatgatgactacctggagaatgaggaggagtatgaagatgtggtggaggatgtgaaggaggagtgccagaagtatggccctgtggtgtccctgctggtgcccaaggaaaatcctggccggggccaggtgtttgtggagtatgccaatgctggggacagcaaggccgcccagaagctgctgaccggccgcatgtttgatggcaagtttgtggtggccaccttctaccccctgagcgcctacaagaggggctacctgtaccagaccctgctgtag

SEQ ID NO: 21851 - DNA, 1272 bp, synthetic construct
  source 1..1272: mol_type = other DNA; note = Synthetic coding sequence
atgcccaggaagggcacccagcccagcacagccaggagaagagaggagggccccccaccacccagcccagatggagccagcagtgatgctgagcctgagccccccagcggccgcacagagagccctgccacagctgctgagacagccagcgaggagctggacaacagaagcctggaggagatcctgaacagcatccccccacctcctcctccagccatgaccaatgaagctggggccccccggctgatgatcacccacatcgtgaaccagaacttcaagagctatgctggggagaagatcctgggccccttccacaagcgcttcagctgcatcatcggccccaatggaagtggcaagagcaatgtgattgacagcatgctgtttgtgtttggctaccgggcccagaagatccgcagcaagaagctgtctgtgctgatccacaacagtgatgagcacaaggacatccagagctgcaccgtggaggtgcacttccagaagatcatcgacaaggagggagatgattatgaagtcatccccaacagcaacttctacgtgtccaggacagcctgccgggacaacacctctgtgtaccacatcagcggcaagaagaagaccttcaaggatgtgggcaacctgctgcggagccacggcatcgacctggaccacaaccgcttcctgatcctgcagggcgaggtggagcagatcgccatgatgaagcccaagggccagacagaacatgatgagggcatgctggagtacctggaggacatcatcggctgcggccgcctgaatgagcccatcaaggtgctgtgccggcgggtggagatcctgaatgagcacagaggagagaagctgaacagagtgaagatggtggagaaggagaaggatgccctggagggggagaagaacatcgccatcgagttcctgaccctggagaatgagatcttcaggaagaagaaccacgtgtgccagtactacatctatgagctgcagaagagaattgctgagatggagacccagaaggagaagatccacgaggacaccaaggagatcaatgagaagagcaacatcctgagcaatgagatgaaggccaagaacaaggatgtgaaggacacagagaagaagctgaacaagatcaccaagttcatcgaggagaacaaggagaagttcacccagctggacctggaggatgtgcaggtgcgggagaagctgaagcacgccaccagcaaggccaagaagctggagaagcagctgcagaaggacaaggagtag

SEQ ID NO: 21852 - DNA, 1113 bp, synthetic construct
  source 1..1113: mol_type = other DNA; note = Synthetic coding sequence
atggaggagggcgtgccctgcccagccccagctgccaagctgaccccacctgtgaagaagagccaggacatgcatgatgagaggagcaagctggtgaatgaatatgcctgccgggtgctggagctgctgggcatgggccaccggctgtttgtgccccggctgctggccaccagcaaggaggacctgctgcaggccgactttgaaggagccctgaagttcttccgggtgcagctgcccaagcgctacagagctgaggagaatgcccggcggctgatggagcaggcctgcaacatcaaggtgcccaccaagaagctgaagaagtatgagaaggagtaccagaccatgagggagagccagctgcagcaggaggaccccatggaccgctacaagcgggagaacagaaggctgcaggaggcctccatgaggctggagcaggagaatgatgacctggcccacgagctggtgaccagcaagatcgccctgagaaatgacctggaccaggccgaggacaaggcagatgtgctgaacaaggagctgctgctgaccaagcagaggctggtggagacagaggaggagaagaggaagcaggaggaggagacagcccagctgaaggaggtgttcaggaagcagctggagaaggccgagtatgagatcaagaagaccacagccatcatcgccgagtacaagcagatctgcagccagctgagcacccggctggagaagcagcaggccgccagcaaggaggagctggaggtggtgaagggcaagatgatggcctgcaagcactgcagcgacatcttcagcaaggagggcgccctgaagctggccgccaccggccgggaggaccagggcattgaaacagatgatgagaaggacagcctgaagaagcagctgcgggagatggagctggagctggcccagaccaagctgcagctggtggaggccaagtgcaagatccaggagctggagcaccagagaggagccctgatgaatgagatccaggccgccaagaacagctggttcagcaagaccctgaacagcatcaagacagccaccggcacccagcccctgcagcctgcccctgtgacccagccccccaaggagagcacctag

SEQ ID NO: 21853 - DNA, 2262 bp, synthetic construct; identical to SEQ ID NO: 21842
  source 1..2262: mol_type = other DNA; note = Synthetic coding sequence

SEQ ID NO: 21854 - DNA, 2067 bp, synthetic construct; identical to SEQ ID NO: 19474
  source 1..2067: mol_type = other DNA; note = Synthetic coding sequence

SEQ ID NO: 21855 - DNA, 543 bp, synthetic construct
  source 1..543: mol_type = other DNA; note = Synthetic coding sequence
atgcccaggaagggcacccagcccagcacagccaggagaagagaggagggccccccaccacccagcccagatggagccagcagtgatgctgagcctgagccccccagcggccgcacagagagccctgccacagctgctgagacagccagcgaggagctggacaacagaagcctggaggagatcctgaacagcatccccccacctcctcctccagccatgaccaatgaagctggggccccccggctgatgatcacccacatcgtgaaccagaacttcaagagctatgctggggagaagatcctgggccccttccacaagcgcttcagctgcatcatcggccccaatggaagtggcaagagcaatgtgattgacagcatgctgtttgtgtttggctaccgggcccagaagatccgcagcaagaagctgtctgtgctgatccacaacagtgatgagcacaaggacatccagagctgcaccgtggaggtgcacttccagaagatcatcgacaaggagggagatgattatgaagtcatccccaactag

SEQ ID NO: 21856 - DNA, 4689 bp, synthetic construct
  source 1..4689: mol_type = other DNA; note = Synthetic coding sequence
atgcctggagaggccgcccgggcagagctgctgctgcctgaggccgaccggcccggccccaggacagacctgagctgtgatgctgctgctgccaccaccatcctgggcggggacagaagagagccctgtgccctgaccccaggccccagccacctggccctgaccttcctgcccagcaagccaggggcccggccccagcctgagggcgcctcctgggatgctggccctgggggcgcccccagcgcctgggccgaccccggggagggcggccccagccccatgctgctgcctgagggcctgagcagccaggccctgagcacagaggcccccctgcctgccaccctggagcccagaattgtgatgggagaggagacctgccaggccctgctgagcccccgggccgccaggacagccctgcgggaccaggagggcggccacgccagcccagaccccccacctgagctgtgcagccagggcgacctgtctgtgcccagccccccaccagaccctgacagcttcttcaccccacccagcacccccaccaagaccacctacgccctgctgcctgcctgtggcccccatggagatgcccgggacagcgaggccgagctgagagatgagctgctggacagccccccagccagccccagcggcagctacatcacagcagatggagacagctgggccagcagccccagctgcagcctgagcctgctggccccagctgagggcctggacttccccagcggctggggcctgagcccccagggctccatggtggatgagcgggagctgcaccctgctggcaccccagagccccccagcagcgagagcagcctgtctgctgacagcagcagctcctggggccaggagggccacttctttgacctggacttcctggccaatgaccccatgatcccagctgccctgctgcccttccagggcagcctcatcttccaggtggaggccgtggaggtgacccccctgagccctgaggaggaggaggaggaggccgtggccgaccctgaccccggcggggacctggccggggagggggaggaggacagcaccagcgccagcttcctgcagagcctgagtgacctgagcatcacagagggcatggatgaggcctttgccttcagagatgacaccagcgctgccagcagtgacagcgacagcgccagctatgcagaggctgatgatgagcggctgtacagcggggagccccacgcccaggccaccctgctgcaggacagcgtgcagaagacagaggaggagagcggcggcggggccaagggcctgcaggcccaggacggcaccgtgtcctgggccgtggaggccgccccccagaccagtgacagaggagcctacctgagccagaggcaggagctgatcagcgaggtgacagaggagggcctggccctgggccaggagagcacagccaccgtgaccccccacaccctgcaggtggcccctggcctgcaggtggaggtggccaccagggtgaccccccaggccggggaggaggagacagacagcacagctggccaggagagcgctgccatggccatgccccagcccagccaggagggcatcagcgagatcctgggccaggagagcgtgacagctgagaagctgcccaccccccaggaggagaccagcctgaccctgtgcccagacagcccccagaacctgaaggaggagggcggcctggacctgcccagcggcaggaagcctgtggccgccgccaccatcgtgccccggcaggccaaggaggacctgaccctgccccaggacagcgccatgaccccacccctgcccctgcaggacacagacctgagcagcgcccccaagcctgtggccgccgccaccatcgtgtcccagcaggccgaggagggcctgaccctgccccaggacagcgtgatgaccccacccctgcccctgcaggacacagagctgagcagcgcccccaagcctgtggccgccgccaccctggtgtcccagcaggccgaggagggcctgaccctgccccaggacagcgccatgaccccacccctgcccctgcaggacacagacctgagcagcgcccccaagcctgtggccgccgccaccctggtgtcccagcaggccgaggagggcctgaccctgccccaggacagcgccatgaccccacccctgcccctgcaggacacagacctgagcagcgcccccaagcctgtggccgccgccaccctggtgtcccagcaggccgaggagggcctgaccctgccccaggacagcgccatgaccccacccctgcccctgcaggacacagacctgagcagcgcccccaagcctgtggccgccgccaccatcgtgtcccagcaggccgaggagggcctgaccctgccccaggacagcgccatgaccccacccctgcccctgcaggacacagacctgagcagcgcccccaagcctgtggccgccgccaccatcgtgtcccagcaggccgaggagggcctgaccctgccccaggacagcgccatgaccccacccctgcccctgcaggacacagacctgagcagcgcccccaagcctgtggccgccgccacccctgtgtcccagcaggccgaggagggcctgaccctgccccaggacagcgccatgaccccacccctgcccctgcaggacacagacctgagcagcgcccccaagcctgtggccgccgccacccctgtgtcccagcaggccgaggagggcctgaccctgccccaggacagcgccatgacagcccccctgcccctgcaggacaccggccccaccagcggccctgagcccctggccgtggccaccccccagaccctgcaggccgaggccggctgtgcccctggaacagagcctgtggccaccatggcccagcaggaggtgggggaggccctgggccccaggcctgcccctgaggagaagaatgctgccctgcccaccgtgcctgagcctgctgccctggaccaggtgcagcaggatgacccccagcctgctgctgaggccggcaccccctgggccgcccaggaggatgctgacagcaccctgggcatggaggccctgagcctgcctgagcccgccagcggggccggggaggagattgctgaggccctgagccggcccggccgggaggcctgcctggaggcccgggcccacactggagatggagccaagccagacagcccccagaaggagaccctggaggtggagaaccagcaggagggcggcctgaagcccctggcccaggagcacggccccaggtctgccctgggcggggcccgggaggtgcctgatgcccctcctgctgcctgcccagaggtgtcccaggcccggctgctgagccctgcccgggaggagcggggcctgagcggcaagagcaccccagagcccaccctgcccagcgctgtggccacagaggccagcctggacagctgcccagagagctctgtgggcgctgtgagcagcctggaccggggctgcccagatgccccagcccccaccagcgcccccaccagccagcagcctgagcctgtgctgggcctgggctctgtggagcagccccatgaggtgcccagcgtgctgggcacccccctgctgcagcccccagagaacctggccaagggccagcccagcacccctgtggaccggcccctgggccctgaccccagcgcccctggcaccctggccggggccgccctgccccccctggagcccccagccccctgcctgtgccaggacccccaggaggacagcgtggaggatgaggagcccccaggcagcctgggcctgcccccaccccaggccggcgtgcagcctgctgctgctgctgtgtctggcaccacccagcccctgggcaccggcccccgggtgtccctgagcccccacagccccctgctgagccccaaggtggcctccatggatgccaaggacctggccctgcagatcctgcccccctgccaggtgcccccacccagcggcccccagagccctgctggcccccagggcctgagcgcccctgagcagcaggaggatgaggacagcctggaggaggacagcccccgggccctgggcagcggccagcacagcgacagccacggggagagcagcgctgagctggatgagcaggacatcctggccccccagacagtgcagtgcccagcccaggccccagctgggggcagcgaggagaccatcgccaaggccaagcagagccgctctgagaagaaggccaggaaggccatgagcaagctgggcctgcggcagatccagggcgtgacccgcatcaccatccagaagagcaagaacatcctgtttgtgattgccaagccagatgtgttcaagagccctgccagtgacacctacgtggtgtttggagaggccaagattgaggacctgagccagcaggtgcacaaggctgctgctgagaagttcaaggtgcccagcgagcccagcgccctggtgcctgagagcgccccccggccccgggtgcggctggagtgcaaggaggaggaggaggaggaggaggaggaggtggatgaagctggcctggagctgcgggacatcgagctggtgatggcccaggccaacgtgtcccgggccaaggctgtgcgggccctgcgggacaaccacagcgacatcgtgaatgccatcatggagctgaccatgtag

SEQ ID NO: 21857 - DNA, 3294 bp, synthetic construct; identical to SEQ ID NO: 19486
  source 1..3294: mol_type = other DNA; note = Synthetic coding sequence

SEQ ID NO: 21858 - DNA, 1011 bp, synthetic construct
  source 1..1011: mol_type = other DNA; note = Synthetic coding sequence
atgaaggccacagccatgaccagcgcctggctggcccagggcggggcccacgtgaccatcaatgcccgggcagaggaggatgtggagcctgagtgcatcatggagaaggtggccaaggccagcggggccaactacagcttccacaaggagagcggccgcttccaggatgtgggcccccaggcccctgtgggctctgtgtaccagaagaccaatgctgtgtctgagatcaagagggtgggcaaggacagcttctgggccaaggccgagaaggaggaggagaacagaaggctggaggagaagagaagagctgaggaggcccagaggcagctggagcaggagcggcgggagcgggagctgcgggaggccgcccggcgggagcagcgctaccaggagcagggcggggaggccagcccccagagcaggacctgggagcagcagcaggaggtggtgtccaggaacagaaatgagcaggagagcgctgtgcacccccgggagatcttcaagcagaaggagcgggccatgagcaccaccagcatcagcagcccccagcccgggaagctgcggagccccttcctgcagaagcagctgacccagcctgagacccacttcggccgggagcctgctgctgccatcagccggcccagggctgacctgcctgctgaggagcccgcccccagcaccccaccctgcctggtgcaggccgaggaggaggccgtgtatgaggagcccccagagcaggagaccttctatgagcagccccccctggtgcagcagcagggcgccggcagcgagcacatcgaccaccacatccagggccagggcctgagcggccagggcctgtgtgcccgggccctgtatgactaccaggccgcagatgacacagagatcagctttgatcctgaaaatctcatcactggaattgaggtgattgatgagggctggtggaggggctacggcccagatggccacttcggcatgtttcctgccaactacgtggagctgattgaatag

SEQ ID NO: 21859 - DNA, 78 bp, synthetic construct
  source 1..78: mol_type = other DNA; note = Synthetic coding sequence
atgtggatgcacgtggccaaggtgcaccccaagggcggggagatggtgggcgccatcagaaatgctgccttcctgtag

SEQ ID NO: 21860 - DNA, 312 bp, synthetic construct; identical to SEQ ID NO: 21772
  source 1..312: mol_type = other DNA; note = Synthetic coding sequence

SEQ ID NO: 21861 - DNA, 4101 bp, synthetic construct
  source 1..4101: mol_type = other DNA; note = Synthetic coding sequence
atggctgacacagacctcttcatggagtgtgaggaggaggagctggagccctggcagaagatcagtgatgtgattgaggacagcgtggtggaggactacaacagcgtggacaagaccaccacagctggcaaccccctggtgcagcagggcggccagcccctcatcctgacccagaacccagcccctggcctgggcaccatggtgacccagcctgtgctgcggcctgtgcaggtgatgcagaatgccaaccacgtgaccagcagccctgtggccagccagcccatcttcatcaccacccagggcttccctgtgagaaatgtgcggcctgtgcagaatgccatgaaccaggtgggcatcgtgctgaatgtgcagcagggccagacagtgcggcccatcaccctggtgcctgcccctggcacccagtttgtgaagcccaccgtgggcgtgccccaggtgttcagccagatgacccctgtgcggcccggcagcaccatgcctgtgcggcccaccaccaacaccttcaccaccgtcatcccagccaccctgaccatccgcagcacagtgccccagagccagagccagcagaccaagagcacccccagcaccagcaccacccccacagccacccagcccaccagcctgggccagctggccgtgcagagccctggccagagcaaccagaccaccaaccccaagctggcccccagcttccccagccccccagctgtgtccatcgccagctttgtgacagtgaagaggcctggggtgactggagagaacagcaatgaggtggccaagctggtgaacaccctgaacaccatccccagcctgggccagagccctggccctgtggtggtgagcaacaacagcagcgcccacggcagccagaggaccagcggccctgagagctccatgaaggtgaccagcagcatccctgtgtttgacctgcaggacggcggcaggaagatctgcccccgctgcaatgcccagttccgggtgacagaggccctgcggggccacatgtgctactgctgcccagagatggtggagtaccagaagaagggcaagagcctggacagcgagcccagcgtgcccagcgctgccaagccacccagccctgagaagacagcccctgtggccagcacccccagcagcacccccatcccagccctgagcccccccaccaaggtgcctgagcccaatgaaaatgtgggagatgctgtgcagaccaagctgatcatgctggtggatgacttctactacggcagagatggcggcaaggtggcccagctgaccaacttccccaaggtggccaccagcttccgctgcccccactgcaccaagaggctgaagaacaacatccgcttcatgaaccacatgaagcaccacgtggagctggaccagcagaatggagaggtggatggccacaccatctgccagcactgctaccggcagttcagcacccccttccagctgcagtgccacctggagaatgtgcacagcccctatgagagcaccaccaagtgcaagatctgtgagtgggcctttgagagcgagcccctcttcctgcagcacatgaaggacacccacaagccaggagagatgccctacgtgtgccagccctacttccccagctatgtgacccaggtgtgccagtaccgcagcagcctgtacagcgaggtggatgtgcacttcaggatgattcatgaggacaccaggcacctgctgtgcccctactgcctgaaggtgttcaagaatggaaatgccttccagcagcactacatgaggcaccagaagagaaatgtgtaccactgcaacaagtgccgcctgcagttcctgtttgccaaggacaagattgagcacaagctgcagcaccacaagaccttcaggaagcccaagcagctggagggcctgaagccaggcaccaaggtgaccatccgggccagccggggccagcccaggacagtgcctgtgagcagcaatgacaccccacccagcgccctgcaggaggccgcccccctgaccagctccatggaccccctgcccgtcttcctgtacccacctgtgcagaggagcatccagaagagagctgtgaggaagatgtctgtgatgggccggcagacctgcctggagtgcagctttgagatcccagacttccccaaccacttccccacctacgtgcactgcagcctgtgccgctacagcacctgctgcagccgggcctatgccaaccacatgatcaacaaccacgtgcccaggaagagccccaagtacctggccctcttcaagaacagcgtgtctggcatcaagctggcctgcaccagctgcacctttgtgacctctgtgggagatgccatggccaagcacctggtgttcaaccccagccacaggagcagcagcatcctgccccggggcctgacctggatcgcccacagccgccacggccagacccgggacagagtgcatgacagaaatgtgaagaacatgtaccccccacccagcttccccaccaacaaggccgccaccgtgaagtctgctggggccaccccagctgagcctgaggagctgctgacccccctggccccagccctgcccagccctgccagcacagccaccccaccacccacccccacccacccccaggccctggccctgccccccctggccacagagggcgctgagtgcctgaatgtggatgaccaggatgagggcagccctgtgacccaggagcctgagctggccagcggcggcggcggcagcggcggcgtgggcaagaaggagcagctgtctgtgaagaagctgcgggtggtgctgtttgccctgtgctgcaacacagagcaggccgctgagcacttcaggaacccccagaggcgcatccgccgctggctgcggcgcttccaggccagccagggcgagaacctggagggcaagtacctgagctttgaagctgaggagaagctggccgagtgggtgctgacccagcgggagcagcagctgcctgtgaatgaggagaccctcttccagaaggccaccaagattggccgcagcctggagggcggcttcaagatctcctatgagtgggccgtgcgcttcatgctgcggcaccacctgaccccccacgcccggcgggctgtggcccacaccctgcccaaggatgtggctgaaaatgccggcctcttcatcgactttgtgcagaggcagatccacaaccaggacctgcccctgtccatgattgtggccattgatgagatcagcctcttcctggacacagaggtgctgagcagtgatgacagaaaagaaaatgccctgcagacagtgggcaccggggagccctggtgtgatgtggtgctggccatcctggctgatggcaccgtgctgcccaccctggtgttctaccggggccagatggaccagcctgccaacatgccagacagcatcctgctggaggccaaggagagcggctacagtgatgatgagatcatggagctgtggagcaccagggtgtggcagaagcacacagcctgccagaggagcaagggcatgctggtgatggactgccacaggacccacctgtctgaggaggtgctggccatgctgagcgccagcagcaccctgcctgctgtggtgcctgctggctgcagcagcaagatccagcccctggatgtgtgcatcaagaggacagtgaagaacttcctgcacaagaagtggaaggagcaggcccgggagatggctgacacagcctgtgacagtgatgtgctgctgcagctggtgctggtgtggctgggggaggtgctgggcgtcatcggggactgcccagagctggtgcagaggagcttcctggtggcctctgtgctgcccggcccagatggcaacatcaacagccccaccagaaatgctgacatgcaggaggagctgattgccagcctggaggagcagctgaagctgagcggggagcacagcgagagcagcaccccccggcccaggagcagccctgaggagaccatcgagcctgagagcctgcaccagctgtttgaaggagagagcgagacagagagcttctacggctttgaggaggccgacctggacctgatggagatctag

SEQ ID NO: 21862 - DNA, 564 bp, synthetic construct
  source 1..564: mol_type = other DNA; note = Synthetic coding sequence
atggacatcagcaagggcctgcccggcatgcagggcggcctgcacatctggatcagcgagaacaggaagatggtgcctgtgcctgagggcgcctacggcaacttctttgaggagcactgctacgtgatcctgcacgtgccccagagccccaaggccacccagggcgccagcagtgacctgcactactgggtgggcaagcaggccggggctgaggcccagggcgctgctgaggccttccagcagaggctgcaggatgagctgggcggccagacagtgctgcaccgggaggcccagggccacgagagtgactgcttctgcagctacttccggcccggcatcatctacagaaaaggaggcctggccagtgacctgaagcacgtggagaccaacctcttcaacatccagaggctgctgcacatcaagggcaggaagcacgtgtctgccacagaggtggagctgtcctggaacagcttcaacaagggggacatcttcctgctggacctgggcaagatgatgatccagtggaatggccccaagaccagcatcagcgagaaggccaggtag

SEQ ID NO: 21863 - DNA, 1329 bp, synthetic construct
  source 1..1329: mol_type = other DNA; note = Synthetic coding sequence
atgcccctggagaacctggaggaggagggcctgcccaagaacccagacctgagaattgcccagctgcgcttcctgctgagcctgcctgagcacagaggagatgctgctgtgagagatgagctgatggctgctgtgcgggacaacaacttctggaaccgcatccggcaggagcagacagaggactgcccccccagcagccccagccggggctggcactgccaggactggcccagcaggaagccacccaccagcatccggctgtgctttgccaagcccatcatcaagaggcacaggatgcccagctacatggccccctactatgaggccctgtgcaagagcctggactggcagattgatgtggacctgctgaacaagatgaagaaggccaatgaagatgagctgaagaggctggatgaggagctggaggatgctgagaagaacctgggggagagcgagatcagagatgccatgatggccaaggccgagtacctgtgcagaattggagacaaggagggcgccctgacagccttcaggaagacctatgacaagacagtggccctgggccaccggctggacatcgtgttctacctgctgcgcatcggcctcttctacatggacaatgacctgatcaccaggaacacagagaaggccaagagcctgattgaggagggcggggactgggacagaagaaaccggctgaaggtgtaccagggcctgtactgtgtggccatccgggacttcaagcaggccgctgagctgttcctggacacagtgtccaccttcaccagctatgagctgatggactacaagacctttgtgacctacacagtgtatgtgtccatgattgccctggagaggccagacctgcgggagaaggtgatcaagggagctgagatcctggaggtgctgcacagcctgcctgctgtgcggcagtacctgttcagcctgtatgagtgccgctacagcgtcttcttccagagcctggccgtggtggagcaggagatgaagaaggactggctgtttgccccccactaccgctactacgtgcgggagatgagaattcatgcctacagccagctgctggagagctaccgcagcctgaccctgggctacatggccgaggccttcggcgtgggcgtggagttcatcgaccaggagctgagccgcttcatcgctgctggccgcctgcactgcaagattgacaaggtgaatgagatcgtggagaccaacagaccagacagcaagaactggcagtaccaggagaccatcaagaagggggacctgctgctgaacagagtgcagaagctgagcagggtcatcaacatgtag

SEQ ID NO: 21864 - DNA, 333 bp, synthetic construct
  source 1..333: mol_type = other DNA; note = Synthetic coding sequence
atgctgtgctggggcaatgccagctttggccagctgggcctgggcggcattgatgaggagatcgtgctggagcccaggaagagtgacttcttcatcaacaagagggtgagagatgtgggctgcggcctgcggcacacagtgtttgtgctggatgatggcaccgtgtacacctgtggctgcaatgacctgggccagctgggccacgagaagagcaggaagaagccagagttccgcagctgcttccctggccgcagcgccatggcccccagccggctgacagccaccagcgccagccaggtgcaggccatcctgctgccccagcccccagagtag

SEQ ID NO: 21865 - DNA, 930 bp, synthetic construct
  source 1..930: mol_type = other DNA; note = Synthetic coding sequence
atggtgtgctggcagagcgtgtctgtgtggagcgtggccggccgggtggagatgacagtgtccaagttcatggccatccagaaggccctgcagcctgactggttccagtgcctgagtgatggagaggtgtcctgcaaggaggccaccagcatcaagagggtgaggaagtctgtggacaggagcctgctcttcctggacaactgcctgcggctgcaggaggagagcgaggtgctgcagaagagcgtcatcatcggcgtgattgaaggaggagatgtgatggaggagcggctgcggagcgcccgggagacagccaagaggcctgtgggcggcttcctgctggatggcttccagggcaaccccaccaccctggaggcccggctgcggctgctgagctctgtgacagctgagctgcctgaggacaagcccaggctcatcagcggcgtgtccaggccagatgaggtgctggagtgcatcgagcggggcgtggacctgtttgagagcttcttcccctaccaggtgacagagcggggctgtgccctgaccttctcctttgactaccagcccaaccctgaggagaccctgctgcagcagaatggcacccaggaggagatcaagtgcatggaccagatcaagaagattgagaccaccggctgcaaccaggagatcaccagctttgagatcaacctgaaggagaagaagtaccaggaggacttcaaccccctggtgcggggctgcagctgctactgctgcaagaaccacacccgggcctacatccaccacctgctggtgaccaatgagctgctggccggcgtgctgctgatgatgcacaactttgagcactacttcggcttcttccactacatccgggaggccctgaagagtgacaagctggcccagctgaaggagctgatccaccggcaggccagctag

SEQ ID NO: 21866 - DNA, 384 bp, synthetic construct
  source 1..384: mol_type = other DNA; note = Synthetic coding sequence
atggtgctgatcctgggccgccgcctgaaccgggaggacctgggcgtgcgggacagccctgccaccaagaggaaggtgtttgagatggaccccaagagcctgactggacatgagttctttgacttcagcagcggcagcagccatgctgagaacatcctgcagatcttcaatgagttccgggacagccgcctcttcacagatgtgatcatctgtgtggagggcaaggagttcccctgccacagagctgtgctgagcgcctgcagcagctacttccgggccatgttctgcaatgaccaccgggagagccgggagatgctggtggagatcaatggcatcctggccgaggccatggagtgcttcctgcagtatgtgtacacaggatag

SEQ ID NO: 21867 - DNA, 1581 bp, synthetic construct; identical to SEQ ID NO: 21050
  source 1..1581: mol_type = other DNA; note = Synthetic coding sequence

SEQ ID NO: 21868 - DNA, 195 bp, synthetic construct
  source 1..195: mol_type = other DNA; note = Synthetic coding sequence
atgcctgaggaccaggtgggcaagctggaggccacagagaacaccatcagcgccatggctgctgctgctgctgagcagcagcagttctacctgctgctgggcaacctgctgagcccagacaacgtggtgaggaagcaggccgaggagacctatgagaacatccctggccagagcaagatcaccttcctgctgtag

SEQ ID NO: 21869 - DNA, 741 bp, synthetic construct; identical to SEQ ID NO: 18792
  source 1..741: mol_type = other DNA; note = Synthetic coding sequence

SEQ ID NO: 21870 - DNA, 1296 bp, synthetic construct
  source 1..1296: mol_type = other DNA; note = Synthetic coding sequence
atggccgccaacctgagcagaaatggacctgccctgcaggaggcctacgtgcgggtggtgacagagaagagccccacagactgggccctcttcacctatgagggcaacagcaatgacatccgggtggccggcactggagagggcggcctggaggagatggtggaggagctgaacagcggcaaggtgatgtatgccttctgccgggtgaaggaccccaacagcggcctgcccaagtttgtgctgatcaactggacaggagagggcgtgaatgatgtgaggaagggggcctgtgccagccacgtgtccaccatggccagcttcctgaagggggcccacgtgaccatcaatgcccgggcagaagaagatgtggagcctgagtgcatcatggagaaggtggccaaggccagcggggccaactacagcttccacaaggagagcggccgcttccaggatgtgggcccccaggcccctgtgggctctgtgtaccagaagaccaatgctgtgtctgagatcaagagggtgggcaaggacagcttctgggccaaggccgagaaggaggaggagaacagaaggctggaggagaagagaagagctgaggaggcccagaggcagctggagcaggagcggcgggagcgggagctgcgggaggccgcccggcgggagcagcgctaccaggagcagggcggggaggccagcccccagagcaggacctgggagcagcagcaggaggtggtgtccaggaacagaaatgagcaggagagcgctgtgcacccccgggagatcttcaagcagaaggagcgggccatgagcaccaccagcatcagcagcccccagcccgggaagctgcggagccccttcctgcagaagcagctgacccagcctgagacccacttcggccgggagcctgctgctgccatcagccggcccagggctgacctgcctgctgaggagcccgcccccagcaccccaccctgcctggtgcaggccgaggaggaggccgtgtatgaggagcccccagagcaggagaccttctatgagcagccccccctggtgcagcagcagggcgccggcagcgagcacatcgaccaccacatccagggccagggcctgagcggccagggcctgtgtgcccgggccctgtatgactaccaggccgcagatgacacagagatcagctttgatcctgagaacctgatcaccggcatcgaggtgattgatgagggctggtggaggggctacggcccagatggccacttcggcatgtttcctgccaactacgtggagctgattgaatag

SEQ ID NO: 21871 - DNA, 1854 bp, synthetic construct
  source 1..1854: mol_type = other DNA; note = Synthetic coding sequence
atgattgagaagatgcagggcagcaggatggatgagcagcgctgcagcttccccccacccctgaagacagaggaggactacatcccctaccccagcgtgcatgaggtgctgggccgggagggccccttccccctcatcctgctgccccagtttggaggctactggattgagggcaccaaccacgagatcaccagcatccctgagacagagcccctgcagagccccaccaccaaggtgaagctggagtgcaaccccacagcccgcatctacaggaagcacttcctgggcaaggagcacttcaactactacagcctggatgctgccctgggccacctggtgttcagcctgaagtatgatgtgattggagaccaggagcacctgcggctgctgctgcggaccaagtgcaggacctaccatgatgtgatccccatcagctgcctgacagagttccccaacgtggtgcagatggccaagctggtgtgtgaagatgtgaatgtggaccgcttctaccctgtgctgtaccccaaggccagccggctgattgtgacctttgatgaacatgtgatcagcaacaacttcaagtttggagtcatctaccagaagctgggccagaccagcgaggaggagctgttcagcaccaatgaggagagccctgcctttgtggagttcctggagttcctgggccagaaggtgaagctgcaggacttcaagggcttccggggcggcctggatgtgacccacggccagacaggaacagagagcgtgtactgcaacttcaggaacaaggagatcatgtttcatgtgtccaccaagctgccctacacagaaggagatgcccagcagctgcagaggaagaggcacatcggaaatgacatcgtggccgtggtgttccaggatgagaacaccccatttgtgcctgacatgattgccagcaacttcctgcacgcctacgtggtggtgcaggccgagggcggcggcccagatggccccctgtacaaggtgtctgtgacagccagagatgatgtgcccttctttggaccacccctgcctgaccctgctgtgttcagaaaaggacctgagttccaggagttcctgctgaccaagctgatcaatgcagaatatgcctgctacaaggccgagaagtttgccaagctggaggagaggaccagggctgccctgctggagaccctgtatgaggagctgcacatccacagccagagcatgatgggcctgggcggagatgaggacaagatggagaatggcagcggcggcggcggcttctttgagagcttcaagagggtcatccgcagccgcagccagagcatggatgccatgggcctgagcaacaagaagcccaacacagtgtccaccagccacagcggcagctttgcccccaacaacccagacctggccaaggccgccggcatcagcctgctgatccctgggaagagcgccagccgcttcggccggcggggcagcgccatcggcattggaacagtggaggaggtggtggtgagaggagctgctggcagcggcggctgcctgcacgccctcttcagcgcccggagccaggacggcggccacatcggagatgtggcccccctgcccccaggccaggcccctggccgggccggctggagcggcggcagcagtgatggcacccagcacctgctgtggggcctggtgcctgtgcctgagcctgtgcccctgacccggggcttctggccctgcctgggcccctgggaccccggccctgtgcctgcccgcatccgctaccccaaggccctgcaccctgctgcccggccccccatcagccctgtgtgcatggagcggcaccccagccccctgccctag

SEQ ID NO: 21872 - DNA, 1224 bp, synthetic construct
  source 1..1224: mol_type = other DNA; note = Synthetic coding sequence
atgggcaacaccagcttcaatgaggtgatggaggcccagctgcccagccatggaggccccaagcccagcgctgagagtgacatgggcacccggcgggactacatcatggccaagtatgtggagcacagatttgcccggcgctgcaccccagagccccagaggctgtggacagccatctgcaacagagacctgctgtctgtgctggaggcctttgccaacggccaggactttggccagcccctgcccggcccagatgcccaggcccctgaggagctggtgctgcacctggccgtgaaggtggccaaccaggccagcctgcccctggtggacttcatcatccagaatggaggccacctggatgccaaggccgcagatggcaacacagccctgcactatgctgccctgtacaaccagcctgactgcctgaagctgctgctgaagggccgggccctggtgggcaccgtgaatgaggccggggagacagccctggacatcgccaggaagaagcaccacaaggaatgtgaggagctgctggagcaggcccaggccggcacctttgccttccccctgcacgtggactacagctgggtgatcagcacagagcccggcagtgacagcgaggaggatgaggaggagaagcgctgcctgctgaagctgcctgcccaggcccactgggccagcggccgcctggacatcagcaacaagacctatgaaacagtggccagcctgggcgccgccaccccccagggcgagagcgaggactgccccccacccctgcctgtgaagaacagcagcaggaccctggtgcagggctgtgcccggcatgccagcggggacagaagtgaggtgagcagcctgagcagcgaggcccctgagaccccagagagcctgggcagccctgccagcagcagcagcctgatgagccccctggagcccggggaccccagccaggccccacccaacagcgaggagggcctgcgggagcccccaggcaccagccggcccagcctgaccagcggcaccacccccagcgagatgtacctgcctgtgcgcttcagcagcgagagcaccaggagctacagaagaggagcccggagcccagaagatggccccagcgcccggcagcccctgcccaggagaaatgtgcctgtgggcatcacagaaggagatggcagcaggacaggcagcctgcctgccagctctgtgcagctgctgcaggactag

SEQ ID NO: 21873 - DNA, 813 bp, synthetic construct
  source 1..813: mol_type = other DNA; note = Synthetic coding sequence
atggccatggagatgaggctgcctgtggccaggaagcccctgtctgagcggctgggccgggacaccaagaagcacctggtggtgcctggggacaccatcaccacagacaccggcttcatgaggggccacggcacctacatgggagaggagaagctgattgcctctgtggccggctctgtggagcgggtgaacaagctgatctgtgtgaaggccctgaagacccgctacatcggggaggtgggggacatcgtggtgggccgcatcacagaggtgcagcagaagcgctggaaggtggagaccaacagccggctggacagcgtgctgctgctgagctccatgaacctgcccggcggggagctgcggcggcgctctgcagaagatgagctggccatgaggggcttcctgcaggagggggacctgatcagcctgggccagggcgtgctggtgcaggtgagccccagcctggtgaagaggcagaagacccacttccatgacctgccctgtggggccagcgtcatcctgggcaacaacggcttcatctggatctaccccaccccagagcacaaggaggaggaggccggcggcttcatcgccaacctggagcctgtgtccctggccgaccgggaggtgatcagccggctgaggaactgcatcatcagcctggtgacccagaggatgatgctgtatgacaccagcatcctgtactgctatgaggccagcctgccccaccagatcaaggacatcctgaagccagagatcatggaggagatcgtgatggagacccggcagaggctgctggagcaggagggctag

SEQ ID NO: 21874 - DNA, 297 bp, synthetic construct
  source 1..297: mol_type = other DNA; note = Synthetic coding sequence
atgcctgaggaccaggtgggcaagctggaggccacagagaacaccatcagcgccatggctgctgctgctgctgagcagcagcagttctacctgctgctgggcaacctgctgagcccagacaacgtggtgaggaagcaggccgaggagacctatgagaacatccctggccagagcaagatcaccttcctgctgcaggccatccggaacaccacagctgctgaggaggcccggcagatggctgctgtgctgctgcggcggctgctgagcagcgcctttgatgaggtgtacccagcctag

SEQ ID NO: 21875 - DNA, 306 bp, synthetic construct
  source 1..306: mol_type = other DNA; note = Synthetic coding sequence
atggatgaggtggagcaggaccagcacgaggcccggctgaaggagctgtttgacagctttgacaccactggaacaggcagcctgggccaggaggagctgacagacctgtgccacatgctgagcctggaggaggtggcccctgtgctgcagcagaccctgctgcaggacaacctgctgggccgggtgcactttgaccagttcaaggaggccctgatcctgatcctgagcaggaccctgagcaatgaggagcacttccaggagccagactgcagcctggaggcccagcccaagtatgtgcggggctag

SEQ ID NO: 21876 - DNA, 1065 bp, synthetic construct
  source 1..1065: mol_type = other DNA; note = Synthetic coding sequence
atggcccacagccctgtggccgtgcaggtgcccggcatgcagaacaacattgctgaccctgaggagctgttcaccaagctggagcgcatcggcaagggcagctttggagaggtgttcaagggcatcgacaacagaacccagcaggtggtggccatcaagatcatcgacctggaggaggctgaagatgaaattgaggacatccagcaggagatcaccgtgctgagccagtgtgacagcagctatgtgaccaagtactacggcagctacctgaagggcagcaagctgtggatcatcatggagtacctgggcggcggcagcgccctggacctgctgcgggccggcccctttgatgagttccagatcgccaccatgctgaaggagatcctgaagggcctggactacctgcacagcgagaagaagatccaccgggacatcaaggccgccaacgtgctgctgtctgagcagggagatgtgaagctggccgactttggagtggccggccagctgacagacacccagatcaagaggaacacctttgtgggcacccccttctggatggcccctgaggtgatccagcagagcgcctatgacagcaagaggcccacagccaaggagctgctgaagcacaagttcatcgtgaagaacagcaagaagaccagctacctgacagagctgattgaccgcttcaagcgctggaaggccgagggccacagtgatgatgaaagtgacagcgagggcagtgacagcgagagcaccagccgggagaacaacacccaccctgagtggagcttcaccaccgtgaggaagaagccagaccccaagaaggtgcagaatggagctgagcaggacctggtgcagaccctgagctgcctgtccatgatcatcaccccagcctttgctgagctgaagcagcaggatgaaaataatgccagcaggaaccaggccatcgaggagctggagaagagcattgctgtggccgaggccgcctgccccggcatcacagacaagatggtgaagaagctgattgagaagttccagaagtgcagcgcagatgagagcccctag

SEQ ID NO: 21877 - DNA, 522 bp, synthetic construct; identical to SEQ ID NO: 21841
  source 1..522: mol_type = other DNA; note = Synthetic coding sequence

SEQ ID NO: 21878 - DNA, 801 bp, synthetic construct
  source 1..801: mol_type = other DNA; note = Synthetic coding sequence
tgacccagggctgctgcccgggtgcgggctgctggggaggccctggagaggagaagacgctggctgggccgcctgagccccagcgccccccggccccggcgggcccggcccagcctgcggcgggccagcgcctgggtgcgggacagagtggccggccggcctggggccctgcccggcttccaggccagcggcgtggccggggaggcccagaaggcccctggccaccctgctgccccagccccagctgccagctgcctgacagaagcagatggccgggtcttcctgcacgccttccggctggccctgatccagctgcagatcagcagcatcaagagtgacaacgtgacccgggcctgcagcttcatccgggaggccgccacccagggcgccaagatcgtgtccctgcctgagtgcttcaacagcccctatggagccaagtacttcccagaatatgcagagaagatccctggagagagcacccagaagctgtctgaggtggccaaggaatgttccatctacctgattggaggcagcatccctgaggaggatgctgggaagctgtacaacacctgtgctgtgtttggaccagatggcaccctgctggccaagtacaggaagatccacctgtttgatattgatgtgcctgggaagatcaccttccaggagagcaagaccctgagccctggggacagcttcagcacctttgacaccccctactgccgggtgggcctgggcatctgctatgacatgagatttgctgagctggcccagatctatgcccagagaggagaggccgtgtag

SEQ ID NO: 21879 - DNA, 216 bp, synthetic construct
  source 1..216: mol_type = other DNA; note = Synthetic coding sequence
atggacagcctgcctgatgagttctttgtgcgccaccctgctgtggaggaccagaggaaggaggagacagagaacaagctggagaagagcagcggccagctgaacaagcaggagaatgacatccccacagacctggtgcctgtgaacctgctgctggaggtgaagaagctgctgaatgccatcaacaccctgcccaagggcgtggtgccccactag

SEQ ID NO: 21880 - DNA, 2130 bp, synthetic construct
  source 1..2130: mol_type = other DNA; note = Synthetic coding sequence
atgtctgtggagagcgagcagctgactggagtgcccctggatgacagcgccatcacccccatgtgtgaggtgactggaggccgcagctacagcgtgtgcagccccaggatgctgaaccagtgcctggagagcctggtgcagaaggtgcagagcggcgtggtgatcaactttgagaaggccggccctgaccccagccctgtggaggatggccagcctgacatcagccggcccttcggcagccagccctggcacagctgccacaagctgatctacgtgcggcccaaccccaagacaggagtgcccatcggccactggcctgtgcctgagagcttctggccagaccagaacagccccaccctgccccccaggaccagccaccctgtggtgaagttcagctgcacagactgtgagcccatggtgattgacaagctgccctttgacaagtatgagctggagcccagccccctgacccagttcatcctggagaggaagagcccccagacctgctggcaggtgtatgtgagcaacagcgccaagtacagcgagctgggccaccccttcggctacctgaaggccagcacagccctgaactgtgtgaacctgtttgtgatgccctacaactaccctgtgctgctgcccctgctggatgacctcttcaaggtgcacaaggccaagcccaccctgaagtggaggcagagctttgagagctacctgaagaccatgccaccctactacctgggccccctgaagaaggctgtgaggatgatgggcgcccccaacctgattgctgacagcatggagtatggcctgagctacagcgtcatctcctacctgaagaagctgagccagcaggccaagattgaaagtgacagagtgattggctctgtgggcaagaaggtggtgcaggagaccggcatcaaggtgcgcagccgcagccacggcctgtccatggcctacaggaaggacttccagcagctgctgcagggcatcagtgaagatgtgccccaccggctgctggacctgaacatgaaggagtacacaggcttccaggtggccctgctgaacaaggacctgaagccccagaccttcagaaatgcctatgacatccccaggaggaacctgctggaccacctgaccaggatgaggagcaacctgctgaagagcacccggcgcttcctgaagggccaggatgaggaccaggtgcacagcgtgcccatcgcccagatgggcaactaccaggagtacctgaagcaggtgcccagccccctgcgggagctggaccctgaccagccccggcggctgcacacctttggaaaccccttcaagctggacaagaagggcatgatgattgatgaagcagatgaatttgtggccggcccccagaacaagcacaagaggcctggagagcccaacatgcagggcatccccaagagaagacgctgcatgagccccctgctgcggggccggcagcagaaccctgtggtgaacaaccacatcggcggcaagggccccccagcccccaccacccaggcccagcctgacctgatcaagcccctgcccctgcacaagatcagcgagaccaccaatgacagcatcatccatgatgtggtggagaaccacgtggccgaccagctgagcagtgacatcaccccaaatgccatggacacagagttcagcgccagcagccctgccagcctgctggagcggcccaccaaccacatggaggccctgggccatgaccacctgggcaccaatgacctgactgtgggcggcttcctggagaaccacgaggagccccgggacaaggagcagtgtgccgaggagaacatcccagccagcagcctgaacaagggcaagaagctgatgcactgccgcagccatgaggaggtgaacacagagctgaaggcccagatcatgaaggagatcaggaagccaggcaggaaatatgagcgcatcttcaccctgctgaagcacgtgcagggcagcctgcagaccaggctcatcttcctgcagaatgtcatcaaggaggccagccgcttcaagaagaggatgctgattgagcagctggagaacttcctggatgagatccaccggcgggccaaccagatcaaccacatcaacagcaactag

SEQ ID NO: 21881 - DNA, 387 bp, synthetic construct
  source 1..387: mol_type = other DNA; note = Synthetic coding sequence
atggccagcagcaacacagtgctgatgaggctggtggccagcgcctacagcatcgcccagaaggccggcatgattgtgagaagagtgattgctgagggggacctgggcatcgtggagaagacctgtgccacagacctgcagaccaaggctgaccggctggcccagatgagcatctgcagcagcctggccaggaagttccccaagctgaccatcatcggggaggaggacctgcccagcgaggaggtggaccaggagctgattgaggacagccagtgggaggagatcctgaagcagccctgccccagccagtacagcgccatcaaggaggaggacctggtggtgtgggtggaccccctggatggcaccaaggagtacacagagggctag

SEQ ID NO: 21882 - DNA, 237 bp, synthetic construct; identical to SEQ ID NO: 18655
  source 1..237: mol_type = other DNA; note = Synthetic coding sequence

SEQ ID NO: 21883 - DNA, 171 bp, synthetic construct
  source 1..171: mol_type = other DNA; note = Synthetic coding sequence
atggtgatggagaagcccagccccctgctggtgggccgggagtttgtgcggcagtactacaccctgctgaacaaggcccctgagtacctgcaccgcttctacggcaggaacagcagctatgtgcacggcggcgtggatgccagcggcaagccccaggaggccgtgtactag

SEQ ID NO: 21884 - DNA, 357 bp, synthetic construct
  source 1..357: mol_type = other DNA; note = Synthetic coding sequence
atgaagatctttgtgggcaatgtggatggagctgacaccaccccagaggagctggccgccctgtttgccccctatggaacagtgatgagctgtgctgtgatgaagcagtttgcctttgtgcacatgagagaaaatgctggggccctgcgggccatcgaggccctgcacggccacgagctgcggcccggccgggccctggtggtggagatgagccggccccggcccctgaacacctggaagatctttgtgggcaatgtgtctgctgcctgcaccagccaggagctgcggagcctgtttgaaagaagaggccgggtgattgaatgtgatgtggtgaagggcggcatgtgtgtgggctag

SEQ ID NO: 21885 - DNA, 438 bp, synthetic construct
  source 1..438: mol_type = other DNA; note = Synthetic coding sequence
atgagcagcccccgggacttccgggcagagcctgtgaatgactatgagggcaatgacagcgaggccgaggacctgaacttccgggagaccctgcccagcagcagccaggagaacacccccaggagcaaggtgtttgagaacaaggtgaacagcgagaaggtgaagctgagcctgaggaacttcccccacaatgactatgaagatgtgtttgaggagcccagcgagagcggcagtgaccccagcatgtggacagcccggggccccttccggcgggaccgctggagcagtgaagatgaggaggccgccggccccagccaggccctgagccccctgctgtctgtgcagcaccacggctacagcggccccaatgaaagaaccaccttctggcacggcagcaatgaaggagctgtgtccctgctgctgcgctactgtgcctag

SEQ ID NO: 21886 - DNA, 438 bp, synthetic construct; identical to SEQ ID NO: 20460
  source 1..438: mol_type = other DNA; note = Synthetic coding sequence

SEQ ID NO: 21887 - DNA, 444 bp, synthetic construct; identical to SEQ ID NO: 19235
  source 1..444: mol_type = other DNA; note = Synthetic coding sequence

SEQ ID NO: 21888 - DNA, 300 bp, synthetic construct
  source 1..300: mol_type = other DNA; note = Synthetic coding sequence
atggatgagagcgccctgctggacctgctggagtgccctgtgtgcctggagcggctggatgccagcgccaaggtgctgccctgccagcacaccttctgcaagcgctgcctgctgggcatcgtgggcagcagaaatgagctgcgctgcccagaatgtaggaccctggtgggcagcggcgtggaggagctgcccagcaacatcctgctggtgcggctgctggatggcatcaagcagaggccctggaagccaggccctgggggcggcagcggcaccaactgcaccaatgccctgcggagctag

SEQ ID NO: 21889 - DNA, 3675 bp, synthetic construct
  source 1..3675: mol_type = other DNA; note = Synthetic coding sequence
atggccctgcggcctggagctggcagcggcggcggcggcgctgctggagctggagctggcagcgctgggggcggcggcttcatgtttcctgtggccggcggcatccggcccccccaggccggcctgatgcccatgcagcagcagggcttccccatggtgtctgtgatgcagcccaacatgcagggcatcatgggcatgaactacagcagccagatgagccagggccccatcgccatgcaggccggcatccccatgggccccatgcctgctgctggcatgccctacctgggccaggcccccttcctgggcatgaggcctcctggcccccagtacaccccagacatgcagaagcagtttgctgaggagcagcagaagagatttgagcagcagcagaagctgctggaggaggagaggaagaggcggcagtttgaggagcagaagcagaagctgcggctgctgagctctgtgaagcccaagacaggagagaagagcagagatgatgccctggaggccatcaagggcaacctggatggcttcagcagagatgccaagatgcaccccaccccagccagccaccccaagaagccaggagtgggcgtcttccccagccaggaccctgcccagcccaggatgccaccctggatctacaatgaaagcctggtgcctgatgcctacaagaagatcctggagaccaccatgacccccaccggcatcgacacagccaagctgtaccccatcctgatgagcagcggcctgccccgggagaccctgggccagatctgggccctggccaacagaaccaccccaggcaagctgaccaaggaggagctgtacacagtgctggccatgattgctgtgacccagaggggcgtgcctgccatgagcccagatgccctgaaccagtttcctgctgcccccatccccaccctgagcggcttctccatgaccctgcccacccctgtgtcccagcccaccgtcatccccagcggccctgctggctccatgcccctgagcctgggccagcctgtgatgggcatcaacctggtgggccctgtgggcggggccgccgcccaggccagcagcggcttcatccccacctacccagccaaccaggtggtgaagccagaagaagatgacttccaggacttccaggatgccagcaagagcggcagcctggatgacagcttcagtgacttccaggagctgcctgccagcagcaagaccagcaacagccagcacggcaacagcgcccccagcctgctgatgcccctgcccggcaccaaggccctgcccagcatggacaagtatgctgtgttcaagggcattgctgctgacaagagcagtgaaaatacagtgcccccaggggaccccggggacaagtacagcgccttccgggagctggagcagacagctgagaacaagcccctgggggagagctttgctgagttccgctctgctggaacagatgatggcttcacagacttcaagacagctgacagcgtgagccccctggagccccccaccaaggacaagaccttcccccccagcttccccagcggcaccatccagcagaagcagcagacccaggtgaagaaccccctgaacctggccgacctggacatgttcagctctgtgaactgcagcagcgagaagcccctgtccttctctgctgtgttcagcaccagcaagtctgtgtccaccccccagagcactggatctgctgccaccatgacagccctggccgccaccaagaccagcagcctggctgatgactttggagagttcagcctgtttggagagtacagcggcctggcccctgtgggggagcaggatgactttgctgacttcatggccttcagcaacagcagcatcagcagcgagcagaagccagatgacaagtatgatgccctgaaggaggaggccagccctgtgcccctgaccagcaatgtgggcagcacagtgaagggcggccagaacagcacagctgccagcaccaagtatgatgtgttccggcagctgagcctggagggcagcggcctgggcgtggaggacctgaaggacaacaccccatctgggaagagtgatgatgactttgctgacttccacagcagcaagttcagcagcatcaacagcgacaagagcctgggggagaaggctgtggccttccgccacaccaaggaggacagcgcctctgtgaagagcctggacctgcccagcatcggcggcagctctgtgggcaaggaggacagtgaagatgccctgtctgtgcagtttgacatgaagctggctgatgtgggcggggacctgaagcacgtgatgtctgacagcagcctggacctgcccaccgtgtctggccagcaccccccagctgctgacatcgaggacctgaagtatgctgccttcggcagctacagcagcaactttgctgtgtccaccctgaccagctatgactggagcgacagagatgatgccacccagggcaggaagctgagcccctttgtgctgtctgctggcagcggcagccccagcgccaccagcatcctgcagaagaaggagaccagctttggcagcagcgagaacatcaccatgaccagcctgagcaaggtgaccacctttgtgtctgaagatgccctgcctgagaccaccttccctgccctggccagcttcaaggacaccatcccccagaccagcgagcagaaggagtatgaaaatagagactacaaggacttcaccaagcaggacctgcccacagctgagaggagccaggaggccacctgccccagccctgccagcagcggggccagccaggagaccccaaatgaatgttctgatgactttggagagttccagagcgagaagcccaagatcagcaagtttgacttcctggtggccaccagccagagcaagatgaagagcagcgaggagatgatcaagtctgagctggccacctttgacctgtctgtgcagggcagccacaagaggagcctgagcctgggggacaaggagatcagccgcagcagccccagccctgccctggagcagcccttccgggacaggagcaacaccctgaatgagaagccagccctgcccgtcatccgggacaagtacaaggacctgaccggggaggtggaggagaatgaaagatatgcctatgagtggcagcgctgcctgggcagcgccctgaatgtcatcaagaaggccaatgacaccctgaatggcatcagcagcagctctgtgtgcacagaggtgatccagagcgcccagggcatggagtacctgctgggcgtggtggaggtgtacagagtgaccaagagggtggagctgggcatcaaggccacagctgtgtgcagcgagaagctgcagcagctgctgaaggacatcgacaaggtgtggaacaacctgattggcttcatgagcctggccaccctgaccccagatgagaacagcctggacttcagcagctgcatgctgcggcccggcatcaagaatgcccaggagctggcctgtggggtgtgcctgctgaatgtggacagccgcagccgggccttcaacagcgagacagacagcttcaagctggcctacggcggccaccagtaccacgccagctgtgccaacttctggatcaactgtgtggagcccaagcccccaggcctggtgctgcctgacctgctgtag

SEQ ID NO: 21890 - DNA, 354 bp, synthetic construct; identical to SEQ ID NO: 20420
  source 1..354: mol_type = other DNA; note = Synthetic coding sequence

SEQ ID NO: 21891 - DNA, 621 bp, synthetic construct; identical to SEQ ID NO: 20459
  source 1..621: mol_type = other DNA; note = Synthetic coding sequence

SEQ ID NO: 21892 - DNA, 582 bp, synthetic construct
  source 1..582: mol_type = other DNA; note = Synthetic coding sequence
atggaggagaccatcaaggacccccccaccagcgctgtgctgctggaccactgccacttcagccaggtgatcttcaacagcgtggagaagttctacatccctggaggagatgtgacctgccactacaccttcacccagcacttcatccccaggaggaaggactggattggcatcttccgggtgggctggaagaccacccgggagtactacaccttcatgtgggtgaccctgcccatcgacctgaacaacaagagcgccaagcagcaggaggtgcagttcaaggcctactacctgcccaaggatgatgagtactaccagttctgctacgtggatgaagatggagtggtgcggggggccagcatccccttccagttccggccagaaaatgaggaggacatcctggtggtgaccacccagggcgaggtggaggagattgagcagcacaacaaggagctgtgcaaggagaaccaggagctgaaggacagctgcatcagcctgcagaagcagaacagcgacatgcaggccgagctgcagaagaagcaggaggagctggagaccctgcagagcatcaacaagaagtag

SEQ ID NO: 21893 - DNA, 156 bp, synthetic construct
  source 1..156: mol_type = other DNA; note = Synthetic coding sequence
atggacttcttcagcagccacctgctggccgacagcagcagccctgccaccaacagcagccacacagatgcccacgagatcctggtgtctgacttcctggtgtctgatgagaacctgcagaagatggagaatgtgctggacctgtggagcagctag

SEQ ID NO: 21894 - DNA, 513 bp, synthetic construct
  source 1..513: mol_type = other DNA; note = Synthetic coding sequence
atgagcagcaatgaatgcttcaagtgtggccgcagcggccactgggcccgggagtgccccactggaggcggccggggccggggcatgaggagccggggccggggcttccagtttgtgagcagcagcctgcctgacatctgctaccgctgtggggagagcggccacctggccaaggactgtgacctgcaggaggatgcctgctacaactgtggccggggcggccacatcgccaaggactgcaaggagcccaagcgggagcgggagcagtgctgctacaactgtgggaagccaggccacctggcccgggactgtgaccatgctgatgagcagaagtgctacagctgtggggagtttggccacatccagaaggactgcaccaaggtgaagtgctaccgctgtggggagaccggccacgtggccatcaactgcagcaagaccagcgaggtgaactgctaccgctgtggggagagcggccacctggccagagaatgtaccatcgaggccacagcctag

SEQ ID NO: 21895 - DNA, 399 bp, synthetic construct
  source 1..399: mol_type = other DNA; note = Synthetic coding sequence
atgaaccaggaggacctggaccctgacagcaccacagatgtgggagatgtgaccaacacagaggaggagctgatcagagaatgtgaggagatgtggaaggacatggaggagtgccagaacaagctgagcctgattggaacagagaccctgacagacagcaatgcccagctgagcctgctgatcatgcaggtgaagtgcctgacagctgagctgagccagtggcagaagaagaccccagagaccatccccctgacagaagatgtgctgatcaccctgggcaaggaggagttccagaagctgcggcaggacctggagatggtgctgagcaccaaggagagcaagaatgagaagctgaaggaggacctggagcgggagcagcgctggctggatgagcagtag

SEQ ID NO: 21896 - DNA, 1095 bp, synthetic construct
  source 1..1095: mol_type = other DNA; note = Synthetic coding sequence
atggtgaagctgttcatcggcaacctgccccgggaggccacagagcaggagatccgcagcctgtttgagcagtatggcaaggtgctggagtgtgacatcatcaagaactacggctttgtgcacatcgaggacaagacagctgctgaagatgccatccggaacctgcaccactacaagctgcatggagtgaacatcaacgtggaggccagcaagaacaagagcaagaccagcaccaagctgcacgtgggcaacatcagccccacctgcaccaacaaggagctgcgggccaagtttgaggagtatggccctgtgattgaatgtgacatcgtgaaggactatgcctttgtgcacatggagcgggcagaagatgctgtggaggccatccggggcctggacaacacagagttccagggcaagaggatgcacgtgcagctgagcaccagccggctgaggacagcccctggcatgggagaccagagcggctgctaccgctgtgggaaggagggccactggagcaaggagtgccccatcgacaggagcggccgggtggccgacctgacagagcagtacaatgagcagtacggggctgtgaggaccccctacaccatgtcctatggagacagcctgtactacaacaatgcctatggagccctggatgcctactacaagcgctgcagagctgcccggagctatgaagctgtggccgctgctgctgcctctgtgtacaactatgcagagcagaccctgagccagctgccccaggtgcagaacacagccatggccagccacctgaccagcaccagcctggacccctatgacagacacctgctgcccaccagcggggctgctgccacagctgctgctgctgctgctgctgctgctgctgtgacagctgccagcaccagctactacggccgggacaggagccccctgcggcgggccacagcccctgtgcccaccgtgggggagggctacggctacggccatgaaagtgagctgagccaggccagcgctgctgccaggaacagcctgtatgacatggcccgctatgaaagagagcagtatgctgaccgggcccgctacagcgccttctag

SEQ ID NO: 21897 - DNA, 420 bp, synthetic construct
  source 1..420: mol_type = other DNA; note = Synthetic coding sequence
atggccactggagacctgaagaggagcctgaggaacctggagcaggtgctgcggctgctgaactacccagaggaggtggactgtgtgggcctcatcaagggggaccctgctgccagcctgcccatcatctcctacagcttcaccagctacagcccctacgtgacagagctgatcatggagagcaatgtggagctgattgccaagaatgacctgcgcttcattgatgctgtgtacaagctgctgcgggaccagttcaactacaagcccatcctgaccaagaagcagttcatccagtgtggctttgctgagtggaagatccagatcgtgtgtgacatcctgaactgtgtgatgaagaagcacaaggagctgagcagcctgcagaagatccccagccagcagaggaagaagatcagcagctag

SEQ ID NO: 21898 - DNA, 450 bp, synthetic construct
  source 1..450: mol_type = other DNA; note = Synthetic coding sequence
atggccaacattgctgtgcagaggatcaagcgggagttcaaggaggtgctgaagtctgaggaggtgcgcttcatcaccaagatctggcaccccaacatcagctctgtgactggagccatctgcctggacatcctgaaggaccagtgggccgccgccatgaccctgaggacagtgctgctgagcctgcaggccctgctggccgctgctgagccagatgacccccaggatgctgtggtggccaaccagtacaagcagaaccctgagatgttcaagcagacagcccggctgtgggcccacgtgtatgctggggcccctgtgagcagccctgagtacaccaagaagattgagaacctgtgtgccatgggctttgacagaaatgctgtgattgtggccctgagcagcaagtcctgggatgtggagacagccacagagctgctgctgagcaactag

SEQ ID NO: 21899 - DNA, 597 bp, synthetic construct
  source 1..597: mol_type = other DNA; note = Synthetic coding sequence
atggtgatggagaagcccagccccctgctggtgggccgggagtttgtgcggcagtactacaccctgctgaacaaggcccctgagtacctgcaccgcttctacggcaggaacagcagctatgtgcacggcggcgtggatgccagcggcaagccccaggaggccgtgtatggccagaatgacatccaccacaaggtgctgagcctgaacttcagcgagtgccacaccaagatcagacatgtggatgcccacgccaccctgagtgatggagtggtggtgcaggtgatgggcctgctgagcaacagcggccagcctgagaggaagttcatgcagacctttgtgctggcccctgagggctctgtgcccaacaagttctacgtgcacaatgacatgttccgctatgaagatgaggtgtttggagacagcgagcctgagctggatgaggagagtgaagatgaggtggaggaggagcaggaggagcggcagcccagccctgagcctgtgcaggagaatgccaacagcggctactatgaggcccaccctgtgaccaatggaattgaggagcccctggaggagagcagccatgagcctgagccctag

SEQ ID NO: 21900 - DNA, 150 bp, synthetic construct
  source 1..150: mol_type = other DNA; note = Synthetic coding sequence
atgatgctgggcacagaaggaggagagggctttgtggtgaaggtgcggggcctgccctggagctgcagcgcagatgaggtgcagcgcttcttcagtgactgcaagatccagaatggagcccagggcatccgcttcatctacaccaggtag

SEQ ID NO: 21901 - DNA, 1266 bp, synthetic construct; identical to SEQ ID NO: 20986
  source 1..1266: mol_type = other DNA; note = Synthetic coding sequence

SEQ ID NO: 21902 - DNA, 1173 bp, synthetic construct; identical to SEQ ID NO: 18714
  source 1..1173: mol_type = other DNA; note = Synthetic coding sequence

SEQ ID NO: 21903 - DNA, 390 bp, synthetic construct
  source 1..390: mol_type = other DNA; note = Synthetic coding sequence
atgaagaggggccgcctgcccagcagcagtgaagattctgatgacaatggcagcctgagcaccacctggagccagaacagccgcagccagcaccggcgcagcagctgcagcagacatgaggacaggaagcccagcgaggtgttcagaacagacctgatcacagccatgaagctgcatgacagctaccagctgaacccagatgagtactacgtgctggccgacccctggaggcaggagtgggagaagggcgtgcaggtgcctgtgtccccaggcaccatcccccagcctgtggcccgggtggtgtctgaggagaagagcctgatgttcatccggcccaagaagtacatcgtgagcagcggcagcgagcccccagagctgggctacgtgtag

SEQ ID NO: 21904 - DNA, 489 bp, synthetic construct
  source 1..489: mol_type = other DNA; note = Synthetic coding sequence
atggacttcttcagcagccacctgctggccgacagcagcagccctgccaccaacagcagccacacagatgcccacgagatcctggtgtctgacttcctggtgtctgatgagaacctgcagaagatggagaatgtgctggacctgtggagcagcggcctgaagaccaacatcatcagcgagctgagcaagtggaggctgaacttcatcgactggcacaggatggagatgaggaaggagaaggagaagcacgccgcccacctgaagcagctgtgcaaccagatcaatgagctgaaggagctgcagaagacctttgagatcagcatcggcaggaaggatgaggtgatcagcagcctgagccacgccatcggcaagcagaaggagaagattgagctgatgaggaccttcttccactggagaattggccacgtgcgggcccggcaggatgtgtatgagggcaagctggccgaccagtactaccagaggacatag

SEQ ID NO: 21905 - DNA, 411 bp, synthetic construct
  source 1..411: mol_type = other DNA; note = Synthetic coding sequence
atgattgtgaatgactatgagggcaatgattctgaggccgaggacctgaacttccgggagaccctgcccagcagcagccaggagaacacccccaggagcaaggtgtttgagaacaaggtgaacagcgagaaggtgaagctgagcctgaggaacttcccccacaatgactatgaagatgtgtttgaggagcccagcgagagcggcagtgaccccagcatgtggacagcccggggccccttcagaagagaccgctggagcagtgaagatgaggaggccgccggccccagccaggccctgagccccctgctgtctgtgcagcaccacggctacagcggccccaatgaaagaaccaccttctggcacggcagcaatgaaggagctgtgtccctgctgctgcgctactgtgcctag

SEQ ID NO: 21906 - DNA, 321 bp, synthetic construct
  source 1..321: mol_type = other DNA; note = Synthetic coding sequence
atggccagccagctgcaggtgttcagcccccccagcgtgagcagcagcgccttctgcagcgccaagaagctgaagattgagcccagcggctgggatgtgtctggccagagcagcaatgacaagtactacacccacagcaagaccctgcctgccacccagggccaggccaacagcagccaccaggtggccaacttcaacatcccagcctatgaccagggcctgctgctgcctgccccagctgtggagcacatcgtggtgacagctgctgacagcagcggcagcgctgccaccagcaccttccagagcagccagaccctgtag

SEQ ID NO: 21907 - DNA, 411 bp, synthetic construct
  source 1..411: mol_type = other DNA; note = Synthetic coding sequence
atgaagaggggccgcctgcccagcagcagtgaagattctgatgacaatggcagcctgagcaccacctggagccagaacagccgcagccagcaccggcgcagcagctgcagcagacatgaggacaggaagcccagcgaggtgttcagaacagacctgatcacagccatgaagctgcatgacagctaccagctgaacccagatgagtactacgtgctggccgacccctggaggcaggagtgggagaagggcgtgcaggtgcctgtgtccccaggcaccatcccccagcctgtggcccgggtggtgtctgaggagaagagcctgatgttcatccggcccaagaagtacatcgtgagcagcggcagcgagcccccagagctgggctacgtggacatccgcaccctggccgactag

SEQ ID NO: 21908 - DNA, 396 bp, synthetic construct
  source 1..396: mol_type = other DNA; note = Synthetic coding sequence
atggaggatggcacccccaagcacatcatccagatgacaggcttcaagatggaggagaaggaggccctggtgaagctgctgctgaagctggactgcaccttcatcaagtctgagaagtacaagaactgcacccacctgattgctgagcggctgtgcaagtctgagaagttcctggccgcctgtgccgccggcaagtggatcctgaccaaggactacatcatccacagcgccaagagcggccgctggctggatgagaccacctatgagtggggctacaagattgagaaggacagccgctacagcccccagatgcagagcgcccccaagcgctggagggaggagctgaagaggactggagcccctggggccttccaccgctggaaggtggtgctgtag

SEQ ID NO: 21909 - DNA, 1668 bp, synthetic construct; identical to SEQ ID NO: 18508
  source 1..1668: mol_type = other DNA; note = Synthetic coding sequence

SEQ ID NO: 21910 - DNA, 1635 bp, synthetic construct; identical to SEQ ID NO: 19452
  source 1..1635: mol_type = other DNA; note = Synthetic coding sequence

SEQ ID NO: 21911 - DNA, 393 bp, synthetic construct
  source 1..393: mol_type = other DNA; note = Synthetic coding sequence
atgggccgcctggatggcaaggtgatcatcctgacagctgctgcccagggcatcggccaggccgccgccctggcctttgcccgggagggcgccaaggtgattgccacagacatcaatgaaagcaagctgcaggagctggagaagtacccaggcatccagaccagggtgctggatgtgaccaagaagaagcagattgaccagtttgccaatgaggtggagcggctggatgtgctcttcaacgtggccggctttgtgcaccacggcaccgtgctggactgtgaggagaaggactgggacttctccatgaacctgaatgtgcgctccatgtacctgatgatcaaggccttcctgcccaagatgctggcccagaagagcggcaacatcatcaactag

SEQ ID NO: 21912 - DNA, 1119 bp, synthetic construct
  source 1..1119: mol_type = other DNA; note = Synthetic coding sequence
atgcagggccctgctggaaatgccagccggggcctgcccggcggcccccccagcacagtggccagcggggccggccgctgtgagagcggggccctgatgcacagctttggcatcttcctgcagggcctgctgggcgtggtggccttcagcaccctgatgctgaagcgcttccgggagcccaagcatgagcggcggccctggaggatctggttcctggacaccagcaagcaggccatcggcatgctgttcatccactttgccaacgtgtacctggccgacctgacagaggaggacccctgcagcctgtacctgatcaacttcctgctggatgccaccgtgggcatgctgctgatctacgtgggcgtgcgggctgtgtctgtgctggtggagtggcagcagtgggagagcctgcgctttggagaatatggagaccccctgcagtgtggggcctgggtgggccagtgtgccctgtacatcgtcatcatgatctttgagaagtctgtggtgttcatcgtgctgctgatcctgcagtggaagaaggtggccctgctgaaccccatcgagaacccagacctgaagctggccatcgtgatgctgattgtgcccttctttgtgaatgccctgatgttctgggtggtggacaacttcctgatgaggaagggcaagaccaaggccaagctggaggagcggggggccaaccaggacagcagaaatggcagcaaggtgcgctacagaagagctgccagccatgaggagagcgagagcgagatcctgatctctgcagatgatgagatggaggagagtgatgtggaggaggacctgcggcggctgacccccctgaagcctgtgaagaagaagaagcaccgcttcggcctgcctgctggggcccaggaggcccccatcaagaagaagaggcctcctgtgaaggatgaggacctgaagggggcccggggcaacctgaccaagaaccaggagatcaagagcaagacctaccaggtgatgagagaatgtgagcaggccggcagcgctgcccccagcgtcttcagcaggaccaggactggaacagaaacagtgtttgagaagcccaaggccggccccaccaagtctgtgtttggatag

SEQ ID NO: 21913 - DNA, 507 bp, synthetic construct
  source 1..507: mol_type = other DNA; note = Synthetic coding sequence
atgatgctgggcacagaaggaggagagggctttgtggtgaaggtgcggggcctgccctggagctgcagcgcagatgaggtgcagcgcttcttcagtgactgcaagatccagaatggagcccagggcatccgcttcatctacacccgggagggccggcccagcggggaggcctttgtggagctggagagtgaagatgaggtgaagctggccctgaagaaggaccgggagaccatgggccaccgctacgtggaggtgttcaagagcaacaacgtggagatggactgggtgctgaagcacacaggccccaacagcccagacacagccaatgatggctttgtgcggctgcggggcctgcccttcggctgcagcaaggaggagatcgtgcagttcttcagcggcctggagatcgtgcccaacggcatcaccctgcctgtggacttccagggccgcagcactggagaggcctttgtgcagtttgccagccaggagattgctgagaaggcctag

SEQ ID NO: 21914 - skipped

SEQ ID NO: 21915 - DNA, 1131 bp, synthetic construct
  source 1..1131: mol_type = other DNA; note = Synthetic coding sequence
atgaccaccgtggtggtgcacgtggacagcaaggccgagctgaccaccctgctggagcagtgggagaaggagcacggcagcggccaggacatggtgcccatcctgaccaggatgagccagctgattgagaaggagacagaggagtacagaaaaggagaccctgacccctttgatgacagacaccctggccgggctgaccctgagtgcatgctgggccacctgctgcgcatcctcttcaagaatgatgacttcatgaatgccctggtgaatgcctacgtgatgaccagccgggagccccccctgaacacagctgcctgccgcctgctgctggacatcatgcctggcctggagacagctgtggtgttccaggagaaggagggcatcgtggagaacctcttcaagtgggcccgggaggccgaccagcccctgcggacctacagcacaggcctgctgggcggggccatggagaaccaggacattgctgccaactacagagatgagaacagccagctggtggccatcgtgctgcggcggctgcgggagctgcagctgcaggaggtggccctgcggcaggagaacaagaggcccagccccaggaagctgagcagcgagcccctgctgcccctggatgaggaggccgtggacatggactatggagacatggctgtggatgtggtggatggagaccaggaggaggccagcggggacatggagatctccttccacctggacagcggccacaagaccagcagccgggtgaacagcaccaccaagccagaagatggcggcctgaagaagaacaagagcgccaagcagggcgaccgggagaacttcaggaaggccaagcagaagctgggcttcagcagcagtgaccctgacaggatgtttgtggagctgagcaacagctcctggagcgagatgagcccctgggtgattggcaccaactacaccctgtaccccatgaccccagccatcgagcagaggctcatcctgcagtacctgacccccctgggggagtaccaggagctgctgcccatcttcatgcagctgggcagccgggagctgatgatgttctacatcgacctgaagcagaccaatgatgtgctgctgacctttgaggccctgaagtag

SEQ ID NO: 21916 - DNA, 504 bp, synthetic construct
  source 1..504: mol_type = other DNA; note = Synthetic coding sequence
atgagcagcaatgaatgcttcaagtgtggccgcagcggccactgggcccgggagtgccccactggaggcggccggggccggggcatgaggagccggggccggggcggcttcaccagtgaccgggacatctgctaccgctgtggggagagcggccacctggccaaggactgtgacctgcaggaggatgcctgctacaactgtggccggggcggccacatcgccaaggactgcaaggagcccaagcgggagcgggagcagtgctgctacaactgtgggaagccaggccacctggcccgggactgtgaccacgcagatgagcagaagtgctacagctgtggggagtttggccacatccagaaggactgcaccaaggtgaagtgctaccgctgtggggagactggacatgtggccatcaactgcagcaagaccagcgaggtgaactgctaccgctgtggggagagcggccacctggcccgggagtgcaccatcgaggccacagcctag

SEQ ID NO: 21917 - DNA, 999 bp, synthetic construct; identical to SEQ ID NO: 19500
  source 1..999: mol_type = other DNA; note = Synthetic coding sequence

SEQ ID NO: 21918 - DNA, 615 bp, synthetic construct
  source 1..615: mol_type = other DNA; note = Synthetic coding sequence
atgtctgacctgcgcatcacagaggccttcctgtacatggactacctgtgcttccgggccctgtgctgcaagggccccccaccagcccggccagaatatgacctggtgtgcatcggcctgactggaagtggcaagaccagcctgctgagcaagctgtgcagcgagagcccagacaacgtggtgtccaccaccggcttcagcatcaaggctgtgcccttccagaatgccatcctgaatgtgaaggagctgggcggcgctgacaacatcaggaagtactggagccgctactaccagggcagccagggcgtcatctttgtgctggacagcgccagcagtgaagatgacctggaggccgccagaaatgagctgcacagcgccctgcagcacccccagctgtgcaccctgcccttcctgatcctggccaaccaccaggacaagccagctgcccggtctgtgcaggagatcaagaagtactttgagctggagcccctggcccggggcaagcgctggatcctgcagccctgcagcctggatgacatggatgccctgaaggacagcttcagccagctgatcaacctgctggaggagaaggaccatgaagctgtgaggatgtag

SEQ ID NO: 21919 - DNA, 6315 bp, synthetic construct
  source 1..6315: mol_type = other DNA; note = Synthetic coding sequence
atggagagccaggagttcatcgtgctgtacacccaccagaagatgaagaagagcaaggtgtggcaggacggcatcctgaagatcacccacctgggcaacaaggccatcctgtatgatgacaagggggcctgcctggagagcctcttcctgaagtgcctggaggtgaagccaggagatgacctggagagtgaccgctacctgatcaccgtggaggaggtgaaggtggccggggccatcggcatcgtgaagcagaatgtgaacaaggaggcccctgagctgaacagcaggaccttcatcagcagcggccgcagcctgggctgccagcccagcggcctgaagaggaagttcaccggcttccagggcccccggcaggtgcccaagaagatggtgatcatggagagcggggagagcgctgccagccatgaggccaagaagacaggccccaccatcttcagccccttctgcagcatgccacccctcttccccaccgtgggcaagaaggatgtgaacaacatcctggccgaccctgaaaatattgtgacctacaagaaccgggagagaaatgccatggacttcagcagcgtcttcagccccagcttccagatcaaccctgaggtgctgtgtgaggagaactacttctgcagccctgtgaacagcggcaacaagctgagtgacagcctgctgaccaatgaacctgtgaagagggacagcctggccagccactacagcggcgtgtcccagaacatccgcagcaaggcccagatcctggccctgctgaagtctgagagcagcagcagctgtgaggagctgaacagcgagatgacagagcacttcccccagaagcagccccagggcagcctgaagatcgccaccaagcccaagtacctgatccagcaggaggagtgtgccgagatgaagagcacagaaaatctctactaccagcaccagagcgagaacaccatgaggaacaagagccgctgggccatgtacctgagcagccagagcagccccatccacagcagcacagtggatggaaatgacacagagaggaagcccaaggcccaggaggatgatgtgaacagcaacctgaaggacctgagcctgcagaagatcatccagtttgtggagacctatgcagaggagaggaagaagtacaacgtggaccagagcgtgggcaacaatgaccccagctggaaccaggaggtgaagctggagatccccagcttcaatgaaagcagcagcctgcaggtgacctgcagcagcgcagaaaatgatggcatcctgtctgagagtgacatccaggaggacaacaagatccccttcaaccagaatgacaagggctgcatcaagggctctgtgctgatcaaggaaaatgcccaggaggtgaacacctgtggcaccctggagaaggagtatgagcagagcgagagcagcctgcctgagctgaagcacctgcagatcgagagcagcaacaacagccgcatcagtgatgacatcacagacatgatcagcgagagcaagatggacaatgaaagcctgaacagcatccacgagagcctgagcaatgtgacccagcccttcctggaggtgaccttcaacctgaacaactttgagaccagtgacacagaggaggagagccaggagagcaacaagatcagccaggacagcgagagctgggtgaaggacatcctggtgaatgatggcaacagctgcttccagaagagaagtgagaacaccaactgtgaggagattgaaggagagcacctgcccttcctgacctctgtgtctgacaagcccaccgtgaccttccctgtgaaggagaccctgcccagccagttctgtgacaagacctacgtgggctttgacatgggcatctgcaagacagaaaatacaggcaaggagattgaggagtacagcgacaccctgagcaactttgagagcttcaagtggacagatgctgtgtatggagacaacaaggaggatgccaacaagcccatccaggaggtgcgcatcaactatgactttgccctgccccccaacaagagcaagggcatcaacatgaacctgcacatcccccacatccagaaccagattgctgagaacagcaacctcttctctgaagatgcccagccccagcccttcatcctgggcagtgacctggacaagaatgatgagcacgtgctgcccagcaccagcagcagtgacaacagcgtgcagctgctgaacaccaaccagaaccactatgaatgtattgccctggacaagagcaacacccacatcagcaacagcctcttctaccccctgggcaagaagcacctgatcagcaaggacacagaggcccacatcagcgagcctgaggacctgggcaagatccgcagccccccaccagaccacgtggaggtggagacagcccgggagggcaagcagtactggaaccccaggaacagcagcgagctgagcggcctggtgaacaccatcagcatcctgaagagcctgtgtgagcacagcacagccctggacagcctggagatcctgaagaagaagaacacagtgttccagcagggcacccagcagacctatgagccagacagccccccagaggtgaggaagcccttcatcaccgtggtgagccccaagagcccccacctgcacaaggacagccagcagatcctgaaggaggatgaggtggagctgtctgagcccctgcagagcgtgcagttcagcagcagcggcagcaaggaggagacagccttccaggccgtcatccccaagcagatcgagaggaagacctgtgaccccaagcctgtggagttccagggccaccaggtgaagggcagcgccaccagcggcgtgatggtgcggggccacagcagccagctgggctgcagccagttcccagacagcacagaatatgagaacttcatgacagagaccccagagctgcccagcacctgcatgcagattgacttcctgcaggtgaccagccctgaggagaacatcagcaccctgagccctgtgtccaccttcagcctgaacagcagagatgaggacttcatggtggagttcagcgagaccagcctgaaggcccggaccctgcctgatgacctgcacttcctgaacctggagggcatgaagaagagccgcagcctggagaatgaaaacctgcagaggctgagcctgctgagcaggacccaggtgcccctcatcaccctgcccaggacagatggccccccagacctggacagccacagctacatgatcaacagcaacacctatgagagcagcggcagccccatgctgaacctgtgtgagaagtctgctgtgctgtccttcagcattgagcctgaggaccagaatgagaccttcttcagcgaggagagccgggaggtgaaccctggagatgtgtccctgaacaacatcagcacccagagcaagtggctgaagtaccagaacaccagccagtgcaatgtggccacccccaacagagtggacaagaggatcacagatggcttctttgctgaggccgtgtctggcatgcacttccgggacaccagcgagcggcagagtgatgctgtgaatgaaagcagcctggacagcgtgcacctgcagatgatcaagggcatgctgtaccagcagaggcaggacttcagcagccaggacagcgtgtccaggaagaaggtgctgagcctgaacctgaagcagaccagcaagacagaggagatcaagaatgtgctgggcggcagcacctgctacaactacagcgtgaaggacctgcaggagatcagcggcagcgagctgtgcttccccagcggccagaagatcaagagcgcctacctgccccagaggcagatccacatcccagctgtgttccagagccctgcccactacaagcagaccttcaccagctgcctgattgagcacctgaacatcctgctgtttggcctggcccagaacctgcagaaggccctgagcaaggtggacatctccttctacaccagcctgaagggggagaagctgaagaatgcagaaaataatgtgcccagctgccaccacagccagcctgccaagctggtgatggtgaagaaggagggccccaacaagggccgcctcttctacacctgtgatggccccaaggctgaccgctgcaagttcttcaagtggctggaggatgtgaccccaggctacagcacccaggagggcgcccggcccggcatggtgctgagtgacatcaagagcatcggcctgtacctgcggagccagaagatccccctgtatgaggagtgccagctgctggtgaggaagggctttgacttccagaggaagcagtatggcaagctgaagaagttcaccaccgtgaaccctgagttctacaatgagcccaagaccaagctgtacctgaagctgagcaggaaggagaggagcagcgcctacagcaagaatgacctgtgggtggtgtccaagaccctggactttgagctggacaccttcatcgcctgcagcgccttcttcggccccagcagcatcaatgaaattgagatcctgcccctgaagggctacttccccagcaactggcccaccaacatggtggtgcacgccctgctggtgtgcaatgccagcacagagctgaccaccctgaagaacatccaggactacttcaacccagccaccctgcccctgacccagtacctgctgaccaccagcagccccaccatcgtgagcaacaagagggtgtccaagaggaagttcatccccccagccttcaccaacgtgtccaccaagtttgagctgctgagcctgggcgccaccctgaagctggccagcgagctgatccaggtgcacaagctgaacaaggaccaggccacagccctgatccagatcgcccagatgatggccagccatgagagcattgaggaggtgaaggagctgcagacccacaccttccccatcaccatcatccatggagtgtttggagctgggaagagctacctgctggccgtggtgatcctcttctttgtgcagctgtttgagaagtctgaggcccccaccatcggaaatgcccggccctggaagctgctgatcagcagcagcaccaacgtggccgtggacagagtgctgctgggcctgctgagcctgggctttgagaacttcatccgggtgggctctgtgaggaagatcgccaagcccatcctgccctacagcctgcacgccggctctgaaaatgaaagtgagcagctgaaggagctgcacgccctgatgaaggaggacctgacccccacagagcgggtgtatgtgaggaagagcattgagcagcacaagctgggcaccaacagaaccctgctgaagcaggtgcgggtggtgggcgtgacctgtgccgcctgccccttcccctgcatgaatgacctgaagtttcctgtggtggtgctggatgagtgcagccagatcacagagcccgccagcctgctgcccatcgccaggtttgaatgtgagaagctgatcctggtgggggaccccaagcagctgccccccaccatccagggcagtgatgctgcccatgaaaatggcctggagcagaccctgtttgaccggctgtgcctgatgggccacaagcccatcctgctgcggacccagtaccgctgccacccagccatcagcgccatcgccaatgacctcttctacaagggggccctgatgaatggagtgacagaaattgaaagaagccccctgctggagtggctgcccaccctgtgcttctacaacgtgaagggcctggagcagatcgagcgggacaacagcttccacaacgtggccgaggccaccttcaccctgaagctgatccagagcctgattgccagcggcattgctggctccatgattggagtcatcaccctgtacaagagccagatgtacaagctgtgccacctgctgtctgctgtggacttccaccacccagacatcaagacagtgcaggtgtccacagtggatgccttccagggcgctgagaaggagatcatcatcctgagctgtgtgaggacccggcaggtgggcttcattgattctgagaagaggatgaatgtggccctgacccggggcaagaggcacctgctgattgtgggcaacctggcctgcctgaggaagaaccagctgtggggccgggtcatccagcactgtgagggccgggaggatggcctgcagcacgccaaccagtatgagccccagctgaaccacctgctgaaggactactttgagaagcaggtggaggagaagcagaagaagaagtctgagaaggagaagagcaaggacaagagccacagctag

SEQ ID NO: 21920 - DNA, 567 bp, synthetic construct
  source 1..567: mol_type = other DNA; note = Synthetic coding sequence
atggccgccacagccagagaagatggagccagcggccaggagcggggccagaggggctgtgagcactatgaccggggctgcctgctgaaggccccctgctgtgacaagctgtacacctgccgcctgtgccacgacaacaatgaagaccaccagctggaccgcttcaaggtgaaggaggtgcagtgcatcaactgtgagaagatccagcacgcccagcagacctgtgaagaatgttccaccctgtttggagagtactactgtgacatctgccacctgtttgacaaggacaagaagcagtaccactgtgagaactgtggcatctgccgcatcggccccaaggaggacttcttccactgcctgaagtgcaacctgtgcctggccatgaacctgcagggccgccacaagtgcattgaaaatgtgtcccggcagaactgccccatctgcctggaggacatccacaccagccgggtggtggcccacgtgctgccctgtggccacctgctgcacaggacctgctatgaggagatgctgaaggagtatgaccaggtgctggagacagctggatag

SEQ ID NO: 21921 - DNA, 339 bp, synthetic construct
  source 1..339: mol_type = other DNA; note = Synthetic coding sequence
atggccactggagacctgaagaggagcctgaggaacctggagcaggtgctgcggctgctgaactacccagaggaggtggactgtgtgggcctcatcaagggggaccctgctgccagcctgcccatcatctcctacagcttcaccagctacagcccctacgtgacagagctgatcatggagagcaatgtggagctgattgccaagaatgacctgcgcttcattgatgctgtgtacaagctgctgcgggaccagttcaactacaagcccatcctgaccaagaagcagttcatccagtgtggctttgctgagtggaagatccagatcgtgtgtgacatctag

SEQ ID NO: 21922 - DNA, 363 bp, synthetic construct
  source 1..363: mol_type = other DNA; note = Synthetic coding sequence
atgtggaaggtggtgaacctgcccacagacctcttcaacagcgtgatgaatgtgggccgcttcacagaggagattgagtggctgaagttcctggccctggcctgcagcgccctgggcgtgaccatcaccaagaccctgaagatcgtgtgtgaggtgctgagctgtgaccacaacggcggcctgccccgcatccccttcagcaccttccagttcctgtacacctacatcgccgaggtggatggagagatctgtgccagccacgtgtccaggatgctgaactacatcgagcaggaggtgattggaccagatggcctcatcaccgtgaatgacttcacccagaacccccgggtgtggctggagtag

SEQ ID NO: 21923 - DNA, 2490 bp, synthetic construct
  source 1..2490: mol_type = other DNA; note = Synthetic coding sequence
atggccaagtacaacacaggaggcaaccccacagaagatgtgtctgtgaacagccggcccttccgggtgacaggccccaacagcagcagcggcatccaggccaggaagaacctcttcaacaaccagggcaatgccagccccccagctggccccagcaatgtgcccaagtttggcagccccaagccccctgtggccgtgaagcccagcagcgaggagaagccagacaaggagcccaagccacccttcctgaagcccaccggggccggccagcgcttcggcaccccagccagcctgaccacccgggaccctgaggccaaggtgggcttcctgaagcctgtgggccccaagcccatcaacctgcccaaggaggacagcaagcccaccttcccctggcccccaggcaacaagcccagcctgcacagcgtgaaccaggaccatgacctgaagcccctgggccccaagagcggccccaccccacccaccagtgaaaatgagcagaagcaggccttccccaagctgactggagtgaagggcaagttcatgtctgccagccaggacctggagcccaagcccctcttccccaagccagccttcggccagaagccacccctgagcacagagaacagccatgaagatgagagccccatgaagaatgtgagcagcagcaagggcagccctgcccccctgggcgtgcgcagcaagagcggccccctgaagccagccagagaagattctgagaacaaggaccatgctggggagatcagcagcctgcccttccctggggtggtgctgaagccagctgccagcagaggaggccctggcctgagcaagaatggagaggagaagaaggaggacaggaagattgatgctgccaagaacaccttccagagcaagatcaaccaggaggagctggccagcggcaccccaccagcccgcttccccaaggcccccagcaagctgactgtgggcggcccctggggccagagccaggagaaggagaagggggacaagaacagcgccacccccaagcagaagcccctgcccccactcttcaccctgggccccccaccacccaagcccaacagacctccaaatgtggacctgaccaagttccacaagaccagcagcggcaacagcaccagcaagggccagaccagctacagcaccaccagcctgcccccacctccacccagccacccagccagccagccccccctgcctgccagccaccccagccagccccctgtgcccagcctgccccccaggaacatcaagcccccatttgacctgaagagccctgtgaatgaagacaaccaggatggagtgacccacagtgatggagctggcaacctggatgaggagcaggacagcgagggggagacctatgaagatattgaggccagcaaggagcgggagaagaagcgggagaaggaggagaagaagaggctggagctggagaagaaggagcagaaggagaaggagaagaaggagcaggagatcaagaagaagttcaagctgaccggccccatccaggtgatccacctggccaaggcctgctgtgatgtgaagggcggcaagaatgagctgtccttcaagcagggcgagcagatcgagatcatccgcatcacagacaaccctgagggcaagtggctgggccgcacagcccggggcagctatggctacatcaagaccacagctgtggagattgattatgacagcctgaagctgaagaaggacagcctgggcgcccccagccggcccattgaagatgaccaggaggtgtatgatgatgtggccgagcaggatgacatcagcagccacagccagagcggcagcggcggcatcttccccccacctccagatgatgacatctatgatggcatcgaggaggaggatgctgatgatggcagcaccctgcaggtgcaggagaagagcaacacctggagctggggcatcctgaagatgctgaagggcaaggatgacaggaagaagagcatccgggagaagcccaaggtgtctgacagcgacaacaatgaaggcagcagcttccctgccccacccaagcagctggacatgggagatgaggtgtatgatgatgtggacaccagtgacttccctgtgtcctctgctgagatgagccagggcaccaacgtgggcaaggccaagacagaggagaaggacctgaagaagctgaagaagcaggagaaggaggagaaggacttcaggaagaagttcaagtatgatggagagatccgggtgctgtacagcaccaaggtgaccaccagcatcaccagcaagaagtggggcacccgggacctgcaggtgaagccaggagagagcctggaggtgatccagaccacagatgacaccaaggtgctgtgcagaaatgaggagggcaagtatggctacgtgctgcggagctacctggccgacaatgatggagagatctatgatgacattgctgatggctgcatctatgacaatgactag

SEQ ID NO: 21924 - DNA, 795 bp, synthetic construct
  source 1..795: mol_type = other DNA; note = Synthetic coding sequence
atgccagacagcgccccagccatggctgacaagatggacatgagcctggatgacatcatcaagctgaacagaagccagaggggcggccggggcggcggccggggccggggccgggccggcagccagggcggccggggcggcggggcccaggccgccgcccgggtgaacagaggaggcggccccatccggaacagacctgccatcgcccggggagctgctgggggcggcggcaggaacagacctgccccctacagccggcccaagcagctgcctgacaagtggcagcacgacctgtttgattctggctttggaggaggagctggggtggagactggaggcaagctgctggtgagcaacctggactttggagtgtctgatgctgacatccaggagctgtttgctgagtttggcaccctgaagaaggctgctgtgcactatgacagaagtggccgcagcctgggcacagcagatgtgcactttgagaggaaggcagatgccctgaaggccatgaagcagtacaacggggtgcccctggatggccggcccatgaacatccagctggtgaccagccagattgatgcccagaggaggcctgcccagagcgtgaacagaggaggcatgaccaggaacagaggagctgggggctttggaggcggcggcggcacccggcggggcacccggggcggggcccggggccggggcagaggagctggaagaaacagcaagcagcagctgtctgctgaggagctggatgcccagctggatgcctacaatgccaggatggacaccagctag

SEQ ID NO: 21925 - DNA, 312 bp, synthetic construct
  source 1..312: mol_type = other DNA; note = Synthetic coding sequence
atggccaagcacggggctgatgagcccagcagccgcagcggcagcccagaccgggagggccgggccagcgaggacaggagcctgctgcaccagaggctggccgtgcgggagctgattgacacagaggtgtcctacctgcacatgctgcagctgtgtgccagtgacatccgcagccggctgcagcagctgccccagggcgacctggatgtgctcttcagcaacattgatgacatcatcaaggtgaacagccgcttcctgcatgacctgcaggagacagccagcaaggaggaggagcaggtgcagctggtgtag

SEQ ID NO: 21926 - DNA, 639 bp, synthetic construct
  source 1..639: mol_type = other DNA; note = Synthetic coding sequence
atgatgctgggcacagaaggaggagagggctttgtggtgaaggtgcggggcctgccctggagctgcagcgcagatgaggtgcagcgcttcttcagtgactgcaagatccagaatggagcccagggcatccgcttcatctacacccgggagggccggcccagcggggaggcctttgtggagctggagagtgaagatgaggtgaagctggccctgaagaaggaccgggagaccatgggccaccgctacgtggaggtgttcaagagcaacaacgtggagatggactgggtgctgaagcacacaggccccaacagcccagacacagccaatgatggctttgtgcggctgcggggcctgcccttcggctgcagcaaggaggagatcgtgcagttcttcagcggcctggagatcgtgcccaacggcatcaccctgcctgtggacttccagggccgcagcactggagaggcctttgtgcagtttgccagccaggagattgctgagaaggccctgaagaagcacaaggagcgcatcggccaccgctacatcgagatcttcaagagcagcagagctgaggtgaggacccactatgacccccccaggaagctgatggccatgcagaggcctggcccctatgacagatag

SEQ ID NO: 21927 - DNA, 1020 bp, synthetic construct; identical to SEQ ID NO: 19098
  source 1..1020: mol_type = other DNA; note = Synthetic coding sequence

SEQ ID NO: 21928 - DNA, 3213 bp, synthetic construct
  source 1..3213: mol_type = other DNA; note = Synthetic coding sequence
atggccggggccctgcggcggggccgggccctgggcagccggcccagcggccccaccgtgagcagcagaagaagcccccagtgccctgtggcccaggagggcctgggcgcccggagccggccccgggtggcccccaggagcctggcccgctgtggccccagcagccggctgatgggctggaagcccagcgaggcccggggccagagccagagcttccaggccagcggcctgcagcccaggagcctgaaggccgcccggcgggccaccggccgcccagacaggagcagagctgcccggcccaccatggaccccagcgcccacaggagcagagctgccccacccaacatggaccctgacccccaggccggcgtgcaggtgggcatgagggtggtgcggggcgtggactggaagtggggccagcaggacggcggggagggcggcgtgggcaccgtggtggagctgggcagacatggcagccccagcaccccagacagaacagtggtggtgcagtgggaccagggcaccaggaccaactacagagctggctaccagggcgcccatgacctgctgctgtatgacaatgcccagattggagtgcgccaccccaacatcatctgtgactgctgcaagaagcacggcctgcggggcatgcgctggaagtgccgggtgtgcctggactatgacctgtgcacccagtgctacatgcacaacaagcatgagctggcccacgcctttgacagatatgaaacagcccacagcaggcctgtgaccctgagcccccggcagggcctgccccgcatccccctgcggggcatcttccagggcgccaaggtggtgcggggccctgactgggagtggggcagccaggacggcggggagggcaagccaggccgggtggtggacatccggggctgggatgtggagaccggccgctctgtggcctctgtgacctgggcagatggcaccaccaacgtgtacagagtgggccacaagggcaaggtggacctgaagtgtgtgggggaggccgccggcggcttctactacaaggaccacctgccccggctgggcaagccagctgagctgcagaggagagtgtctgctgacagccagcccttccagcacggggacaaggtgaagtgcctgctggacacagatgtgctgcgggagatgcaggagggccacggcggctggaaccccaggatggccgagttcatcggccagacaggcaccgtgcaccgcatcacagacagaggagatgtgcgggtgcagttcaaccacgagacccgctggaccttccaccctggggccctgaccaagcaccacagcttctgggtgggagatgtggtgcgggtcatcggggacctggacacagtgaagaggctgcaggccggccatggagagtggacagatgacatggccccagccctgggccgggtgggcaaggtggtgaaggtgtttggagatggcaacctgcgggtggccgtggccggccagcgctggaccttcagccccagctgcctggtggcctacagacctgaggaggatgccaacctggatgtggccgagcgggcccgggagaacaagagcagcctgtctgtggccctggacaagctgcgggcccagaagagtgaccctgagcaccctggccgcctggtggtggaggtggccctgggcaatgctgcccgggccctggacctgctgcggcggcggcctgagcaggtggacaccaagaaccagggccgcacagccctgcaggtggccgcctacctgggccaggtggagctgatccggctgctgctgcaggcccgggccggcgtggacctgcctgatgatgagggcaacacagccctgcactacgccgccctgggcaaccagcctgaggccaccagggtgctgctgtctgctggctgcagagcagatgccatcaacagcacccagagcacagccctgcacgtggccgtgcagaggggcttcctggaggtggtgcgggccctgtgtgagcggggctgtgatgtgaacctgcctgatgcccacagcgacacccccctgcacagcgccatctctgctggcactggagccagcggcatcgtggaggtgctgacagaggtgcccaacattgatgtgacagccaccaacagccagggcttcaccctgctgcaccacgccagcctgaagggccacgccctggccgtgaggaagatcctggcccgggcccggcagctggtggatgccaagaaggaggatggcttcaccgccctgcacctggccgccctgaacaaccaccgggaggtggcccagatcctgatccgggagggccgctgtgatgtgaatgtgaggaacaggaagctgcagagccccctgcacctggccgtgcagcaggcccacgtgggcctggtgcccctgctggtggatgctggctgcagcgtgaatgcagaagatgaggagggggacacagccctgcacgtggccctgcagaggcaccagctgctgcccctggtggctgatggagctggaggagaccccggccccctgcagctgctgagccggctgcaggccagcggcctgcccggcagcgctgagctgactgtgggcgctgctgtggcctgcttcctggccctggagggcgcagatgtgtcctacaccaaccaccggggccgcagccccctggacctggccgctgagggccgggtgctgaaggccctgcagggctgtgcccagcgcttccgggagcggcaggccggcggcggggccgcccctggcccccggcagaccctgggcacccccaacacagtgaccaacctgcacgtgggcgccgcccctggccctgaggccgctgagtgcctggtgtgcagcgagctggccctgctggtgctcttcagcccctgccagcacaggacagtgtgtgaggagtgtgcccggaggatgaagaagtgcatccgctgccaggtggtggtgtccaagaagctgcggccagatggcagcgaggtggccagcgctgccccagcccctggccccccccggcagctggtggaggagctgcagagccgctaccggcagatggaggagcgcatcacctgccccatctgcatcgacagccacatccggctggtgttccagtgtggccacggggcctgtgccccctgtggcagcgccctgagcgcctgccccatctgccggcagcccatccgggaccgcatccagatctttgtgtag

SEQ ID NO: 21929 - DNA, 957 bp, synthetic construct; identical to SEQ ID NO: 21665
  source 1..957: mol_type = other DNA; note = Synthetic coding sequence

SEQ ID NO: 21930 - DNA, 1044 bp, synthetic construct; identical to SEQ ID NO: 19065
  source 1..1044: mol_type = other DNA; note = Synthetic coding sequence

SEQ ID NO: 21931 - DNA, 108 bp, synthetic construct
  source 1..108: mol_type = other DNA; note = Synthetic coding sequence
atgccccagaccttcagcggcggccggggctttgagctggacagcggcagtgatgacatggaccccggccggcccaggcctccccgggaccctgatgagctgcactag

SEQ ID NO: 21932 - DNA, 1179 bp, synthetic construct; identical to SEQ ID NO: 20458
  source 1..1179: mol_type = other DNA; note = Synthetic coding sequence

SEQ ID NO: 21933 - DNA, 2052 bp, synthetic construct; identical to SEQ ID NO: 18853
  source 1..2052: mol_type = other DNA; note = Synthetic coding sequence

SEQ ID NO: 21934 - DNA, 99 bp, synthetic construct
  source 1..99: mol_type = other DNA; note = Synthetic coding sequence
atggacttcttcagcagccacctgctggccgacagcagcagccctgccaccaacagcagccacacagatgcccacgagatcctggtgtctgacttctag

SEQ ID NO: 21935 - DNA, 858 bp, synthetic construct; identical to SEQ ID NO: 19433
  source 1..858: mol_type = other DNA; note = Synthetic coding sequence

SEQ ID NO: 21936 - DNA, 354 bp, synthetic construct; identical to SEQ ID NO: 20420
  source 1..354: mol_type = other DNA; note = Synthetic coding sequence

SEQ ID NO: 21937 - DNA, 7614 bp, synthetic construct
  source 1..7614: mol_type = other DNA; note = Synthetic coding sequence
atggaggacttccggggcattgctgaggagagcttccccagcttcctgaccaacagcctgtttggaaacagcggcatcctggagaatgtgaccctgagcagcaacctgggcctgcctgtggccgtgtccaccctggcccgggacaggagcagcacagacaaccgctacccagacatccaggccagctacctggtggagggccgcttctctgtgcccagcggcagcagccctggcagccagagtgatgctgagccccgggagcggctgcagctgtccttccaggatgatgacagcatcagcaggaagaagagctatgtggagagccagaggctgagcaatgccctgagcaagcagagcgccctgcagatggagacagctggccctgaggaggagcctgctggggccacagagagcctgcagggccaggacctcttcaacagagccagccccctggagcaggcccaggacagccccatcgacttccacctgcagagctggatgaacaacaaggagcccaagatcgtggtgctggatgctgggaagcactttgaggacaagaccctgaagagtgacctgagccacaccagcctgctggagaatgagaagctgatcctgcccaccagcctggaggacagcagtgatgatgacattgatgatgagatgttttatgatgaccacctggaggcctactttgagcagctggccatccctggcatgatctatgaggacctggagggccctgagcccccagagaagggcttcaagctgcccaccaacggcctgcggcaggccaatgaaaatggcagcctgaactgcaagttccagagcgagaacaacagcagcctcatcagcctggacagccacagcagcgagaccacccacaaggagagcgaggagagccaggtgatctgcctgcccggcaccagcaacagcatcggcaccggggacagccgccgctacacagatggcatgctgcccttcagcagcggcacctggggcacagagaaggagattgagaacctgaagggcatcgtgcctgacctgaacagtgaatgtgccagcaaggatgtgctggtgaagaccctgcgggccattgatgtgaagctgaacagcgacaacttccatgatgccaatgccaacagaggaggctttgacctgacagatcctgtgaagcagggcgcagaatgtccccaccagaacaagacagtgctgcacatggatggctgcctggacacagagacccccaccgtgtccatccaggagaatgtggatgtggccagcctgaagcccatcagtgacagcggcatcaacttcacagatgccatctggagccccacctgtgaaagaaggacctgtgaatgtcatgagagcattgagaagaacaaggacaagacagacctgccccagagcgtggtgtaccagaatgaggagggccgctgggtgacagacctggcctactacaccagcttcaacagcaagcagaacctgaatgtgtccctgagtgatgagatgaatgaagacttccgcagcggcagcgaggcctttgacctgattgcccaggatgaggaggagttcaacaaggagcaccagttcatccaggaggagaacattgatgcccacaacacctctgtggccctgggggacacctcctggggcgccaccatcaactacagcctgctgaggaagagccgcagcaccagtgacctggacaaggatgatgccagctacctgcggctgagcctgggggagttctttgcccagaggtctgaggccctgggctgcctgggcggcggcaacaacgtgaagaggcccagctttggctacttcatccgcagccctgagaagcgggagcccatcgccctgatcaggaagagtgatgtgtcccggggcaacctggagaaggagatggcccacctgaaccacgacctgtacagcggggacctgaatgagcagagccaggcccagctgtctgagggcagcatcaccctgcaggtggaggccgtggagagcaccagccaggtggatgaaaatgatgtgaccctgacagctgacaagggcaagacagaggacaccttcttcatgagcaacaagccccagcgctacaaggacaagctgcctgacagcggggacagcatgctgcgcatcagcaccatcgccagcgccatcgccgaggcctctgtgaacacagaccccagccagctggccgccatgatcaaggccctgagcaacaagacccgggacaagaccttccaggaggatgagaagcagaaggactacagccacgtgcgccacttcctgcccaatgacctggagaagagcaatggcagcaatgccctggacatggagaagtacctgaagaagacagaggtgagccgctatgaaagtgccctggagaacttcagccgggcctccatgtctgacacctgggacctgagcctgcccaaggagcagaccacccaggacatccaccctgtggacctgagcgccacctctgtgtctgtgcgggccccagaagaaaatacagctgccatcgtgtatgtggagaatggagagagcgagaaccaggagagcttccgcaccatcaacagcagcaacagcgtgaccaaccgggagaacaacagcgctgtggtggatgtgaagacctgcagcattgacaacaagctgcaggatgtgggcaatgatgagaaggccaccagcatcagcacccccagcgacagctacagctctgtgaggaacccccgcatcaccagcctgtgcctgctgaaggactgtgaggagatccgggacaaccgggagaaccagaggcagaatgaatgtgtgtctgagatcagcaacagcgagaagcacgtgacctttgagaaccacagaattgtgagccccaagaacagcgacctgaagaacaccagccctgagcacggcggccggggctctgaagatgagcaggagagcttccggcccagcaccagccccctgagccacagcagccccagcgagatcagcggcaccagcagcagcggctgtgccctggagagctttggcagcgctgcccagcagcagcagcccccctgtgagcaggagctgagccccctggtgtgcagccctgctggggtgtcccggctgacctacgtgtctgagcctgagagcagctaccccaccacagccacagatgatgccctggaggacaggaagagtgacatcaccagcgagctgagcaccaccatcatccagggcagccctgctgccctggaggagcgggccatggagaagctgcgggagaaggtgcccttccagaacagaggcaagggcaccctgagcagcatcatccagaacaacagcgacaccaggaaggccacagagaccaccagcctgagcagcaagccagaatatgtgaagccagacttccgctggagcaaggaccccagcagcaagagcggcaacctgctggagaccagcgaggtgggctggaccagcaaccctgaggagctggaccccatccggctggccctgctgggcaagagcggcctgagctgccaggtgggcagcgccaccagccaccctgtgtcctgccaggagcccattgatgaggaccagaggatcagccccaaggacaagagcacagctggccgggagttcagcggccaggtgagccaccagaccaccagcgagaaccagtgcacccccatccccagcagcacagtgcacagctctgtggccgacatgcagaacatgcctgctgctgtgcacgccctgctgacccagcccagcctgtctgctgccccctttgcccagcgctacctgggcaccctgcccagcacaggcagcaccaccctgccccagtgccacgccggaaatgccaccgtgtgtggcttcagcggcggcctgccctacccagctgtggccggggagcctgtgcagaacagcgtggccgtgggcatctgcctgggcagcaacatcggcagcggctggatgggcaccagcagcctgtgcaacccctacagcaacaccctgaaccagaacctgctgagcaccaccaagcccttccctgtgcccagcgtgggcaccaactgtggcatcgagccctgggacagcggcgtgaccagcggcctgggctctgtgcgggtgcctgaggagctgaagctgccccacgcctgctgcgtgggcatcgccagccagaccctgctgtctgtgctgaaccccacagaccgctggctgcaggtgtccattggagtgctgagcatctctgtgaatggagagaaggtggacctgagcacctaccgctgcctggtgttcaagaacaaggccatcatccggccccacgccacagaggagatcaaggtgctcttcatccccagcagccctggggtcttccgctgcaccttctctgtggcctcctggccctgcagcacagatgctgagaccatcgtgcaggccgaggccctggccagcacagtgaccctgacagccatcgccgagagccctgtgattgaggtggagacagagaagaaggatgtgctggactttggagacctgacctacggcggctggaaggccctgcccctgaagctgatcaacagaactcatgccaccgtgcccatccgcctcatcatcaatgccaatgctgtggcctggcgctgcttcaccttcagcaaggagagcgtgcgggcccctgtggaggtggccccctgtgctgatgtggtgacccggctggccggccccagcgtggtgaaccacatgatgcctgccagctatgatggccaggaccctgagttcctgatgatctgggtgctcttccacagccccaagaagcagatcagcagcagtgacatcctggacagcgctgaggagttcagcgccaaggtggacatcgaggtggacagccccaaccccacccctgtgctgcggtctgtgtccctgcgggcccgggccggcatcgcccgcatccacgccccccgggacctgcagaccatgcacttcctggccaaggtggccagcagcaggaagcagcacctgcccctgaagaatgccggcaacatcgaggtgtacctggacatcaaggtgcctgagcagggcagccacttctctgtggaccccaagaacctgctgctgaagccaggagaggagcacgaggtgattgtgtccttcacccccaaggaccctgaggcctgtgaggagcgcatcctgaagatctttgtgcagcccttcggcccccagtatgaggtggtgctgaagggggaggtgatcagcagcggcagcaagcccctgagccctggcccctgcctggacatccccagcatcctgagcaacaagcagttcctggcctggggcggcgtgcccctgggccgcacccagctgcagaagctggccctgaggaacaacagcgccagcaccacccagcacctgcggctgctgatccggggccaggaccaggactgcttccagctgcagaacaccttcggcagcgagcagaggctgaccagcaactgtgagatccgcatccaccccaaggaggacatcttcatctctgtgctgtttgcccccacccggctgagctgcatgctggcccggctggagatcaagcagctgggcaacagaagccagcccggcatcaagttcaccatccccctgagcggctacggcggcaccagcaacctgatcctggagggcgtgaagaagctgagtgacagctacatggtgacagtgaatggcctggtgcctgggaaggagagcaagatcgtgttttctgtgaggaacacaggcagccgggccgcctttgtgaaggctgtgggcttcaaggacagccagaagaaggtgctgctggaccccaaggtgctgcgcatcttcccagacaagtttgtgctgaaggagaggacccaggagaatgtgaccctcatctacaaccccagcgaccggggcatcaacaacaagacagccacagagctgagcacagtgtacctgtttggaggagatgagatcagccggcagcagtacagaagagccctgctgcacaagccagagatgatcaagcagatcctgcctgagcacagcgtgctgcagaacatcaactttgtggaggccttccaggatgagctgctggtgacagaggtgtatgacctgccccagaggcccaatgatgtgcagctgttctacggctccatgtgcaagatcatcctgagcgtcatcggggagttccgggactgcatcagcagccgggagttcctgcagcccagcagcaaggccagcctggagagcaccagtgacctgggcgccagcggcaagcatggaggaaatgtgtccctggatgtgctgcctgtgaagggcccccagggcagccccctgctgagccgggccgcccggccccccctggaccagctggccagcgaggagccctggacagtgctgcctgagcacctgatcctggtggcccccagcccctgtgacatggccaagacaggccgcttccagatcgtgaacaacagcgtgcggctgctgcgctttgagctgtgctggccagcccactgcctgactgtgaccccccagcacggctgtgtggcccctgagagcaagctgcagatcctggtgagccccaacagcagcctgagcaccaagcagagcatgttcccctggagcggcctcatctacatccactgtgatgatggccagaagaagatcgtgaaggtgcagatccgggaggacctgacccaggtggagctgctgacccggctgaccagcaagcccttcggcatcctgagccctgtgtctgagcccagcgtgagccacctggtgaagcccatgaccaagccacccagcaccaaggtggagatccggaacaagagcatcaccttccccaccacagagcccggggagaccagcgagagctgcctggagctggagaaccacggcaccacagatgtgaagtggcacctgagcagcctggccccaccctacgtgaagggcgtggatgagagcggagatgtgttccgggccacctatgctgccttccgctgcagccccatcagcggcctgctggagagccacggcatccagaaggtgtccatcaccttcctgccccggggccgcggggactatgcccagttctgggatgtggagtgccaccccctgaaggagccccacatgaagcacaccctgcgcttccagctgagcggccagagcattgaagcagaaaatgaaccagaaaatgcctgcctgagcacagacagcctcatcaagattgaccacctggtgaagccccggcggcaggccgtgtctgaggccagcgcccgcatccctgagcagctggatgtgacagcccggggcgtgtatgccccagaagatgtgtaccgcttccggcccacctctgtgggggagagcaggaccctgaaggtgaacctgaggaacaacagcttcatcacccacagcctgaagttcctgagcccccgggagcccttctacgtgaagcacagcaagtacagcctgcgggcccagcactacatcaacatgcctgtgcagttcaagcccaagtctgctgggaagtttgaggccctgctggtgatccagacagatgagggcaagagcatcgccatccgcctcatcggggaggccctgggcaagaactag

SEQ ID NO: 21938 - DNA, 90 bp, synthetic construct
  source 1..90: mol_type = other DNA; note = Synthetic coding sequence
atgctgtgctggggcaatgccagctttggccagctgggcctgggcggcattgatgaggagatcgtgctggagcccaggaagagtgactag

SEQ ID NO: 21939 - DNA, 66 bp, synthetic construct
  source 1..66: mol_type = other DNA; note = Synthetic coding sequence
atggccaagtacaacacaggaggcaaccccacagaagatgtgtctgtgaacagccggcccttctag

SEQ ID NO: 21940 - DNA, 261 bp, synthetic construct
  source 1..261: mol_type = other DNA; note = Synthetic coding sequence
atggaggccgacatcatcaccaacctgcgctgccgcctgaaggaggccgaggaggagcggctgaaggccgcccagtatggcctgcagctggtggagagccagaatgagctgcagaaccagctggacaagtgcagaaatgagatgatgaccatgacagagagctatgagcaggagaagtacaccctgcagcgggaggtggagctgaagagcaggatgctggagagcctgagctgtgaatgtgaggccatcaagcagcagtag

SEQ ID NO: 21941 - DNA, 1983 bp, synthetic construct
  source 1..1983: mol_type = other DNA; note = Synthetic coding sequence
atggtgaccagcctgaatgaagataatgaatctgtgacagtggagtggattgaaaatggagacaccaagggcaaggagattgacctggagagcatcttcagcctgaacccagacctggtgcctgatgaggagattgagcccagccctgagaccccacctcctccagccagcagcgccaaggtgaacaagatcgtgaagaacagaagaacagtggccagcatcaagaatgacccccccagccgggacaacagagtggtgggcagcgcccgggcccggcccagccagtttcctgagcagagcagcagcgcccagcagaatgcccggaggaagagcaactgtgtgaaggaggtggagaagctgcaggagaagcgggagaagaggcggctgcagcagcaggagctgcgggagaagagggcccaggatgtggatgccaccaaccccaactatgagatcatgtgcatgatccgggacttccggggcagcctggactaccggcccctgaccacagctgaccccattgatgagcaccgcatctgtgtgtgtgtgaggaagaggcccctgaacaagaaggagacccagatgaaggacctggatgtgatcaccatccccagcaaggatgtggtgatggtgcatgagcccaagcagaaggtggacctgacccgctacctggagaaccagaccttccgctttgattatgcctttgatgattctgccccaaatgagatggtgtaccgcttcaccgcccggcccctggtggagaccatctttgagcggggcatggccacctgctttgcctacggccagacaggcagcggcaagacccacaccatgggcggggacttcagcggcaagaaccaggactgcagcaagggcatctatgccctggccgccagagatgtgttcctgatgctgaagaagcccaactacaagaagctggagctgcaggtgtatgccaccttctttgagatctacagcggcaaggtgtttgacctgctgaacaggaagaccaagctgcgggtgctggaggatggcaagcagcaggtgcaggtggtgggcctgcaggagcgggaggtgaagtgtgtggaggatgtgctgaagctgattgacatcggcaacagctgcaggaccagcggccagaccagcgccaatgcccacagcagccgcagccatgctgtgttccagatcatcctgcggaggaagggcaagctgcacggcaagttcagcctgattgacctggccggaaatgaaagaggagctgacaccagcagcgctgaccggcagacccggctggagggcgctgagatcaacaagagcctgctggccctgaaggagtgcatccgggccctgggcaggaacaagccccacacccccttccgggccagcaagctgacccaggtgctgcgggacagcttcatcggggagaacagcaggacctgcatgattgccaccatcagccctggcatggccagctgtgagaacaccctgaacaccctgcgctatgccaacagagtgaaggagctgactgtggaccccacagctgctggagatgtgcggcccatcatgcaccacccccccaaccagattgatgacctggagacccagtggggcgtgggcagcagcccccagagagatgacctgaagctgctgtgtgagcagaatgaggaggaggtgagcccccagctgttcaccttccatgaagctgtgtcccagatggtggagatggaggagcaggtggtggaggaccacagagctgtgttccaggagagcatccgctggctggaggatgagaaggccctgctggagatgacagaggaggtggactatgatgtggacagctatgccacccagctggaggccatcctggagcagaagattgacatcctgacagagctgcgggacaaggtgaagagcttccgggccgccctgcaggaggaggagcaggccagcaagcagatcaaccccaagaggccccgggccctgtag

SEQ ID NO: 21942 - DNA, 207 bp, synthetic construct
  source 1..207: mol_type = other DNA; note = Synthetic coding sequence
atgagcagcccccgggacttccgggcagagcctgtgaatgactatgagggcaatgacagcgaggccgaggacctgaacttccgggagaccctgcccagcagcagccaggagaacacccccaggagcaaggtgtttgagaacaaggtgaacagcgagaaggtgaagctgagcctgaggaacttcccccacaatgactatgaagattag

SEQ ID NO: 21943 - DNA, 294 bp, synthetic construct
  source 1..294: mol_type = other DNA; note = Synthetic coding sequence
atgaatggccgggctgacttccgggagcccaatgctgaggtgccccggcccatcccccacatcggccctgactacatccccacagaggaggagcggcgggtgtttgctgaatgtaatgatgagagcttctggttccgctctgtgcccctggccgccacctccatgctgatcacccagggcctcatcagcaagggcatcctgagcagccaccccaagtatggcagcatccccaagctgatcctggcctgcatcatgggctactttgctgggaagctgtcctatgtgaagacctag

SEQ ID NO: 21944 - DNA, 309 bp, synthetic construct
  source 1..309: mol_type = other DNA; note = Synthetic coding sequence
atggtgatggagaagcccagccccctgctggtgggccgggagtttgtgcggcagtactacaccctgctgaacaaggcccctgagtacctgcaccgcttctacggcaggaacagcagctatgtgcacggcggcgtggatgccagcggcaagccccaggaggccgtgtatggccagaatgacatccaccacaaggtgctgagcctgaacttcagcgagtgccacaccaagatcagacatgtggatgcccacgccaccctgagtgatggagtggtggtgcaggtgatgggcctgctgagcaacagcggctag

SEQ ID NO: 21945 - DNA, 597 bp, synthetic construct
  source 1..597: mol_type = other DNA; note = Synthetic coding sequence
atgggcaccacctgcctgcacctgggcaccctggagcagagcctggtgtttgagaacaaggtgaacagcgagaaggtgaagctgagcctgaggaacttcccccacaatgactatgaagatgtgtttgaggagcccagcgagagcggcagtgaccccagcatgtggacagcccggggccccttccggcgggaccgctggagcagtgaagatgaggaggccgccggccccagccaggccctgagccccctgctgagtgacaccaggaagatcgtgtctgagggggagctggaccagctggcccagatccggcccctcatcttcaacttccacgagcagacagccatcaaggactgcctgaagatcctggaggagaagacagctgcctatgacatcatgcaggagttcatggccctggagctgaagaacctgcccggggagttcaacagcggcaaccagcccagcaaccgggagaagaaccgctacagagacatcctgcccttccagcaccacggctacagcggccccaatgaaagaaccaccttctggcacggcagcaatgaaggagctgtgtccctgctgctgcgctactgtgcctag

SEQ ID NO: 21946 - DNA, 384 bp, synthetic construct; identical to SEQ ID NO: 18976
  source 1..384: mol_type = other DNA; note = Synthetic coding sequence

SEQ ID NO: 21947 - DNA, 426 bp, synthetic construct
  source 1..426: mol_type = other DNA; note = Synthetic coding sequence
atggtgatggagaagcccagccccctgctggtgggccgggagtttgtgcggcagtactacaccctgctgaacaaggcccctgagtacctgcaccgcttctacggcaggaacagcagctatgtgcacggcggcgtggatgccagcggcaagccccaggaggccgtgtatggccagaatgacatccaccacaaggtgctgagcctgaacttcagcgagtgccacaccaagatcagacatgtggatgcccacgccaccctgagtgatggagtggtggtgcaggtgatgggcctgctgagcaacagcggccagcctgagaggaagttcatgcagacctttgtgctggcccctgagggctctgtgcccaacaagttctacgtgcacaatgacatgttccgctatgaagatgaggtgtttggagacagctag

SEQ ID NO: 21948 - DNA, 135 bp, synthetic construct
  source 1..135: mol_type = other DNA; note = Synthetic coding sequence
atgctgctgctggactgcaaccctgaggtggatggcctgaagcacctgctggagactggagcctctgtgaatgcccccccagacccctgcaagcagagccctgtgcacctggccgccggcagcggcctggcctag

SEQ ID NO: 21949 - DNA, 399 bp, synthetic construct
  source 1..399: mol_type = other DNA; note = Synthetic coding sequence
atgaagaggggccgcctgcccagcagcagtgaagattctgatgacaatggcagcctgagcaccacctggagccagaacagccgcagccagcaccggcgcagcagctgcagcagacatgaggacaggaagcccagcgaggtgttcagaacagacctgatcacagccatgaagctgcatgacagctaccagctgaacccagatgagtactacgtgctggccgacccctggaggcaggagtgggagaagggcgtgcaggtgcctgtgtccccaggcaccatcccccagcctgtggcccgggtggtgtctgaggagaagagcctgatgttcatccggcccaagaagtacatcgtgagcagcggcagcgagcccccagagctgggctacgtggacatcagatag

SEQ ID NO: 21950 - DNA, 972 bp, synthetic construct; identical to SEQ ID NO: 20597
  source 1..972: mol_type = other DNA; note = Synthetic coding sequence

SEQ ID NO: 21951 - DNA, 312 bp, synthetic construct
  source 1..312: mol_type = other DNA; note = Synthetic coding sequence
atggcccagacagacaagcccacctgcatccccccagagctgcccaagatgctgaaggagtttgccaaggccgccatccgggcccagccccaggacctgatccagtggggcgctgactactttgaggccctgagcagaggagagaccccacctgtgcgggagaggtctgagcgggtggccctgtgcaactgggccgagctgaccccagagctgctgaagatcctgcacagccaggtggccggccgcctcatcatccgggcagaggagctggcccagatgtggaaggtggtgaacctgcccacagacctgtag

SEQ ID NO: 21952 - DNA, 540 bp, synthetic construct
  source 1..540: mol_type = other DNA; note = Synthetic coding sequence
atggaggatggcacccccaagcacatcatccagatgacaggcttcaagatggaggagaaggaggccctggtgaagctgctgctgaagctggactgcaccttcatcaagtctgagaagtacaagaactgcacccacctgattgctgagcggctgtgcaagtctgagaagttcctggccgcctgtgccgccggcaagtggatcctgaccaaggactacatcatccacagcgccaagagcggccgctggctggatgagaccacctatgagtggggctacaagattgagaaggacagccgctacagcccccagatgcagagcgcccccaagcgctggagggaggagctgaagaggactggagcccctggggccttccaccgctggaaggtggtgctgctggtgaggacagacaagagaagtgacagcctcatcaggaagaagttcaggatgatgaagatccccaagcccatcctgtttggcctgaacatcgccatgaagaagcagaccaagatcagcggcaagatgcaggacttcctgaagtag

SEQ ID NO: 21953 - DNA, 453 bp, synthetic construct
  source 1..453: mol_type = other DNA; note = Synthetic coding sequence
atggaggccgacatcatcaccaacctgcgctgccgcctgaaggaggccgaggaggagcggctgaaggccgcccagtatggcctgcagctggtggagagccagaatgagctgcagaaccagctggacaagtgcagaaatgagatgatgaccatgacagagagctatgagcaggagaagtacaccctgcagcgggaggtggagctgaagagcaggatgctggagagcctgagctgtgaatgtgaggccatcaagcagcagcagaagatgcacctggagaagctggaggagcagctgagccgcagccacggccaggaggtgaatgagctgaagaccaagattgagaagctgaaggtggagctggatgaggcccggctgtctgagaagcagctgaagcaccaggtggaccaccagaaggagctgctgagctgcaagtctgaggagctgcgggtgtag

SEQ ID NO: 21954 - DNA, 738 bp, synthetic construct; identical to SEQ ID NO: 18499
  source 1..738: mol_type = other DNA; note = Synthetic coding sequence

SEQ ID NO: 21955 - DNA, 180 bp, synthetic construct
  source 1..180: mol_type = other DNA; note = Synthetic coding sequence
atggtgatggagaagcccagccccctgctggtgggccgggagtttgtgcggcagtactacaccctgctgaacaaggcccctgagtacctgcaccgcttctacggcaggaacagcagctatgtgcacggcggcgtggatgccagcggcaagccccaggaggccgtgtatggccagaactag

SEQ ID NO: 21956 - DNA, 597 bp, synthetic construct; identical to SEQ ID NO: 21945
  source 1..597: mol_type = other DNA; note = Synthetic coding sequence

SEQ ID NO: 21957 - DNA, 465 bp, synthetic construct
  source 1..465: mol_type = other DNA; note = Synthetic coding sequence
atggccagcgccagcgcccggggcaaccaggacaaggatgcccacttccccccacccagcaagcagagcctgctcttctgccccaagagcaagctgcacatccacagagctgagatcagcaagatcatgagggagtgccaggaggagagcttctggaagagggccctgcccttcagcctggtgtccatgctggtgacccagggcctggtgtaccagggctacctggccgccaacagcagatttggcagcctgcccaaggtggccctggccggcctgctgggcttcggcctgggcaaggtgtcctacatcggcgtgtgccagagcaagttccacttctttgaggaccagctgcggggggccggcttcggcccccagcacaacagacactgcctgctgacctgtgaggagtgcaagatcaagcacggcctgtctgagaagggggacagccagcccagcgccagctag

SEQ ID NO: 21958 - DNA, 2520 bp, synthetic construct; identical to SEQ ID NO: 18712
  source 1..2520: mol_type = other DNA; note = Synthetic coding sequence

SEQ ID NO: 21959 - DNA, 54 bp, synthetic construct
  source 1..54: mol_type = other DNA; note = Synthetic coding sequence
atggatgagggcatggagatcagcagcgagggcaacagcctcatcaaggcctag

SEQ ID NO: 21960 - DNA, 2394 bp, synthetic construct
  source 1..2394: mol_type = other DNA; note = Synthetic coding sequence
atgggcgtgtcccggctgatggacctgctggccgacagccgggaggtgatcagaaatgatggagtgctgctgctgcaggccctgaccaggagcaatggagccatccagaagatcgtggcctttgaaaatgcctttgagcggctgctggacatcatcagcgaggagggcaacagtgatggcggcatcgtggtggaggactgcctgatcctgctgcagaacctgctgaagaacaacaacagcaaccagaacttcttcaaggagggcagctacatccagaggatgaagccctggtttgaggtgggagatgaaaattctggctggagcgcccagaaggtgaccaacctgcacctgatgctgcagctggtgcgggtgctggtgagccccaccaaccccccaggggccaccagcagctgccagaaggccatgttccagtgtggcctgctgcagcagctgtgcaccatcctgatggccaccggggtgcctgctgacatcctgacagagaccatcaacacagtgtctgaggtgatccggggctgccaggtgaaccaggactactttgcctctgtgaatgcccccagcaacccccccaggcctgccatcgtggtgctgctgatgtccatggtgaatgaaaggcagccctttgtgctgcgctgtgctgtgctgtactgcttccagtgcttcctgtacaagaaccagaagggccagggcgagatcgtgtccaccctgctgcccagcaccattgatgccaccggcaacagcgtgtctgctggccagctgctgtgtggcggcctcttcagcacagacagcctgagcaactggtgtgccgctgtggccctggcccacgccctgcaggagaatgccacccagaaggagcagctgctgcgggtgcagctggccaccagcatcggcaacccccctgtgtccctgctgcagcagtgcaccaacatcctgagccagggcagcaagatccagaccagggtgggcctgctgatgctgctgtgcacctggctgagcaactgccccatcgctgtgacccacttcctgcacaacagcgccaacgtgcccttcctgaccggccagattgctgagaacctgggggaggaggagcagctggtgcagggcctgtgtgccctgctgctgggcatcagcatctacttcaatgacaacagcctggagagctacatgaaggagaagctgaagcagctgattgagaagagaattggcaaggagaacttcatcgagaagctgggcttcatcagcaagcatgagctgtacagccgggccagccagaagccccagcccaacttccccagccctgagtacatgatctttgaccacgagttcaccaagctggtgaaggagctggagggcgtcatcaccaaggccatctacaagagcagcgaggaggacaagaaggaggaggaggtgaagaagaccctggagcagcacgacaacatcgtgacccactacaagaacatgatccgggagcaggacctgcagctggaggagctgcggcagcaggtgtccaccctgaagtgccagaatgagcagctgcagacagctgtgacccagcaggtgtcccagatccagcagcacaaggaccagtacaacctgctgaagatccagctgggcaaggacaaccagcaccagggcagctacagcgagggcgcccagatgaatggcatccagcctgaggagatcggccgcctgcgggaggagattgaggagctgaagaggaaccaggagctgctgcagagccagctgacagagaaggacagcatgattgagaacatgaagagcagccagaccagcggcaccaatgagcagagcagcgccatcgtgtctgcccgggacagcgagcaggtggccgagctgaagcaggagctggccaccctgaagagccagctgaacagccagagcgtggagatcaccaagctgcagacagagaagcaggagctgctgcagaagacagaggcctttgccaagtctgtggaggtgcagggcgagacagagaccatcatcgccaccaagaccacagatgtggagggccgcctgagcgccctgctgcaggagaccaaggagctgaagaatgagatcaaggccctgtctgaggagaggacagccatcaaggagcagctggacagcagcaacagcaccatcgccatcctgcagacagagaaggacaagctggagctggagatcacagacagcaagaaggagcaggatgacctgctggtgctgctggccgaccaggaccagaagatcctgagcctgaagaacaagctgaaggacctgggccaccctgtggaggaggaggatgagctggagagcggggaccaggaggatgaagatgatgaaagtgaggaccccgggaaggacctggaccacatctag

SEQ ID NO: 21961 - DNA, 441 bp, synthetic construct
  source 1..441: mol_type = other DNA; note = Synthetic coding sequence
tgaagacacctgcgggccacccccaacacccggggcagcgcccggctgctgtgtgccgagatgcccaagaaggccggggccaccaccaagggcaagagccagagcaaggagcctgagcggcccctgccccccctgggccctgtggccgtggaccccaagggctgtgtgaccatcgccatccacgccaagccaggcagcaagcagaatgctgtgacagacctgacagctgaggccgtgaatgtggccatcgccgccccacccagcgagggggaggccaatgctgagctgtgccgctacctgagcaaggtgctggagctgaggaagagtgatgtggtgctggacaagaagctgcgggacctgctgaagatcgtgccctgcaagctggccaccaggacccagatcctgggcctgctggtggagtgcagcttcagccggctgtag

SEQ ID NO: 21962 - DNA, 243 bp, synthetic construct
  source 1..243: mol_type = other DNA; note = Synthetic coding sequence
atgaatggccgggctgacttccgggagcccaatgctgaggtgccccggcccatcccccacatcggccctgactacatccccacagaggaggagcggcgggtgtttgctgaatgtaatgatgagagcttctggttccgctctgtgcccctggccgccacctccatgctgatcacccagggcctcatcagcaagggcatcctgagcagccaccccaagtatggcagcatccccaagctgatctag

SEQ ID NO: 21963 - DNA, 360 bp, synthetic construct
  source 1..360: mol_type = other DNA; note = Synthetic coding sequence
atgaagaggggccgcctgcccagcagcagtgaagattctgatgacaatggcagcctgagcaccacctggagccagaacagccgcagccagcaccggcgcagcagctgcagcagacatgaggacaggaagcccagcgaggtgttcagaacagacctgatcacagccatgaagctgcatgacagctaccagctgaacccagatgagtactacgtgctggccgacccctggaggcaggagtgggagaagggcgtgcaggtgcctgtgtccccaggcaccatcccccagcctgtggcccgggtggtgtctgaggagaagagcctgatgttcatccggcccaagaagtacatcgtgagcagctag

SEQ ID NO: 21964 - DNA, 69 bp, synthetic construct
  source 1..69: mol_type = other DNA; note = Synthetic coding sequence
atggccaagtacaacacaggaggcaaccccacagaagatgtgtctgtgaacagccggcccttcagatag

SEQ ID NO: 21965 - DNA, 1059 bp, synthetic construct
  source 1..1059: mol_type = other DNA; note = Synthetic coding sequence
atggctgctgctgtgcggcaggacctggcccagctgatgaacagcagcggcagccacaaggacctggccggcaagtaccggcagatcctggagaaggccatccagctgtctggagctgagcagctggaggccctgaaggcctttgtggaggccatggtgaatgaaaatgtgtccctggtgatcagccggcagctgctgacagacttctgcacccacctgcccaacctgcctgacagcacagccaaggagatctaccacttcaccctggagaagatccagcccagggtcatcagctttgaggagcaggtggccagcatccggcagcacctggccagcatctatgagaaggaggaggactggagaaatgctgcccaggtgctggtgggcatccccctggagaccggccagaagcagtacaacgtggactacaagctggagacctacctgaagatcgcccggctgtacctggaggatgatgatcctgtgcaggccgaggcctacatcaacagagccagcctgctgcagaatgaaagcaccaatgagcagctgcagatccactacaaggtgtgctacgcccgggtgctggactacagaaggaagttcatcgaggccgcccagcgctacaatgagctgagctacaagaccatcgtgcatgagagcgagcggctggaggccctgaagcacgccctgcactgcaccatcctggccagcgctggccagcagaggagcaggatgctggccaccctcttcaaggatgagcgctgccagcagctggccgcctacggcatcctggagaagatgtacctggaccgcatcatccggggcaaccagctgcaggagtttgctgccatgctgatgccccaccagaaggccaccacagcagatggcagcagcatcctggacagagctgtgattgagcacaacctgctgagcgccagcaagctgtacaacaacatcacctttgaggagctgggcgccctgctggagatcccagctgccaagcatgagaagccctgccagaggggcatcagccgcagcaaccactttgtgtccaagtag

SEQ ID NO: 21966 - DNA, 378 bp, synthetic construct
  source 1..378: mol_type = other DNA; note = Synthetic coding sequence
atggtgatggagaagcccagccccctgctggtgggccgggagtttgtgcggcagtactacaccctgctgaacaaggcccctgagtacctgcaccgcttctacggcaggaacagcagctatgtgcacggcggcgtggatgccagcggcaagccccaggaggccgtgtatggccagaatgacatccaccacaaggtgctgagcctgaacttcagcgagtgccacaccaagatcagacatgtggatgcccacgccaccctgagtgatggagtggtggtgcaggtgatgggcctgctgagcaacagcggccagcctgagaggaagttcatgcagacctttgtgctggcccctgagggctctgtgcccaacaagttctactag

SEQ ID NO: 21967 - DNA, 657 bp, synthetic construct
  source 1..657: mol_type = other DNA; note = Synthetic coding sequence
atgaatggccgggctgacttccgggagcccaatgctgaggtgccccggcccatcccccctgtgcccctggccgccacctccatgctgatcacccagggcctcatcagcaagggcatcctgagcagccaccccaagtatggcagcatccccaagctgatcctggcctgcatcatgggctactttgctgggaagctgtcctatgtgaagacctgccaggagaagttcaagaagctggagaacagccccctgggggaggccctgcggagcggccaggcccggcgcagcagccccccaggccactactaccagaagagcaaatatgacagctctgtgtctggccagagcagctttgtgaccagccctgctgctgacaacatcgagatgctgccccactatgagcccatccccttcagcagctccatgaatgaaagtgcccccaccggcatcacagaccacatcgtgcagggccctgaccccaacctggaggagagccccaagaggaagaacatcacctatgaggagctgaggaacaagaaccgggagagctatgaggtgtccctgacccagaagacagaccccagcgtgcggcccatgcatgagcgggtgcccaagaaggaggtgaaggtgaacaagtacggggacacctgggatgaatag

SEQ ID NO: 21968 - DNA, 243 bp, synthetic construct; identical to SEQ ID NO: 21962
  source 1..243: mol_type = other DNA; note = Synthetic coding sequence

SEQ ID NO: 21969 - DNA, 654 bp, synthetic construct
  source 1..654: mol_type = other DNA; note = Synthetic coding sequence
atgattgtgaatgactatgagggcaatgattctgaggccgaggacctgaacttccgggagaccctgcccagcagcagccaggagaacacccccaggagcaaggtgtttgagaacaaggtgaacagcgagaaggtgaagctgagcctgaggaacttcccccacaatgactatgaagatgtgtttgaggagcccagcgagagcggcagtgaccccagcatgtggacagcccggggccccttcagaagagaccgctggagcagtgaagatgaggaggccgccggccccagccaggccctgagccccctgctgagtgacaccaggaagatcgtgtctgagggggagctggaccagctggcccagatccggcccctcatcttcaacttccacgagcagacagccatcaaggactgcctgaagatcctggaggagaagacagctgcctatgacatcatgcaggagttcatggccctggagctgaagaacctgcctggagagttcaacagcggcaaccagcccagcaaccgggagaagaaccgctacagagacatcctgcccttccagcaccacggctacagcggccccaatgaaagaaccaccttctggcacggcagcaatgaaggagctgtgtccctgctgctgcgctactgtgcctag

SEQ ID NO: 21970 - DNA, 351 bp, synthetic construct
  source 1..351: mol_type = other DNA; note = Synthetic coding sequence
atgggccgcctggatggcaaggtgatcatcctgacagctgctgcccagggcatcggccaggccgccgccctggcctttgcccgggagggcgccaaggtgattgccacagacatcaatgaaagcaagctgcaggagctggagaagtacccaggcatccagaccagggtgctggatgtgaccaagaagaagcagattgaccagtttgccaatgaggtggagcggctggatgtgctcttcaacgtggccggctttgtgcaccacggcaccgtgctggactgtgaggagaaggactgggacttctccatgaacctgaatgtgcgctccatgtacctgatgatcaaggccttctag

SEQ ID NO: 21971 - DNA, 504 bp, synthetic construct
  source 1..504: mol_type = other DNA; note = Synthetic coding sequence
atgaaggccatcaagaagagcctgacagaggaggagtacctgtacctggacttcagccaccagacagagggctgcatcttccccctgcacacctctgtgaccctcttcctgctgagctactgtgactgcaagatcttcaagatctgcctggtggtgaccaaggaggtgtcccgggacagcagcctgctgagagatgacctgatccaggatgtggagatccagatcatcagccggcaggagctgccccccatcgtgcagaactgctgcctgcctgctgtggtggagaggagtgacaacttctgcagagctggcctggccgtggtgctgcggcacatcatccagaagagctatgaagctgaccccctgaagaaggagctgctggagctgctgggcttcaagaagacctgcctgaaggcctgtgccgaggtgtcccagtggacccggctgtgtgagctgaccatccccctggccatcgagaacttcctgcgggagagcagtgactag

SEQ ID NO: 21972 - DNA, 933 bp, synthetic construct; identical to SEQ ID NO: 19043
  source 1..933: mol_type = other DNA; note = Synthetic coding sequence

SEQ ID NO: 21973 - DNA, 237 bp, synthetic construct
  source 1..237: mol_type = other DNA; note = Synthetic coding sequence
atggtgatggagaagcccagccccctgctggtgggccgggagtttgtgcggcagtactacaccctgctgaacaaggcccctgagtacctgcaccgcttctacggcaggaacagcagctatgtgcacggcggcgtggatgccagcggcaagccccaggaggccgtgtatggccagaatgacatccaccacaaggtgctgagcctgaacttcagcgagtgccacaccaagatcagatag

SEQ ID NO: 21974 - DNA, 681 bp, synthetic construct; identical to SEQ ID NO: 19967
  source 1..681: mol_type = other DNA; note = Synthetic coding sequence

SEQ ID NO: 21975 - DNA, 1020 bp, synthetic construct; identical to SEQ ID NO: 19098
  source 1..1020: mol_type = other DNA; note = Synthetic coding sequence

SEQ ID NO: 21976 - DNA, 1179 bp, synthetic construct; identical to SEQ ID NO: 20458
  source 1..1179: mol_type = other DNA; note = Synthetic coding sequence

SEQ ID NO: 21977 - DNA, 654 bp, synthetic construct; identical to SEQ ID NO: 21969
  source 1..654: mol_type = other DNA; note = Synthetic coding sequence

SEQ ID NO: 21978 - DNA, 438 bp, synthetic construct; identical to SEQ ID NO: 20460
  source 1..438: mol_type = other DNA; note = Synthetic coding sequence

SEQ ID NO: 21979 - DNA, 207 bp, synthetic construct; identical to SEQ ID NO: 21942
  source 1..207: mol_type = other DNA; note = Synthetic coding sequence

SEQ ID NO: 21980 - DNA, 525 bp, synthetic construct
  source 1..525: mol_type = other DNA; note = Synthetic coding sequence
atggccaagtacaacacaggaggcaaccccacagaagatgtgtctgtgaacagccggcccttccgggtgacaggccccaacagcagcagcggcatccaggccaggaagaacctcttcaacaaccagggcaatgccagccccccagctggccccagcaatgtgcccaagtttggcagccccaagccccctgtggccgtgaagcccagcagcgaggagaagccagacaaggagcccaagccacccttcctgaagcccaccggggccggccagcgcttcggcaccccagccagcctgaccacccgggaccctgaggccaaggtgggcttcctgaagcctgtgggccccaagcccatcaacctgcccaaggaggacagcaagcccaccttcccctggcccccaggcaacaagcccagcctgcacagcgtgaaccaggaccatgacctgaagcccctgggccccaagagcggccccaccccacccaccagtgaaaatgagcagaagcaggccttccccaagctgacctag

SEQ ID NO: 21981 - DNA, 405 bp, synthetic construct
  source 1..405: mol_type = other DNA; note = Synthetic coding sequence
atgtctgatgatgctggggacaccctggccactggagacaaggccgaggtgacagagatgcccaacagcgacagcctgcctgaagatgctgaggtgcactgtgacagcgctgctgtgtcccatgagcccaccccagctgaccccagaggagagggccatgaaaatgctgctgtgcagggcgctggggccgccgccatcggcccccctgtgcagccccaggatgccaatgccctggagccccccctgaatggagatgtgacagaggacaccctggctgaatgtattgattctgtgtccctggaggccgagcccaggtctgagatccccctgcaggagcagaactacctggccgtggacagccccccatctgggggcggctgggccggctggggctcctggggctag

SEQ ID NO: 21982 - DNA, 432 bp, synthetic construct
  source 1..432: mol_type = other DNA; note = Synthetic coding sequence
atgaagaggggccgcctgcccagcagcagtgaagattctgatgacaatggcagcctgagcaccacctggagccagaacagccgcagccagcaccggcgcagcagctgcagcagacatgaggacaggaagcccagcgaggtgttcagaacagacctgatcacagccatgaagctgcatgacagctaccagctgaacccagatgagtactacgtgctggccgacccctggaggcaggagtgggagaagggcgtgcaggtgcctgtgtccccaggcaccatcccccagcctgtggcccgggtggtgtctgaggagaagagcctgatgttcatccggcccaagaagtacatcgtgagcagcggcagcgagcccccagagctgggctacgtggacatccgcaccctggccgacagcgtgtgccgctatgacctgtag

SEQ ID NO: 21983 - DNA, 1200 bp, synthetic construct; identical to SEQ ID NO: 20179
  source 1..1200: mol_type = other DNA; note = Synthetic coding sequence

SEQ ID NO: 21984 - DNA, 240 bp, synthetic construct
  source 1..240: mol_type = other DNA; note = Synthetic coding sequence
atggatgagagcgccctgctggacctgctggagtgccctgtgtgcctggagcggctggatgccagcgccaaggtgctgccctgccagcacaccttctgcaagcgctgcctgctgggcatcgtgggcagcagaaatgagctgcgctgcccagaatgtaggaccctggtgggcagcggcgtggaggagctgcccagcaacatcctgctggtgcggctgctggatggcatcaagcagaggtag

SEQ ID NO: 21985 - DNA, 621 bp, synthetic construct; identical to SEQ ID NO: 20459
  source 1..621: mol_type = other DNA; note = Synthetic coding sequence

SEQ ID NO: 21986 - DNA, 501 bp, synthetic construct
  source 1..501: mol_type = other DNA; note = Synthetic coding sequence
atgaaggccatcaagaagagcctgacagaggaggagtacctgtacctggacttcagccaccagacagagggctgcatcttccccctgcacacctctgtgaccctcttcctgctgagctactgtgactgcaagatcttcaagatctgcctggtggtgaccaaggaggtgtcccgggacagcagcctgctgagagatgacctgatccaggatgtggagatccagatcatcagccggcaggagctgccccccatcgtgcagaactgctgcctgcctgctgtggtggagaggagtgacaacttctgcagagctggcctggccgtggtgctgcggcacatcatccagaagagctatgaagctgaccccctgaagaaggagctgctggagctgctgggcttcaagaagacctgcctgaaggcctgtgccgaggtgtcccagtggacccggctgtgtgagctgaccatccccctggccatcgagaacttcctgcgggagagcagctag

SEQ ID NO: 21987 - DNA, 363 bp, synthetic construct; identical to SEQ ID NO: 21922
  source 1..363: mol_type = other DNA; note = Synthetic coding sequence

SEQ ID NO: 21988 - DNA, 351 bp, synthetic construct
  source 1..351: mol_type = other DNA; note = Synthetic coding sequence
atggtgatggagaagcccagccccctgctggtgggccgggagtttgtgcggcagtactacaccctgctgaacaaggcccctgagtacctgcaccgcttctacggcaggaacagcagctatgtgcacggcggcgtggatgccagcggcaagccccaggaggccgtgtatggccagaatgacatccaccacaaggtgctgagcctgaacttcagcgagtgccacaccaagatcagacatgtggatgcccacgccaccctgagtgatggagtggtggtgcaggtgatgggcctgctgagcaacagcggccagcctgagaggaagttcatgcagacctttgtgctggccccctag

SEQ ID NO: 21989 - DNA, 480 bp, synthetic construct
  source 1..480: mol_type = other DNA; note = Synthetic coding sequence
atgtctgaccacagatatggagatggcggcagcaccttccagagcaccaccggccactgtgtgcacatgaggggcctgccctaccgggccacagaaaatgacatctacaacttcttcagccccctgaaccctgtgcgggtgcacattgaaattggaccagatggccgggtgactggagaggctgatgtggagtttgccacccatgaagatgctgtggccgccatgagcaaggacaaggccaacatgcagcaccgctacgtggagctgttcctgaacagcacagctggggccagcggcggggcctacggcagccagatgctgggcggcatgggcctgagcaaccagagcagctatggaggccctgccagccagcagctgagcggcggctacggcggcggctacggcggccagagctccatgagcggctatgaccaggtgctgcaggagaacagcagtgacttccagagcaacatcgcctag

SEQ ID NO: 21990 - DNA, 411 bp, synthetic construct; identical to SEQ ID NO: 21905
  source 1..411: mol_type = other DNA; note = Synthetic coding sequence

SEQ ID NO: 21991 - DNA, 462 bp, synthetic construct
  source 1..462: mol_type = other DNA; note = Synthetic coding sequence
atgaagctgaccagcgagaagctgcccaagaaccccttctacgcctctgtgtcccagtatgctgccaagaaccagaagttcttccagtggaagaaggagaagacagactacacccacgccaacctggtggacaaggccctgcagctgctgaaggagcgcatcctgaagggggacaccctggcctacttcctgcggggccagctgtactttgaggagggctggtatgaggaggccctggagcagtttgaggagatcaaggagaaggaccaccaggccacctaccagctgggcgtgatgtactatgatggcctgggcaccaccctggatgctgagaagggcgtggactacatgaagaagatcctggacagcccctgccccaaggcccggcacctgaagtttgctgctgcctacaacctgggccgggcctactatgagggcaaaggagtgaagaggagcaactag

SEQ ID NO: 21992 - DNA, 489 bp, synthetic construct
  source 1..489: mol_type = other DNA; note = Synthetic coding sequence
atggaggccctgctggagggcatccagaacagaggacatggaggcggcttcctgaccagctgtgaggccgagctgcaggagctgatgaagcagattgacatcatggtggcccacaagaagtctgagtgggagggccgcacccacgccctggagacctgcctgaagatccgggagcaggagctgaagagcctgcggagccagctggatgtgacccacaaggaggtgggcatgctgcaccagcaggtggaggagcacgagaagatcaagcaggagatgaccatggagtacaagcaggagctgaagaagctgcacgaggagctgtgcatcctgaagaggagctatgagaagctgcagaagaagcagatgagggagttccggggcaacaccaagaaccaccgggaggacagaagtgaaattgagcggctgacagccaagattgaggagttccggcagaagagcctggactgggagaagcagaggctcatctag

SEQ ID NO: 21993 - DNA, 1530 bp, synthetic construct; identical to SEQ ID NO: 20810
  source 1..1530: mol_type = other DNA; note = Synthetic coding sequence

SEQ ID NO: 21994 - DNA, 90 bp, synthetic construct
  source 1..90: mol_type = other DNA; note = Synthetic coding sequence
atgaatggccgggctgacttccgggagcccaatgctgaggtgccccggcccatcccccacatcggccctgactacatccccacagaatag

SEQ ID NO: 21995 - DNA, 1236 bp, synthetic construct
  source 1..1236: mol_type = other DNA; note = Synthetic coding sequence
atgattgtgaatgactatgagggcaatgattctgaggccgaggacctgaacttccgggagaccctgcccagcagcagccaggagaacacccccaggagcaaggtgtttgagaacaaggtgaacagcgagaaggtgaagctgagcctgaggaacttcccccacaatgactatgaagatgtgtttgaggagcccagcgagagcggcagtgaccccagcatgtggacagcccggggccccttcagaagagaccgctggagcagtgaagatgaggaggccgccggccccagccaggccctgagccccctgctgagtgacaccaggaagatcgtgtctgagggggagctggaccagctggcccagatccggcccctcatcttcaacttccacgagcagacagccatcaaggactgcctgaagatcctggaggagaagacagctgcctatgacatcatgcaggagttcatggccctggagctgaagaacctgcctggagagttcaacagcggcaaccagcccagcaaccgggagaagaaccgctacagagacatcctgccctatgacagcaccagggtgcccctgggcaagagcaaggactacatcaatgccagctacatcagaattgtgaactgtggggaggagtacttctacatcgccacccagggccccctgctgagcaccattgatgacttctggcagatggtgctggagaacaacagcaatgtcatcgccatgatcacccgggagattgaaggaggcatcatcaagtgctaccactactggcccatcagcctgaagaagcccctggagctgaagcacttccgggtcttcctggagaactaccagatcctgcagtacttcatcatccgcatgttccaggtggtggagaagagcacaggcaccagccacagcgtgaagcagctgcagttcaccaagtggccagaccacggcaccccagccagcgctgacagcttcatcaagtacatccgctatgccaggaagagccacctgaccggccccatggtggtgcactgcagcgctggcatcggccgcactggagtcttcctgtgtgtggatgtggtgttctgtgccatcgtgaagaactgcagcttcaacatcatggacatcgtggcccagatgagggagcagaggagcggcatggtgcagaccaaggagcagtaccacttctgctatgacatcgtgctggaggtgctgaggaagctgctgaccctggactag

SEQ ID NO: 21996 - DNA, 300 bp, synthetic construct
  source 1..300: mol_type = other DNA; note = Synthetic coding sequence
atggtgatggagaagcccagccccctgctggtgggccgggagtttgtgcggcagtactacaccctgctgaacaaggcccctgagtacctgcaccgcttctacggcaggaacagcagctatgtgcacggcggcgtggatgccagcggcaagccccaggaggccgtgtatggccagaatgacatccaccacaaggtgctgagcctgaacttcagcgagtgccacaccaagatcagacatgtggatgcccacgccaccctgagtgatggagtggtggtgcaggtgatgggcctgctgtcctag

SEQ ID NO: 21997 - DNA, 705 bp, synthetic construct
  source 1..705: mol_type = other DNA; note = Synthetic coding sequence
atggccagcagcgccaagtctgctgagatgcccaccatcagcaagacagtgaaccccaccccagacccccaccaggagtacctggacccccgcatcaccatcgccctgtttgaaattggcagccacagccccagctcctggggcagcctgcccttcctgaagaacagcagccaccaggtgacagagcagcagacagcccagaagttcaacaacctgctgaaggagatcaaggacatcctgaagaacatggccggctttgaggagaagatcacagaggccaaggagctgtttgaggagaccaacatcacagaagatgtgtctgcccacaaggagaacatccggggcctggacaagatcaatgagatgctgagcaccaacctgcctgtgtccctggcccctgagaaggaggacaatgagaagaagcaggagatgatcctggagaccaacatcacagaagatgtgtctgcccacaaggagaacatccggggcctggacaagatcaatgagatgctgagcaccaacctgcctgtgtccctggcccctgagaaggaggacaatgagaagaagcagcagatgatcatggagaaccagaacagcgagaacacagcccaggtgtttgcccgggacctggtgaaccggctggaggagaagaaggtgctgaatgagacccagcagagccaggagaaggccaagaaccggctgtag

SEQ ID NO: 21998 - DNA, 1095 bp, synthetic construct
  source 1..1095: mol_type = other DNA; note = Synthetic coding sequence
atgtacttctgctggggcgctgacagccgggagctgcagaggagaagaacagctggcagccctggagctgagctgctgcaggccgccagcggggagcggcacagcctgctgctgctgaccaaccaccgggtgctgagctgtggggacaacagccggggccagctgggcagaagaggagcccagagaggagagctgcctgagcccatccaggccctggagaccctcatcgtggacctggtgtcctgtgggaaggagcacagcctggccgtgtgccacaagggccgggtgtttgcctggggcgccggcagcgagggccagctgggcattggagagttcaaggagatctccttcacccccaagaagatcatgaccctgaatgacatcaagatcatccaggtgtcctgtggccactaccacagcctggccctgagcaaggacagccaggtgttctcctggggcaagaacagccacggccagctgggcctgggcaaggagttccccagccaggccagcccccagagggtgcgcagcctggagggcatccccctggcccaggtggccgccggcggggcccacagctttgccctgagcctgtgtggcaccagctttggctggggcagcaacagcgctggccagctggccctgagcggcagaaatgtgcctgtgcagagcaacaagcccctgtctgtgggcgccctgaagaacctgggcgtggtgtacatcagctgtggagatgcccacacagctgtgctgacccaggacggcaaggtgttcaccttcggggacaacagaagtggccagctgggctacagccccaccccagagaagaggggcccccagctggtggagagaattgatggcctggtgtcccagattgactgtggcagctaccacaccctggcctacgtgcacaccaccggccaggtggtgtcctttggccacggccccagcgacaccagcaagcccacccaccctgaggccctgacagagaactttgacatcagctgcctgatctctgcagaagattttgtggatgtgcaggtgaagcacatctttgctggcacctacgccaactttgtgaccacccaccagtag

SEQ ID NO: 21999 - DNA, 348 bp, synthetic construct
  source 1..348: mol_type = other DNA; note = Synthetic coding sequence
atggccaagtacaacacaggaggcaaccccacagaagatgtgtctgtgaacagccggcccttccgggtgacaggccccaacagcagcagcggcatccaggccaggaagaacctcttcaacaaccagggcaatgccagccccccagctggccccagcaatgtgcccaagtttggcagccccaagccccctgtggccgtgaagcccagcagcgaggagaagccagacaaggagcccaagccacccttcctgaagcccaccggggccggccagcgcttcggcaccccagccagcctgaccacccgggaccctgaggccaaggtgggcttcctgaagcctgtgggcccctag

SEQ ID NO: 22000 - DNA, 486 bp, synthetic construct
  source 1..486: mol_type = other DNA; note = Synthetic coding sequence
atggccggcatcctgcggctggtggtgcagtggcccccaggccgcctgcagacagtgaccaagggcgtggagagcctcatctgcacagactggatccgccacaagttcaccaggagccgcatccctgagaaggtgttccaggccagcccagaagatcatgagaagtatggaggagacccccagaacccccacaagctgcacatcgtgacccgcatcaagagcaccaggagaagaccctactgggagaaggacatcatcaagatgctgggcctggagaaggcccacaccccccaggtgcacaagaacatccccagcgtgaatgccaagctgaaggtggtgaagcacctgatccgcatcaagcccctgaagctgccccagggcctgcctgctgaggagaacatgagcaacacctgcctgaagagcactggagagctggtggtgcagtggcacctgaagcctgtggagcagaaggcccacgagagctag

SEQ ID NO: 22001 - DNA, 516 bp, synthetic construct
  source 1..516: mol_type = other DNA; note = Synthetic coding sequence
atgaatggccgggctgacttccgggagcccaatgctgaggtgccccggcccatcccccacatcggccctgactacatccccacagaggaggagcggcgggtgtttgctgaatgtaatgatgagagcttctggttccgctctgtgcccctggccgccacctccatgctgatcacccagggcctcatcagcaagggcatcctgagcagccaccccaagtatggcagcatccccaagctgatcctggcctgcatcatgggctactttgctgggaagctgtcctatgtgaagacctgccaggagaagttcaagaagctggagaacagccccctgggggaggccctgcggagcggccaggcccggcgcagcagccccccaggccactactaccagaagagcaaatatgacagctctgtgtctggccagagcagctttgtgaccagccctgctgctgacaacatcgagatgctgccccactatgagcccatccccttcagcagctccatgaatgaaagctag

SEQ ID NO: 22002 - DNA, 438 bp, synthetic construct; identical to SEQ ID NO: 21885
  source 1..438: mol_type = other DNA; note = Synthetic coding sequence

SEQ ID NO: 22003 - DNA, 243 bp, synthetic construct
  source 1..243: mol_type = other DNA; note = Synthetic coding sequence
atggtgaccagcctgaatgaagataatgaatctgtgacagtggagtggattgaaaatggagacaccaagggcaaggagattgacctggagagcatcttcagcctgaacccagacctggtgcctgatgaggagattgagcccagccctgagaccccacctcctccagccagcagcgccaaggtgaacaagatcgtgaagaacagaagaacagtggccagcatcaagaatgacccccccagctag

SEQ ID NO: 22004 - DNA, 123 bp, synthetic construct
  source 1..123: mol_type = other DNA; note = Synthetic coding sequence
atgaaggccatcaagaagagcctgacagaggaggagtacctgtacctggacttcagccaccagacagagggctgcatcttccccctgcacacctctgtgaccctcttcctgctgagctactag

SEQ ID NO: 22005 - DNA, 192 bp, synthetic construct
  source 1..192: mol_type = other DNA; note = Synthetic coding sequence
atggaggccctgctggagggcatccagaacagaggacatggaggcggcttcctgaccagctgtgaggccgagctgcaggagctgatgaagcagattgacatcatggtggcccacaagaagtctgagtgggagggccgcacccacgccctggagacctgcctgaagatccgggagcaggagctgaagagctag

SEQ ID NO: 22006 - DNA, 594 bp, synthetic construct
  source 1..594: mol_type = other DNA; note = Synthetic coding sequence
atgtggacagcccggggccccttcagaagagaccgctggagcagtgaagatgaggaggccgccggccccagccaggccctgagccccctgctgagtgacaccaggaagatcgtgtctgagggggagctggaccagctggcccagatccggcccctcatcttcaacttccacgagcagacagccatcaaggactgcctgaagatcctggaggagaagacagctgcctatgacatcatgcaggagttcatgacaggcaccagccacagcgtgaagcagctgcagttcaccaagtggccagaccacggcaccccagccagcgctgacagcttcatcaagtacatccgctatgccaggaagagccacctgaccggccccatggtggtgcactgcagcgctggcatcggccgcactggagtcttcctgtgtgtggatgtggtgttctgtgccatcgtgaagaactgcagcttcaacatcatggacatcgtggcccagatgagggagcagaggagcggcatggtgcagaccaaggagcagtaccacttctgctatgacatcgtgctggaggtgctgaggaagctgctgaccctggactag

SEQ ID NO: 22007 - DNA, 2529 bp, synthetic construct
  source 1..2529: mol_type = other DNA; note = Synthetic coding sequence
atgaagaggggccgcctgcccagcagcagtgaagattctgatgacaatggcagcctgagcaccacctggagccagaacagccgcagccagcaccggcgcagcagctgcagcagacatgaggacaggaagcccagcgaggtgttcagaacagacctgatcacagccatgaagctgcatgacagctaccagctgaacccagatgagtactacgtgctggccgacccctggaggcaggagtgggagaagggcgtgcaggtgcctgtgtccccaggcaccatcccccagcctgtggcccgggtggtgtctgaggagaagagcctgatgttcatccggcccaagaagtacatcgtgagcagcggcagcgagcccccagagctgggctacgtggacatccgcaccctggccgacagcgtgtgccgctatgacctgaatgacatggatgctgcctggctggagctgaccaatgaggagttcaaggagatgggcatgcctgagctggatgagtacaccatggagcgggtgctggaggagtttgagcagcgctgctatgacaacatgaaccacgccatcgagacagaggagggcctgggcatcgagtatgatgaagatgtggtgtgtgatgtgtgccagagcccagatggagaagatggaaatgagatggtgttctgtgacaagtgcaacatctgtgtgcaccaggcctgctacggcatcctgaaggtgcctgagggctcctggctgtgcaggacctgtgccctgggcgtgcagcccaagtgcctgctgtgccccaagaagggcggggccatgaagcccaccaggagcggcaccaagtgggtgcacgtgtcctgtgccctgtggatccctgaggtgtccatcggcagccctgagaagatggagcccatcaccaaggtgagccacatccccagcagccgctgggccctggtgtgcagcctgtgcaatgagaagtttggagccagcatccagtgcagcgtgaagaactgcaggacagccttccacgtgacctgtgcctttgaccggggcctggagatgaagaccatcctggctgaaaatgatgaggtgaagttcaagagctactgccccaagcacagcagccacaggaagccagaggagagcctgggcaagggggccgcccaggagaatggagcccctgagtgcagccccaggaaccccctggagccctttgccagcctggagcagaaccgggaggaggcccaccgggtgtctgtgaggaagcagaagctgcagcagctggaggatgagttctacacctttgtgaacctgctggatgtggcccgggccctgcggctgcctgaggaggtggtggacttcctgtaccagtactggaagctgaagaggaaggtgaacttcaacaagcccctcatcacccccaagaaggatgaggaggacaacctggccaagcgggagcaggatgtgctcttccggcggctgcagctgttcacccacctgcggcaggacctggagcgggtgaggaacctgacctacatggtgacccggcgggagaagatcaagaggtctgtgtgcaaggtgcaggagcagatcttcaacctgtacaccaagctgctggagcaggagcgggtgtctggagtgcccagcagctgcagcagcagcagcctggagaacatgctgctcttcaacagccccagcgtgggcccagatgcccccaagattgaggacctgaagtggcacagcgccttcttcaggaagcagatgggcaccagcctggtgcacagcctgaagaagccccacaagagggaccccctgcagaacagccctggcagcgagggcaagaccctgctgaagcagcctgacctgtgtggccggcgggagggcatggtggtgcctgagagcttcctgggcctggagaagacctttgctgaggcccggctcatcagcgcccagcagaagaatggagtggtgatgccagaccacggcaagagaagagacaaccgcttccactgtgacctgatcaagggggacctgaaggacaagagcttcaagcagagccacaagcccctgcggagcacagatgtgtcccagaggcacctggacaacacccgggccgccaccagccctggggtgggccagagcgcccctggcaccaggaaggagatcgtgcccaagtgcaatggcagcctcatcaaggtgaactacaaccagacagctgtgaaggtgcccaccaccccagccagccctgtgaagaactggggcggcttccgcatccccaagaagggggagcggcagcagcagggcgaggcccatgatggagcctgccaccagcacagcgactacccctacctgggcctgggccgggtgcctgccaaggagcgggccaagagcaagctgaagagtgacaatgaaaatgatggctacgtgcctgatgtggagatgtctgacagcgagagcgaggccagcgagaagaagtgcatccacaccagcagcaccatcagcagaagaacagacatcatccgccgcagcatcctggccagctag

SEQ ID NO: 22008 - DNA, 2490 bp, synthetic construct; identical to SEQ ID NO: 21923
  source 1..2490: mol_type = other DNA; note = Synthetic coding sequence

SEQ ID NO: 22009 - DNA, 810 bp, synthetic construct
  source 1..810: mol_type = other DNA; note = Synthetic coding sequence
atgattgtgaatgactatgagggcaatgattctgaggccgaggacctgaacttccgggagaccctgcccagcagcagccaggagaacacccccaggagcaaggtgtttgagaacaaggtgaacagcgagaaggtgaagctgagcctgaggaacttcccccacaatgactatgaagatgtgtttgaggagcccagcgagagcggcagtgaccccagcatgtggacagcccggggccccttcagaagagaccgctggagcagtgaagatgaggaggccgccggccccagccaggccctgagccccctgctgagtgacaccaggaagatcgtgtctgagggggagctggaccagctggcccagatccggcccctcatcttcaacttccacgagcagacagccatcaaggactgcctgaagatcctggaggagaagacagctgcctatgacatcatgcaggagttcatgacaggcaccagccacagcgtgaagcagctgcagttcaccaagtggccagaccacggcaccccagccagcgctgacagcttcatcaagtacatccgctatgccaggaagagccacctgaccggccccatggtggtgcactgcagcgctggcatcggccgcactggagtcttcctgtgtgtggatgtggtgttctgtgccatcgtgaagaactgcagcttcaacatcatggacatcgtggcccagatgagggagcagaggagcggcatggtgcagaccaaggagcagtaccacttctgctatgacatcgtgctggaggtgctgaggaagctgctgaccctggactag

SEQ ID NO: 22010 - DNA, 492 bp, synthetic construct
  source 1..492: mol_type = other DNA; note = Synthetic coding sequence
atgatgctgggcacagaaggaggagagggctttgtggtgaaggtgcggggcctgccctggagctgcagcgcagatgaggtgcagcgcttcttcagtgactgcaagatccagaatggagcccagggcatccgcttcatctacacccgggagggccggcccagcggggaggcctttgtggagctggagagtgaagatgaggtgaagctggccctgaagaaggaccgggagaccatgggccaccgctacgtggaggtgttcaagagcaacaacgtggagatggactgggtgctgaagcacacaggccccaacagcccagacacagccaatgatggctttgtgcggctgcggggcctgcccttcggctgcagcaaggaggagatcgtgcagttcttcagcggcctggagatcgtgcccaacggcatcaccctgcctgtggacttccagggccgcagcactggagaggcctttgtgcagtttgccagccaggagtag

SEQ ID NO: 22011 - DNA, 759 bp, synthetic construct
  source 1..759: mol_type = other DNA; note = Synthetic coding sequence
atggccgccacagccagagaagatggagccagcggccaggagcggggccagaggggctgtgagcactatgaccggggctgcctgctgaaggccccctgctgtgacaagctgtacacctgccgcctgtgccacgacaacaatgaagaccaccagctggaccgcttcaaggtgaaggaggtgcagtgcatcaactgtgagaagatccagcacgcccagcagacctgtgaagaatgttccaccctgtttggagagtactactgtgacatctgccacctgtttgacaaggacaagaagcagtaccactgtgagaactgtggcatctgccgcatcggccccaaggaggacttcttccactgcctgaagtgcaacctgtgcctggccatgaacctgcagggccgccacaagtgcattgaaaatgtgtcccggcagaactgccccatctgcctggaggacatccacaccagccgggtggtggcccacgtgctgccctgtggccacctgctgcaccggggctaccgctgccccctgtgcatgcacagcgccctggacatgacccgctactggaggcagctggatgatgaggtggcccagacccccatgcccagcgagtaccagaacatgacagtggacatcctgtgcaatgactgcaatggccgcagcacagtgcagttccacatcctgggcatgaagtgcaagatctgtgagagctacaacacagcccaggccggcggccgccgcatcagcctggaccagcagtag

SEQ ID NO: 22012 - DNA, 594 bp, synthetic construct; identical to SEQ ID NO: 22006
  source 1..594: mol_type = other DNA; note = Synthetic coding sequence

SEQ ID NO: 22013 - DNA, 4203 bp, synthetic construct
  source 1..4203: mol_type = other DNA; note = Synthetic coding sequence
tgaccacctcctcctcctccacccatgtggaaccccatgatcccagcctttgacctcttccagggcaaccacggctttgtggcccctgtggtgaccacagctgcccactggaggtctgtgaactacaccttccccccatctgtcatcagccacaccagccccaccaaggtgtggaggaacaaggatggcaccagcgcctaccaggtgcaggagacccctgtgtcccaggtggtgaggaagaagaccagctatgtgggcctggtgctggtgctgctgcggggcctgcccggcagcggcaagagcttcctggcccggaccctgcaggaggacaaccccagcggggtcatcctgagcacagatgactacttctacatcaatggccagtaccagtttgatgtgaagtacctgggggaggcccacgagtggaaccagaacagagccaaggaggcctttgagaagaagatcagccccatcatcatcgacaacaccaacctgcaggcctgggagatgaagccctacgtggccctgagccagaagcacaagtacaaggtgctcttccgggagccagacacctggtggaagttcaagcccaaggagctggcccggaggaacatccacggcgtgtccaaggagaagatcaccaggatgctggagcactaccagagatttgtgtctgtgcccatcatcatgagcagctctgtgcctgagaagattgaaagaattgagctgtgtgcctacagctgtgaagatagaagcaccagccccagagatgatgaggacatcatcagcgagaaggaggagaacatcctgagcctgagcctgaagcacctggagttcacagaggagaagaacctggatgtgaccaaggagaccatgctgcctgaaaatgtggcctacctgagcaatgctgacctgaacaagaggaggaaggagatcagtgacatgaaccccagcatccagagcgccctgatcctggagaccccccacatgtacttcagtgacagcgagagcaagctgcaggccacagacaagtcagaaaatgagcagatcgagatggtggccgtgaagggctacagcaagacagacacagacagctccatggagcgggtgagccccagcacctgctgcagcgagaacaaccaggaggactgtgacctggccaacagcggccccctgcagaatgagaagagcagccctggagagatcgtggaggagcgggccaccgtgaccaagaaggccttcggcaagcagaagagcaagagcaccctggagaagttccccaggcatgagctgagcaactttgtgggggactggcctgtggacaagaccatcggccagaggaccaagaggaacaggaagacagagaagaccagctctgtgcagagcgacaagaagtacaactacccccagagccacaagctggtgaacagcgtgtctgtgaacacagactgtgtgcagcagaggggcagcccccatgagagcgtggaggatggcaggaagagccagtgtgatgatgccagcgagcccctgaacagctacaagtatgatgcctacaagaacatcgacaagaacagcttcaacatcatgggagactggcccagcagtgacagcctggcccagcgggagcacaggagcaggatgcccaagacaggcctgtctgagcccaacctggagatcggcaccaatgacaagatgaatgagatcagcctgagcacagcccacgaggcctgctggggcaccagcagccagaagctgaagaccctgggcagcagcaacctgggcagcagcgagatgctgctgtctgagatgacctgtgagagccagacctgcctgagcaagaagagccacggccagcacaccagcctgcccctgaccttcaccaacagcgcccccaccgtgtctggagtggtggagccccagaccctggccgagtgccaggagcagatgcccaagagggaccccgggaaggaggtgggcatgtgcacccagacagagccccaggactttgccctgctgtggaagattgagaagaacaagatcagcatcagtgacagcatcaaggtgctgaccggccgcctggatggcttcaagcccaaggtgttcaacatcaacaccaagagtgatgtgcaggaggccatcccctacagagtgatgtatgacaagagcacctttgtggaggagagcgagctgaccagcgcagatgaaagtgagaacctgaacatcctgtgcaagctgtttggcagcttcagcctggaggccctgaaggacctgtatgagcgctgcaacaaggacatcatctgggccaccagcctgctgctggacagcgagaccaagctgtgtgaggacacagaatttgagaacttccagaagagctgtgatggcagccagatcggccccttcagcctgggcctgaacctgaaggagatcatcagccagaggggcaccctggagaacagcaacagccctgtgcctgagttcagccacggcatcggcatcagcaatgctgacagccagagcacctgtgatgctgagcggggcaacagcgagcaggccgagatgagagctgtgaccccagaaaatcatgagagcatgaccagcatcttccccagcgctgctgtgggcctgaagaacaacaatgacatcctgcccaacagccaggaggagctgctgtacagcagcaagcagagcttccctggcatcctgaaggccaccacccccaaggacatgtctgaaacagagaagaacctggtggtgacagaaacaggagacaacatccacagccccagccacttcagtgacatcttcaactttgtgagcagcaccagcaacctggagctgaatgaggagatctacttcacagacagcctggagatcaagagaaatgaaaacttccccaaggactatgtgaagttcagtgatgaggaggagttcatgaatgaagatgagaaggagatgaaggagatcctgatggccggcagcagcctgtctgctggggtgtctggagaggacaagacagagatcctgaaccccaccccagccatggccaagagcctgaccatcgactgcctggagctggccctgcccccagagctggccttccagctgaatgagctgtttggacctgtgggcatcgacagcggcagcctgactgtggaggactgtgtggtgcacatcgacctgaacctggccaaggtgattcatgagaagtggaaggagagcgtgatggagcggcagaggcaggaggaggtgtcctgtgggaagttcatgcaggaccccagcctggtgggccacacaggcctggacaaccctgagcagaagagcagccagaggacaggcaagaagctgctgaagaccctgacagccagcgagatgctgcccctgctggaccactggaacacccagaccaagaaggtgtccctgcgggagatcatgtctgaggagatcgccctgcaggagaagcacaacctgaagcgggagaccctgatgtttgagaaggactgtgccaccaagctgaaggagaagcagctgttcaagatcttccctgccatcaaccagaacttcctggtggacatcttcaaggaccacaactacagcctggagcacacagtgcagttcctgaactgtgtgctggagggggaccctgtgaagacagtggtggcccaggagtttgtgcaccagaatgaaaatgtgaccagccacacaggccagaagagcaaggagaagaaggactttgagtacccagactatgatgactacagagctgaggccttcctgcaccagcagaagaggatggagtgctacagcaaggccaaggaggcctaccgcatcggcaagaagaatgtggccaccttctacgcccagcagggcaccctgcacgagcagaagatgaaggaggccaaccacctggccgccatcgagatctttgagaaggtgaatgccagcctgctgccccagaatgtgctggacctgcacggcctgcacgtggatgaggccctggagcacctgatgagggtgctggagaagaagacagaggagttcaagcagaatggaggcaagccctacctgagcgtcatcaccggccggggcaaccacagccagggcggcgtggcccgcatcaagccagctgtgatcaagtacctgatcagccacagcttccgcttcagcgagatcaagccaggctgcctgaaggtgatgctgaagtag

SEQ ID NO: 22014 - DNA, 237 bp, synthetic construct
  source 1..237: mol_type = other DNA; note = Synthetic coding sequence
atgctgtgctggggctactggagcctgggccagcccggcatcagcaccaacctgcagggcatcgtggccgagccccaggtgtgtggcttcatcagtgacagatctgtgaaggaggtggcctgtggcggcaaccacagcgtcttcctgctggaggatggagaggtgtacacctgtggcctgaacaccaagggccagctgggccacgagcgggagggcaacaagccagagcagatctag

SEQ ID NO: 22015 - DNA, 738 bp, synthetic construct; identical to SEQ ID NO: 18499
  source 1..738: mol_type = other DNA; note = Synthetic coding sequence

SEQ ID NO: 22016 - DNA, 2112 bp, synthetic construct; identical to SEQ ID NO: 19204
  source 1..2112: mol_type = other DNA; note = Synthetic coding sequence

SEQ ID NO: 22017 - DNA, 573 bp, synthetic construct
  source 1..573: mol_type = other DNA; note = Synthetic coding sequence
atggccggcacagcccggcatgaccgggagatggccatccaggccaagaagaagctgaccacagccacagaccccatcgagcggctgcggctgcagtgcctggcccggggcagcgctggcatcaagggcctgggccgggtcttccgcatcatggatgatgacaacaacagaaccctggacttcaaggagttcatgaagggcctgaatgactatgctgtggtgatggagaaggaggaggtggaggagctgttcagaagatttgacaaggatggaaatggcaccatcgacttcaatgagttcctgctgaccctgcggccccccatgagccgggccaggaaggaggtgatcatgcaggccttcaggaagctggacaagacaggagatggagtcatcaccatcgaggacctgcgggaggtgtacaatgccaagcaccaccccaagtaccagaatggagagtggagcgaggagcaggtgttcaggaagttcctggacaactttgacagcccctatgacaaggatggcctggtgaccccagaggagttcatgaactactatgctggggtgtctgcctag

SEQ ID NO: 22018 - DNA, 231 bp, synthetic construct
  source 1..231: mol_type = other DNA; note = Synthetic coding sequence
atgaccccaccccagcagcccccacccctgcggtctgagcccggcaccctgggcagcgctgccagcagctacagccccctgggcctgaatggagtgcccggcagcatctgggactttgtgtctggcagcttcagccccagccccagccccatcctgtctgctggcccccccagcagcagcagcgccagccccaatggagctgagctggcccgggtgcggcggcagctgtag

SEQ ID NO: 22019 - DNA, 108 bp, synthetic construct
  source 1..108: mol_type = other DNA; note = Synthetic coding sequence
atggccaccctggtggtgaacaagctgggcgccggcgtggacagcggccggcagggcagccggggcacagctgtggtgaaggtgctggagtgtggggtgtgtgagtag

SEQ ID NO: 22020 - DNA, 477 bp, synthetic construct
  source 1..477: mol_type = other DNA; note = Synthetic coding sequence
atggaggccgacatcatcaccaacctgcgctgccgcctgaaggaggccgaggaggagcggctgaaggccgcccagtatggcctgcagctggtggagagccagaatgagctgcagaaccagctggacaagtgcagaaatgagatgatgaccatgacagagagctatgagcaggagaagtacaccctgcagcgggaggtggagctgaagagcaggatgctggagagcctgagctgtgaatgtgaggccatcaagcagcagcagaagatgcacctggagaagctggaggagcagctgagccgcagccacggccaggaggtgaatgagctgaagaccaagattgagaagctgaaggtggagctggatgaggcccggctgtctgagaagcagctgaagcaccaggtggaccaccagaaggagctgctgagctgcaagtctgaggagctgcgggtgatgtctgagcgggtgcaggagagctag

SEQ ID NO: 22021 - DNA, 393 bp, synthetic construct
  source 1..393: mol_type = other DNA; note = Synthetic coding sequence
atggcccagacagacaagcccacctgcatccccccagagctgcccaagatgctgaaggagtttgccaaggccgccatccgggcccagccccaggacctgatccagtggggcgctgactactttgaggccctgagcagaggagagaccccacctgtgcgggagaggtctgagcgggtggccctgtgcaactgggccgagctgaccccagagctgctgaagatcctgcacagccaggtggccggccgcctcatcatccgggcagaggagctggcccagatgtggaaggtggtgaacctgcccacagacctcttcaacagcgtgatgaatgtgggccgcttcacagaggagattgagtggctgaagttcctggccctggcctgcagcgccctgtag

SEQ ID NO: 22022 - DNA, 693 bp, synthetic construct
  source 1..693: mol_type = other DNA; note = Synthetic coding sequence
atggaggccgacatcatcaccaacctgcgctgccgcctgaaggaggccgaggaggagcggctgaaggccgcccagtatggcctgcagctggtggagagccagaatgagctgcagaaccagctggacaagtgcagaaatgagatgatgaccatgacagagagctatgagcaggagaagtacaccctgcagcgggaggtggagctgaagagcaggatgctggagagcctgagctgtgaatgtgaggccatcaagcagcagcagaagatgcacctggagaagctggaggagcagctgagccgcagccacggccaggaggtgaatgagctgaagaccaagattgagaagctgaaggtggagctggatgaggcccggctgtctgagaagcagctgaagcaccaggtggaccaccagaaggagctgctgagctgcaagtctgaggagctgcgggtgatgtctgagcgggtgcaggagagcatgagcagcgagatgctggccctgcagatcgagctgacagagatggagagcatgaagaccaccctgaaggaggaggtgaatgagctgcagtaccggcaggagcagctggagctgctgatcaccaacctgatgaggcaggtggaccggctgaaggaggagaaggaggagcgggagaaggaggccgtgtcctactacaatgccctggagaaggccaggtag

SEQ ID NO: 22023 - DNA, 639 bp, synthetic construct; identical to SEQ ID NO: 18369
  source 1..639: mol_type = other DNA; note = Synthetic coding sequence

SEQ ID NO: 22024 - DNA, 2844 bp, synthetic construct
  source 1..2844: mol_type = other DNA; note = Synthetic coding sequence
atgaacttcctgcggggcgtgatgggcggccagagcgctggcccccagcacacagaggccgagaccgtgagaggagctgctgaccccaaggtgaccagcagctgtggcctgaagttccgccacagcttccggctggtgaagcacatcctgtaccacgtgaccatcaacgtgtacagcgacagcgagatcatcggctacgccctggacaccctgtacaacatcatcagcaatgaggaggaggaggaggtggaggagaacagcacccggcagagcgaggacctgggcagccagttcacagagatcttcatcaagcagcaggagaatgtgaccctgctgctgagcctgctggaggagtttgacttccacgtgcgctggccaggagtgaagctgctgaccagcctgctgaagcagctgggcccccaggtgcagcagatcatcctggtgagccccatgggcgtgtcccggctgatggacctgctggccgacagccgggaggtgatcagaaatgatggagtgctgctgctgcaggccctgaccaggagcaatggagccatccagaagatcgtggcctttgaaaatgcctttgagcggctgctggacatcatcagcgaggagggcaacagtgatggcggcatcgtggtggaggactgcctgatcctgctgcagaacctgctgaagaacaacaacagcaaccagaacttcttcaaggagggcagctacatccagaggatgaagccctggtttgaggtgggagatgaaaattctggctggagcgcccagaaggtgaccaacctgcacctgatgctgcagctggtgcgggtgctggtgagccccaccaaccccccaggggccaccagcagctgccagaaggccatgttccagtgtggcctgctgcagcagctgtgcaccatcctgatggccaccggggtgcctgctgacatcctgacagagaccatcaacacagtgtctgaggtgatccggggctgccaggtgaaccaggactactttgcctctgtgaatgcccccagcaacccccccaggcctgccatcgtggtgctgctgatgtccatggtgaatgaaaggcagccctttgtgctgcgctgtgctgtgctgtactgcttccagtgcttcctgtacaagaaccagaagggccagggcgagatcgtgtccaccctgctgcccagcaccattgatgccaccggcaacagcgtgtctgctggccagctgctgtgtggcggcctcttcagcacagacagcctgagcaactggtgtgccgctgtggccctggcccacgccctgcaggagaatgccacccagaaggagcagctgctgcgggtgcagctggccaccagcatcggcaacccccctgtgtccctgctgcagcagtgcaccaacatcctgagccagggcagcaagatccagaccagggtgggcctgctgatgctgctgtgcacctggctgagcaactgccccatcgctgtgacccacttcctgcacaacagcgccaacgtgcccttcctgaccggccagattgctgagaacctgggggaggaggagcagctggtgcagggcctgtgtgccctgctgctgggcatcagcatctacttcaatgacaacagcctggagagctacatgaaggagaagctgaagcagctgattgagaagagaattggcaaggagaacttcatcgagaagctgggcttcatcagcaagcatgagctgtacagccgggccagccagaagccccagcccaacttccccagccctgagtacatgatctttgaccacgagttcaccaagctggtgaaggagctggagggcgtcatcaccaaggccatctacaagagcagcgaggaggacaagaaggaggaggaggtgaagaagaccctggagcagcacgacaacatcgtgacccactacaagaacatgatccgggagcaggacctgcagctggaggagctgcggcagcaggtgtccaccctgaagtgccagaatgagcagctgcagacagctgtgacccagcaggtgtcccagatccagcagcacaaggaccagtacaacctgctgaagatccagctgggcaaggacaaccagcaccagggcagctacagcgagggcgcccagatgaatggcatccagcctgaggagatcggccgcctgcgggaggagattgaggagctgaagaggaaccaggagctgctgcagagccagctgacagagaaggacagcatgattgagaacatgaagagcagccagaccagcggcaccaatgagcagagcagcgccatcgtgtctgcccgggacagcgagcaggtggccgagctgaagcaggagctggccaccctgaagagccagctgaacagccagagcgtggagatcaccaagctgcagacagagaagcaggagctgctgcagaagacagaggcctttgccaagtctgtggaggtgcagggcgagacagagaccatcatcgccaccaagaccacagatgtggagggccgcctgagcgccctgctgcaggagaccaaggagctgaagaatgagatcaaggccctgtctgaggagaggacagccatcaaggagcagctggacagcagcaacagcaccatcgccatcctgcagacagagaaggacaagctggagctggagatcacagacagcaagaaggagcaggatgacctgctggtgctgctggccgaccaggaccagaagatcctgagcctgaagaacaagctgaaggacctgggccaccctgtggaggaggaggatgagctggagagcggggaccaggaggatgaagatgatgaaagtgaggaccccgggaaggacctggaccacatctag

SEQ ID NO: 22025 - DNA, 1095 bp, synthetic construct; identical to SEQ ID NO: 21896
  source 1..1095: mol_type = other DNA; note = Synthetic coding sequence

SEQ ID NO: 22026 - DNA, 1236 bp, synthetic construct; identical to SEQ ID NO: 21995
  source 1..1236: mol_type = other DNA; note = Synthetic coding sequence

SEQ ID NO: 22027 - DNA, 810 bp, synthetic construct; identical to SEQ ID NO: 22009
  source 1..810: mol_type = other DNA; note = Synthetic coding sequence

SEQ ID NO: 22028 - DNA, 360 bp, synthetic construct
  source 1..360: mol_type = other DNA; note = Synthetic coding sequence
atggccagccagctgcaggtgttcagcccccccagcgtgagcagcagcgccttctgcagcgccaagaagctgaagattgagcccagcggctgggatgtgtctggccagagcagcaatgacaagtactacacccacagcaagaccctgcctgccacccagggccaggccaacagcagccaccaggtggccaacttcaacatcccagcctatgaccagggcctgctgctgcctgccccagctgtggagcacatcgtggtgacagctgctgacagcagcggcagcgctgccaccagcaccttccagagcagccagaccctgacccacaggagcaatgtgtccctgctggagccctaccagtag

SEQ ID NO: 22029 - DNA, 339 bp, synthetic construct; identical to SEQ ID NO: 21921
  source 1..339: mol_type = other DNA; note = Synthetic coding sequence

SEQ ID NO: 22030 - DNA, 54 bp, synthetic construct
  source 1..54: mol_type = other DNA; note = Synthetic coding sequence
atgaagaggggccgcctgcccagcagcagtgaagattctgatgacaatggatag

SEQ ID NO: 22031 - DNA, 810 bp, synthetic construct; identical to SEQ ID NO: 18331
  source 1..810: mol_type = other DNA; note = Synthetic coding sequence

SEQ ID NO: 22032 - DNA, 339 bp, synthetic construct
  source 1..339: mol_type = other DNA; note = Synthetic coding sequence
atgaatggccgggctgacttccgggagcccaatgctgaggtgccccggcccatcccccacatcggccctgactacatccccacagaggaggagcggcgggtgtttgctgaatgtaatgatgagagcttctggttccgctctgtgcccctggccgccacctccatgctgatcacccagggcctcatcagcaagggcatcctgagcagccaccccaagtatggcagcatccccaagctgatcctggcctgcatcatgggctactttgctgggaagctgtcctatgtgaagacctgccaggagaagttcaagaagctggagaacagccccctgggggagtag

SEQ ID NO: 22033 - DNA, 687 bp, synthetic construct
  source 1..687: mol_type = other DNA; note = Synthetic coding sequence
atggaggagcagccccagatgcaggatgctgatgagcctgctgacagcggcggggagggccgggccggcggccccccccaggtggccggggcccaggccgcctgcagcgaggacaggatgaccctgctgctgcggctgcgggcccagaccaagcagcagctgctggagtacaagtccatggtggatgccagcgaggagaagaccccagagcagatcatgcaggagaagcagatcgaggccaagattgaggacctggagaatgaaattgaggaggtgaaggtggcctttgagatcaagaagctggccctggacagcgtgctgatggacaacatgaagcacctgctggagctgaacaagctgatcatgaagagccagcaggagagctgggacctggaggagaagctgctggacatcaggaagaagaggctgcagctgaagcaggccagcgagagcaagctgctggagatccagacagagaagaacaagcagaagattgacctggacagcatggagaacagcgagcgcatcaagatcatccggcagaacctgcagatggagatcaagatcaccaccgtcatccagcacgtgttccagaacctgatcctgggcagcaaggtgaactgggccgaggaccctgccctgaaggagatcgtgctgcagctggagaagaatgtggacatgatgtag

SEQ ID NO: 22034 - DNA, 2352 bp, synthetic construct; identical to SEQ ID NO: 19378
  source 1..2352: mol_type = other DNA; note = Synthetic coding sequence

SEQ ID NO: 22035 - DNA, 393 bp, synthetic construct
  source 1..393: mol_type = other DNA; note = Synthetic coding sequence
atgatgctgggcacagaaggaggagagggctttgtggtgaaggtgcggggcctgccctggagctgcagcgcagatgaggtgcagcgcttcttcagtgactgcaagatccagaatggagcccagggcatccgcttcatctacacccgggagggccggcccagcggggaggcctttgtggagctggagagtgaagatgaggtgaagctggccctgaagaaggaccgggagaccatgggccaccgctacgtggaggtgttcaagagcaacaacgtggagatggactgggtgctgaagcacacaggccccaacagcccagacacagccaatgatggctttgtgcggctgcggggcctgcccttcggctgcagcaaggaggagatcgtgcagttctag

SEQ ID NO: 22036 - DNA, 267 bp, synthetic construct
  source 1..267: mol_type = other DNA; note = Synthetic coding sequence
atggaggccgacatcatcaccaacctgcgctgccgcctgaaggaggccgaggaggagcggctgaaggccgcccagtatggcctgcagctggtggagagccagaatgagctgcagaaccagctggacaagtgcagaaatgagatgatgaccatgacagagagctatgagcaggagaagtacaccctgcagcgggaggtggagctgaagagcaggatgctggagagcctgagctgtgaatgtgaggccatcaagcagcagcagaagtag

SEQ ID NO: 22037 - DNA, 1902 bp, synthetic construct; identical to SEQ ID NO: 19558
  source 1..1902: mol_type = other DNA; note = Synthetic coding sequence

SEQ ID NO: 22038 - DNA, 597 bp, synthetic construct
  source 1..597: mol_type = other DNA; note = Synthetic coding sequence
atggccactggagacctgaagaggagcctgaggaacctggagcaggtgctgcggctgctgaactacccagaggaggtggactgtgtgggcctcatcaagggggaccctgctgccagcctgcccatcatctcctacagcttcaccagctacagcccctacgtgacagagctgatcatggagagcaatgtggagctgattgccaagaatgacctgcgcttcattgatgctgtgtacaagctgctgcgggaccagttcaactacaagcccatcctgaccaagaagcagttcatccagtgtggctttgctgagtggaagatccagatcgtgtgtgacatcctgaactgtgtgatgaagaagcacaaggagctgagcagcctgcagaagatccccagccagcagaggaagaagatcagcagcggcaagtctgagccccccctgggcaatgagaagatctctgctgaggccgtgggcgtggacatcagcggccgcttcatgaccagcggcaagaagaaggctgtggtgatccgccacctgtacaatgaagataatgtggacatcagcgaggacaccctgagccccatcacagatgtgaactag

SEQ ID NO: 22039 - DNA, 336 bp, synthetic construct
  source 1..336: mol_type = other DNA; note = Synthetic coding sequence
atggtgatggagaagcccagccccctgctggtgggccgggagtttgtgcggcagtactacaccctgctgaacaaggcccctgagtacctgcaccgcttctacggcaggaacagcagctatgtgcacggcggcgtggatgccagcggcaagccccaggaggccgtgtatggccagaatgacatccaccacaaggtgctgagcctgaacttcagcgagtgccacaccaagatcagacatgtggatgcccacgccaccctgagtgatggagtggtggtgcaggtgatgggcctgctgagcaacagcggccagcctgagaggaagttcatgcagacctag

SEQ ID NO: 22040 - DNA, 681 bp, synthetic construct; identical to SEQ ID NO: 19967
  source 1..681: mol_type = other DNA; note = Synthetic coding sequence

SEQ ID NO: 22041 - DNA, 1872 bp, synthetic construct
  source 1..1872: mol_type = other DNA; note = Synthetic coding sequence
atgtctgatgaggtgttcagcaccaccctggcctacaccaagagccccaaggtgaccaagaggaccaccttccaggatgagctgatccgggccatcacagcccggagcgcccggcagaggagcagcgagtacagtgatgactttgacagtgatgaaattgtgtccctgggggacttcagtgacaccagcgcagatgagaacagcgtgaacaagaagatgaatgacttccacatcagtgatgatgaggagaagaaccccagcaagctgctcttcctgaagaccaacaagagcaatggaaacatcaccaaggatgagcctgtgtgtgccatcaagaatgaggaggagatggccccagatggctgtgaggacatcgtggtgaagagcttcagcgagagccagaacaaggatgaggagtttgagaaggacaagatcaagatgaagcccaagccccgcatcctgagcatcaagagcaccagcagcgctgagaacaacagcctggacacagatgaccacttcaagcccagcccccggcccaggtccatgctgaagaagaagagccacatggaggagaaggatggcctggaggacaaggagacagccctgtctgaggagctggagctgcacagcgcccccagcagcctgcccacccccaacggcatccagctggaggccgagaagaaggccttcagcgagaacctggaccctgaggacagctgcctgaccagcctggccagcagcagcctgaagcagatcctgggggacagcttcagccctggcagcgagggcaatgccagcggcaaggctgaccacgtgaccacagctgtggagaagagcaaggagagccaggtgacagcagatgacctggaggaggagaaggccaaggccgagctgatcatggatgatgacagaacagtggaccccctgctgagcaagagccagagcatcctgatcagcaccagcgccacagccagcagcaagaagaccatcgaggacaggaacatcaagaacaagaagagcaccaacaacagagccagcagcgccagcgcccggctgatgaccagcgagttcctgaagaagagcagcagcaagaggaggacccccagcaccaccaccagcagccactacctgggcaccctgaaggtgctggaccagaagcccagccagaagcagagcattgaaccagacagagctgacaacatccgggctgctgtgtaccaggagtggctggagaagaagaatgtgtacctgcacgagatgcaccgcatcaagagaattgaaagtgagaacctgcgcatccagaatgagcagaagaaggccgccaagcgggaggaggccctggccagctttgaggcctggaaggccatgaaggagaaggaggccaagaagattgctgccaagaagaggctggaggagaagaacaagaagaagacagaggaggagaatgctgccaggaaaggagaggccctgcaggcctttgagaagtggaaggagaagaagatggagtacctgaaggagaagaacaggaaggagcgggagtatgagcgggccaagaagcagaaggaggaggagaccgtggccgagaagaagaaggacaacctgacagctgtggagaagtggaatgagaagaaggaggccttcttcaagcagaaggagaaggagaagatcaatgagaagaggaaggaggagctgaagagagctgagaagaaggacaaggacaagcaggccatcaatgaatatgagaagtggctggagaacaaggagaagcaggagcgcatcgagaggaagcagaagaagaggcacagcttcctggagagcgaggccctgcccccctggagcccccccagcaggacagtgtttgccaaggtgttctag

SEQ ID NO: 22042 - DNA, 255 bp, synthetic construct
  source 1..255: mol_type = other DNA; note = Synthetic coding sequence
atgatgctgggcacagaaggaggagagggctttgtggtgaaggtgcggggcctgccctggagctgcagcgcagatgaggtgcagcgcttcttcagtgactgcaagatccagaatggagcccagggcatccgcttcatctacacccgggagggccggcccagcggggaggcctttgtggagctggagagtgaagatgaggtgaagctggccctgaagaaggaccgggagaccatgggccaccgctacgtggagtag

SEQ ID NO: 22043 - DNA, 993 bp, synthetic construct
  source 1..993: mol_type = other DNA; note = Synthetic coding sequence
atggaccagggcgacacccccaccctggaggaggacctgaagaagctgcagctgtctgagttctttgacatctttgagaaggagaaggtggacaaggaggccctggccctgtgcacagaccgggacctgcaggagatcggcatccccctgggccccaggaagaagatcctgaactacttcagcaccaggaagaacagcatgggcatcaagaggcctgccccccagcctgccagcggggccaacatccccaaggagagcgagttctgcagcagcagcaacaccagaaatggagactacctggatgtgggcatcggccaggtgtctgtgaagtaccccaggctcatctacaagccagagatcttctttgccttcggcagccccatcggcatgttcctgactgtgcggggcctgaagagaattgaccccaactaccgcttccccacctgcaagggcttcttcaacatctaccacccctttgatcctgtggcctaccgcatcgagcccatggtggtgcctggggtggagtttgagcccatgctgatcccccaccacaagggcaggaagaggatgcacctggagctgcgggagggcctgaccaggatgtccatggacctgaagaacaacctgctgggcagcctgaggatggcctggaagagcttcacccgggccccctacccagccctgcaggccagcgagaccccagaggagacagaagctgagcctgagagcaccagcgagaagcccagtgatgtgaacacagaggagacctctgtggccgtgaaggaggaggtgctgcccatcaacgtgggcatgctgaatggaggccagagaattgattatgtgctgcaggagaagcccatcgagagcttcaatgagtacctgtttgccctgcagagccacctgtgctactgggagagtgaagatactgtgctgctggtgctgaaggagatctaccagacccagggcatcttcctggaccagcccctgcagtag

SEQ ID NO: 22044 - DNA, 1383 bp, synthetic construct; identical to SEQ ID NO: 19538
  source 1..1383: mol_type = other DNA; note = Synthetic coding sequence

SEQ ID NO: 22045 - DNA, 1068 bp, synthetic construct
  source 1..1068: mol_type = other DNA; note = Synthetic coding sequence
atgacaggcagcgctgctgacacccaccgctgcccccaccccaagggggccaagggcaccaggagccgcagcagccacgcccggcctgtgtccctggccaccagcggcggcagcgaggaggaggacaaggatggcggcgtgctcttccacgtgaacaagagcggcttccccatcgacagccacacctgggagaggatgtggatgcacgtggccaaggtgcaccccaagggcggggagatggtgggcgccatcagaaatgctgccttcctggccaagcccagcatcccccaggtgcccaactaccgcctgtccatgaccatcccagactggctgcaggccatccagaactacatgaagaccctgcagtacaaccacacaggcacccagttctttgagatcaggaagatgaggcccctgagcggcctgatggagacagccaaggagatgacccgggagagcctgcccatcaagtgcctggaggccgtcatcctgggcatctacctgaccaacggccagcccagcattgagcgcttccccatctccttcaagacctacttcagcggcaactacttccaccacgtggtgctgggcatctactgcaatggccgctatggcagcctgggcatgagcagaagagctgagctgatggacaagcccctgaccttccgcaccctgagtgacctgatctttgattttgaagattcctacaagaagtacctgcacacagtgaagaaggtgaagattggcctgtatgtgccccatgagccccacagcttccagcccatcgagtggaagcagctggtgctgaatgtgtccaagatgctgcgggctgacatcaggaaggagctggagaagtatgcccgggacatgaggatgaagatcctgaagccagccagcgcccacagccccacccaggtgcgcagccggggcaagagcctgagcccccggcggcggcaggccagccccccccggcggctgggccggcgggagaagagccctgccctgcctgagaagaaggtggccgacctgagcaccctgaatgaggtgggctaccagatccgcatctag

SEQ ID NO: 22046 - DNA, 384 bp, synthetic construct
  source 1..384: mol_type = other DNA; note = Synthetic coding sequence
atggccagcaaccacaagagcagcgctgcccggcctgtgtcccggggcggcgtgggcctgaccggccggccccccagcggcatccggcccctgagcggcaacatccgggtggccacagccatgcctcctggaacagcccggcccggcagccggggctgccccatcggcactggaggagtgctgagcagccagatcaaggtggcccacaggcctgtgacccagcagggcctgaccggcatgaagacaggcaccaagggcccccagaggcagatcctggacaagagctactacctgggcctgctgcggagcaagatcagcgagctgaccacagaggtgaacaagctgcagaagggcatcgagatgtacaaccaggagaacagctag

SEQ ID NO: 22047 - DNA, 510 bp, synthetic construct
  source 1..510: mol_type = other DNA; note = Synthetic coding sequence
atgcacaagctgcagagcggcatcggccgcctcatcctgaaggaggagatgaaggcccggagcagcagctatgctgacccctggaccccacccaggagcagcaccagcagccgggaggccctgcacacagctggctatgagatgagcctgaatggcagccccaggagccactacctggccgacagcgaccccctcatcagcaagagcgccagcctgcctgcctacagaagaaatggcctgcacaggaccccatctgctgacctcttccactatgacagcatgaatgctgtgaactggggcatgagggagtacaagatctacccctatgagctgctgctggtgaccacccggggcaggaaccggctgcccaaggatgtggacaggacccggctggagcggcacctgagccaggaggagttctaccaggtgtttggcatgaccatcagcgagtttgaccggctggccctgtggaagagaaatgagctgaagaagcaggcccggctcttctag

SEQ ID NO: 22048 - DNA, 144 bp, synthetic construct
  source 1..144: mol_type = other DNA; note = Synthetic coding sequence
atggcctctgtgctgagccggcggctgggcaagaggagcctgctgggcgcccgggtgctgggccccagcgccagcgagggccccagcgctgccccacccagcgagcccctgctggagggcgccgccccccagcccttcacctag

SEQ ID NO: 22049 - DNA, 558 bp, synthetic construct
  source 1..558: mol_type = other DNA; note = Synthetic coding sequence
atggatgacagcatcaacaaccgcttctcctatgtgacccatgaggacatctgcaactgcttcaacggggacaccctgctggccatccaggcccccagcggcacccagctggaggtgcccatccctgagatgggccagaatggccagaagaagtaccagatcaacctgaagagccacagcggccccatccacgtgctgctgatcaacaaggagagcagcagcagcaagcctgtggtgtttcctgtgcccccaccagatgacctgacccagcccagcagccagagcctgacccctgtgaccccccagaagagctccatggccacccagaacctgcctgagcagcacgtgtctgagaggagccaggccctgcagcagaccagcgccacagacatcagcagcgctggcagcatcagcggggacatcattgatgagctgatgagcagtgatgtgttccccctgctgcggctgagccccaccccagcagatgactacaacttcaacctggatgacaatgaaggagtgtgtgacctgtttgatgtgcagatcctgaactactag

SEQ ID NO: 22050 - DNA, 492 bp, synthetic construct; identical to SEQ ID NO: 19389
  source 1..492: mol_type = other DNA; note = Synthetic coding sequence

SEQ ID NO: 22051 - DNA, 915 bp, synthetic construct
  source 1..915: mol_type = other DNA; note = Synthetic coding sequence
atgagcaagagaagaaggctgaagcagggcgagcccatcatgaccgggaagacccagaccagcaatgtgaccaacaagaatgaccccaagagcatcaacagcagggtcttcatcggcaacctgaacacagccatcgtgaagaaggtggacatcgaggccatcttcagcaaatatggcaagatcgtgggctgcagcgtgcacaagggctacgcctttgtgcagtacatgtctgaaagacatgcccgggctgctgtggccggggagaatgcccgggtgattgctggccagcccctggacatcaacatggccggggagcccaagccctaccggcccaagccaggcaacaagaggcccctgagcgccctgtaccgcctggagagcaaggagcccttcctgtctgtgggcggctacgtgtttgattatgactactacagagatgacttctacaaccggctgtttgactaccacggccgggtgcccccaccacccagggctgtgatccccctgaagaggccccgggtggccgtgaccaccacccggcggggcaaaggagtcttctccatgaagggcggcagccgcagcacagccagcggcagcacaggcagcaagctgaagagtgatgagctgcagaccatcaagaaggagctgacccagatcaagaccaagattgacagcctgctgggccgcctggagaagattgagaagcagcagaaggccgaggccgaggcccagaagaagcagctggaggagagcctggtgctgatccaggaggagtgtgtgtctgaaattgctgaccacagcacagaggagcctgctgagggcggcccagatgctgatggagaggagatgacagatggcattgaagaagattttgatgaagatggcggccacgagctgttcctgcagatcaagtag

SEQ ID NO: 22052 - DNA, 405 bp, synthetic construct
  source 1..405: mol_type = other DNA; note = Synthetic coding sequence
atgcccagcgctgaggccaagctgaagaagaacagatgtgccaactgctttgactgccccggctgcatgcacaccctgagcacccgggccaccagcatcagcacccagctgcctgatgatcctgccaagaccaccatgaagaaggcctactacctggcctgtggcttctgccgctggaccagcagagatgtgggcatggctgacaagtctgtggccagcggcggctggcaggagcctgagaacccccacacccagaggatgaacaagctgattgagtactaccagcagctggcccagaaggagaaggtggagcgggacaggaagaagctggccaggagaagaaactacatgcccctggccttcagtgacaagtatggcctgggcacccggctgcagaggccctag

SEQ ID NO: 22053 - DNA, 1230 bp, synthetic construct
  source 1..1230: mol_type = other DNA; note = Synthetic coding sequence
atgtggagggtgattgagcccccctgccctggggcccccagcacagaaaatggcaagtctgtgcactggaagctgggcgctgacaaggaggtgtgggtgtgggtgatgggagagcaccacctggacaagccctatgatgtgctgtgcaatgagatcatcgccgagcgggcccggctgaaggccgagcaggaggccgaggagcccaggaagacccacagcgaggagttcaccaacagcctgaagaccaagagccagtaccatgacctgcaggccccagacaaccagcagaccaaggacatctggaagaaggtggccgagaaggaggagctggagcagggcagcaggcctgcccccaccctggaggaggagaagatccgcagcctgagcagcagcagcaggaacatccagcagatgctggccgacagcatcaacaggatgaaggcctatgccttccaccagaagaaggagagcatgaagaagaagcaggatgaggagatcaaccagatcgaggaggagaggaccaagcagatctgcaagtcctggaaggaggacagcgagtggcaggccagcctgaggaagagcaaggctgctgatgagaagagaagaagcctggccaagcaggcccgggaggactacaagaggctgagcctgggcgcccagaagggccggggcggggagcggctgcagagccccctgcgggtgccccagaagccagagaggcctcccctgccccccaagccccagttcctgaacagcggggcctacccccagaagcccctgaggaaccagggcgtggtgaggaccctgagcagcagcgcccaggaggacatcatccgctggttcaaggaggagcagctgcccctgcgggccggctaccagaagaccagtgacaccatcgccccctggttccacggcatcctgaccctgaagaaggccaatgagctgctgctgagcacaggcatgcctggcagcttcctgatccgggtgtctgagcgcatcaagggctacgccctgagctacctgtctgaagatggctgcaagcacttcctgattgatgccagcgcagatgcctacagcttcctgggcgtggaccagctgcagcacgccaccctggccgacctggtggagtaccacaaggaggagcccatcaccagcctgggcaaggagctgctgctgtacccctgtggccagcaggaccagctgcctgactacctggagctgtttgaatag

SEQ ID NO: 22054 - DNA, 390 bp, synthetic construct
  source 1..390: mol_type = other DNA; note = Synthetic coding sequence
atgtctgacaagagtgacctgaaggccgagctggagaggaagaagcagaggctggcccagatccgggaggagaagaagaggaaggaggaggagaggaagaagaaggaggccgacatgcagcagaagaaggagcctgtgcaggatgacagcgacctggacaggaagaggcgggagacagaggccctgctgcagagcatcggcatcagccctgagccccccctggtgcccacccccatgagccccagcagcaagtctgtgtccacccccagcgaggccggcagccaggacagcggggacctgggccccctgaccaggaccctgcagtgggacacagaccccagcgtgctgcagctgcagagcgacagcgagctgggctacatgtctgcctag

SEQ ID NO: 22055 - DNA, 780 bp, synthetic construct
  source 1..780: mol_type = other DNA; note = Synthetic coding sequence
atggtgggccgggagaaggagctgagcatccactttgtgcccggcagctgccgcctggtggaggaggaggtgaacatccccaacagaagagtgctggtgactggagccaccggcctgctgggccgggctgtgcacaaggagttccagcagaacaactggcatgctgtgggctgcggcttcagaagagcccggcccaagtttgagcaggtgaacctgctggacagcaatgctgtgcaccacatcatccatgacttccagccccacgtgattgtgcactgtgccgctgagaggaggccagatgtggtggagaaccagccagatgctgccagccagctgaatgtggatgccagcggcaacctggccaaggaggccgctgctgtgggcgccttcctgatctacatcagcagtgactatgtgtttgatggcaccaaccccccctaccgggaggaggacatcccagcccccctgaacctgtatggcaagaccaagctggatggagagaaggctgtgctggagaacaacctgggcgctgctgtgctgcgcatccccatcctgtatggagaggtggagaagctggaggagagcgctgtgacagtgatgtttgacaaggtgcagttcagcaacaagagcgccaacatggaccactggcagcagcgcttccccacccacgtgaaggatgtggccaccgtgtgccggcagctggccgagaagaggatgctggtgcggcgcatccctgagagctgcctgtctgagggccccctgtgcctcttccacgcctag

SEQ ID NO: 22056 - DNA, 549 bp, synthetic construct
  source 1..549: mol_type = other DNA; note = Synthetic coding sequence
tcctatgacagcaccttctcctatgtgacccatgaggacatctgcaactgcttcaatggagacaccctgctggccatccaggcccccagcggcacccagctggaggtgcccatccctgagatgggccagaatggccagaagaagtaccagatcaacctgaagagccacagcggccccatccacgtgctgctgatcaacaaggagagcagcagcagcaagcctgtggtgtttcctgtgcccccaccagatgacctgacccagcccagcagccagagcctgacccctgtgaccccccagaagagctccatggccacccagaacctgcctgagcagcacgtgtctgagaggagccaggccctgcagcagaccagcgccacagacatcagcagcgctggcagcatcagcggggacatcattgatgagctgatgagcagtgatgtgttccccctgctgcggctgagccccaccccagcagatgactacaacttcaacctggatgacaatgaaggagtgtgtgacctgtttgatgtgcagatcctgaactactag

SEQ ID NO: 22057 - DNA, 162 bp, synthetic construct
  source 1..162: mol_type = other DNA; note = Synthetic coding sequence
atggattctgagctgatgcacagcatcgtgggcagctaccacaagcccccagagcgggtgtttgtgcccagcttcacccagaatgagcccagccagaactgccacccagccaacctggaggtgaccagccccaagatcctgcacagccccaacagccagtag

SEQ ID NO: 22058 - DNA, 3018 bp, synthetic construct
  source 1..3018: mol_type = other DNA; note = Synthetic coding sequence
atggccggggccctgcggcggggccgggccctgggcagccggcccagcggccccaccgtgagcagcagaagaagcccccagtgccctgtggcccaggagggcctgggcgcccggagccggccccgggtggcccccaggagcctggcccgctgtggccccagcagccggctgatgggctggaagcccagcgaggcccggggccagagccagagcttccaggccagcggcctgcagcccaggagcctgaaggccgcccggcgggccaccggccgcccagacaggagcagagctgcccggcccaccatggaccccagcgcccacaggagcagagctgccccacccaacatggaccctgacccccaggccggcgtgcaggtgggcatgagggtggtgcggggcgtggactggaagtggggccagcaggacggcggggagggcggcgtgggcaccgtggtggagctgggcagacatggcagccccagcaccccagacagaacagtggtggtgcagtgggaccagggcaccaggaccaactacagagctggctaccagggcgcccatgacctgctgctgtatgacaatgcccagattggagtgcgccaccccaacatcatctgtgactgctgcaagaagcacggcctgcggggcatgcgctggaagtgccgggtgtgcctggactatgacctgtgcacccagtgctacatgcacaacaagcatgagctggcccacgcctttgacagatatgaaacagcccacagcaggcctgtgaccctgagcccccggcagggcctgccccgcatccccctgcggggcatcttccagggcgccaaggtggtgcggggccctgactgggagtggggcagccaggacggcaagccagctgagctgcagaggagagtgtctgctgacagccagcccttccagcacggggacaaggtgaagtgcctgctggacacagatgtgctgcgggagatgcaggagggccatggaggctggaaccccaggatggccgagttcatcggccagacaggaacagtgcaccgcatcacagacagaggagatgtgcgggtgcagttcaaccacgagacccgctggaccttccaccctggggccctgaccaagcaccacagcttctgggtgggagatgtggtgcgggtgattggagacctggacacagtgaagaggctgcaggccggccacggggagtggacagatgacatggccccagccctgggccgggtgggcaaggtggtgaaggtgtttggagatggcaacctgcgggtggccgtggccggccagcgctggaccttcagccccagctgcctggtggcctacagaccagaagaagatgccaacctggatgtggccgagcgggcccgggagaacaagagcagcctgtctgtggccctggacaagctgcgggcccagaagagtgaccctgagcaccctggccgcctggtggtggaggtggccctgggcaatgctgcccgggccctggacctgctgcggcggcggcctgagcaggtggacaccaagaaccagggccgcacagccctgcaggtggccgcctacctgggccaggtggagctgatccggctgctgctgcaggcccgggccggcgtggacctgcctgatgatgagggcaacacagccctgcactatgctgccctgggcaaccagcctgaggccaccagggtgctgctgtctgctggctgcagagcagatgccatcaacagcacccagagcacagccctgcacgtggccgtgcagaggggcttcctggaggtggtgcgggccctgtgtgagcggggctgtgatgtgaacctgcctgatgcccacagcgacacccccctgcacagcgccatctctgctggcaccggggccagcggcatcgtggaggtgctgacagaggtgcccaacattgatgtgacagccaccaacagccagggcttcaccctgctgcaccacgccagcctgaagggccacgccctggccgtgaggaagatcctggcccgggcccggcagctggtggatgccaagaaggaggatggcttcaccgccctgcacctggccgccctgaacaaccaccgggaggtggcccagatcctgatccgggagggccgctgtgatgtgaatgtgaggaacaggaagctgcagagccccctgcacctggccgtgcagcaggcccacgtgggcctggtgcccctgctggtggatgctggctgcagcgtgaatgcagaagatgaggagggggacacagccctgcacgtggccctgcagaggcaccagctgctgcccctggtggctgatggagctggaggagaccccggccccctgcagctgctgagccggctgcaggccagcggcctgcccggcagcgctgagctgactgtgggcgctgctgtggcctgcttcctggccctggagggcgcagatgtgtcctacaccaaccaccggggccgcagccccctggacctggccgctgagggccgggtgctgaaggccctgcagggctgtgcccagcgcttccgggagcggcaggccggcggcggggccgcccctggcccccggcagaccctgggcacccccaacacagtgaccaacctgcacgtgggcgccgcccctggccctgaggccgcagaatgtctggtgtgcagcgagctggccctgctggtgctcttcagcccctgccagcacaggacagtgtgtgaagaatgtgcccggaggatgaagaagtgcatccgctgccaggtggtggtgtccaagaagctgcggccagatggcagcgaggtggccagcgctgccccagcccctggccccccccggcagctggtggaggagctgcagagccgctaccggcagatggaggagcgcatcacctgccccatctgcatcgacagccacatccggctggtgttccagtgtggccatggagcctgtgccccctgtggcagcgccctgagcgcctgccccatctgccggcagcccatccgggaccgcatccagatctttgtgtag

SEQ ID NO: 22059 - DNA, 294 bp, synthetic construct
  source 1..294: mol_type = other DNA; note = Synthetic coding sequence
atggccagcagcgctgagctggacttcaacctgcaggccctgctggagcagctgagccaggatgagctgagcaagttcaagagcctcatccgcaccatcagcctgggcaaggagctgcagacagtgccccagacagaggtggacaaggccaacgggaagcagctggtggagatcttcaccagccacagctgcagctactgggccggcatggccgccatccaggtgtttgagaagatgaaccagacccacctgagcggccgggcagatgagcactgtgtgatgcccccaccctag

SEQ ID NO: 22060 - DNA, 693 bp, synthetic construct
  source 1..693: mol_type = other DNA; note = Synthetic coding sequence
atggattctgagctgatgcacagcatcgtgggcagctaccacaagcccccagagcgggtgtttgtgcccagcttcacccagaatgagcccagccagaactgccacccagccaacctggaggtgaccagccccaagatcctgcacagccccaacagccaggccctgatcctggccctgaagaccctgcaggagaagatccaccggctggagctggagaggacccaggccgaggacaacctgaacatcctgagccgggaggccgcccagtacaagaaggccctggagaatgagaccaatgaaagaaacctggcccaccaggagctgatcaagcagaagaaggacatcagcatccagctgagcagcgcccagagccgctgcaccctgctggagaagcagctggagtacaccaagaggatggtgctgaatgtggagcgggagaagaacatgatcctggagcagcaggcccagctgcagcgggagaaggagcaggaccagatgaagctgtatgccaagctggagaagctggatgtgctggagaaggagtgcttccggctgaccaccacccagaagacagctgaggacaagatcaagcacctggaggagaagctgaaggaggaggagcaccagaggaagctgttccaggacaaggccagcgagctgcagacaggcctggagatcagcaagatcatctag

SEQ ID NO: 22061 - DNA, 624 bp, synthetic construct
  source 1..624: mol_type = other DNA; note = Synthetic coding sequence
atggacagaggagagcagggcctgctgaggacagatcctgtgcctgaggagggagaagatgtggccgccaccatcagcgccacagagaccctgtctgaggaggagcaggaggagctgcggcgggagctggccaaggtggaggaggagatccagaccctgagccaggtgctggccgccaaggagaagcacctggccgagatcaagaggaagctgggcatcaacagcctgcaggagctgaagcagaacatcgccaagggctggcaggatgtgacagccaccagcgcctacaagaagaccagcgagaccctgagccaggccggccagaaggccagcgctgccttcagctctgtgggcagcgtcatcaccaagaagctggaggatgtgaagctgcaggccttcagccacagcttcagcatccgcagcatccagcacagcatctccatgcctgccatgaggaacagccccaccttcaagagctttgaggagaaggtggagaacctgaagagcaaggtgggcggcaccaagccagctggaggagactttggagaggtgctgaacagcgctgccaatgccagcgccaccaccacagagcccctgcctgagaagacccaggagagcctgtag

SEQ ID NO: 22062 - DNA, 387 bp, synthetic construct
  source 1..387: mol_type = other DNA; note = Synthetic coding sequence
atgaagttcaacccctttgtgaccagtgacaggagcaagaacaggaagaggcacttcaatgcccccagccacgtgcggaggaagatcatgagcagccccctgagcaaggagctgcggcagaagtacaacgtgcgctccatgcccatcaggaaggatgatgaggtgcaggtggtgcggggccactacaagggccagcagatcggcaaggtggtgcaggtgtacaggaagaagtatgtgatctacatcgagcgggtgcagcgggagaaggccaacggcaccaccgtgcacgtgggcatccaccccagcaaggtggtgatcacccggctgaagctggacaaggacaggaagaagatcctggagaggaaggccaagagccggcaggtgtag

SEQ ID NO: 22063 - DNA, 120 bp, synthetic construct
  source 1..120: mol_type = other DNA; note = Synthetic coding sequence
ggcctgaccaagcagctgctggatgacaccatcggcatccaccccacctgtggggaggtgttcaccaccctggagatcaccaagagcagcggcctggacatcacccagaagggcggctag

SEQ ID NO: 22064 - DNA, 1365 bp, synthetic construct; identical to SEQ ID NO: 18526
  source 1..1365: mol_type = other DNA; note = Synthetic coding sequence

SEQ ID NO: 22065 - DNA, 438 bp, synthetic construct; identical to SEQ ID NO: 18515
  source 1..438: mol_type = other DNA; note = Synthetic coding sequence

SEQ ID NO: 22066 - DNA, 621 bp, synthetic construct
  source 1..621: mol_type = other DNA; note = Synthetic coding sequence
atggattctgagctgatgcacagcatcgtgggcagctaccacaagcccccagagcgggtgtttgtgcccagcttcacccagaatgagcccagccagaactgccacccagccaacctggaggtgaccagccccaagatcctgcacagccccaacagccaggccctgatcctggccctgaagaccctgcaggagaagatccaccggctggagctggagaggacccaggccgaggacaacctgaacatcctgagccgggaggccgcccagtacaagaaggccctggagaatgagaccaatgaaagaaacctggcccaccaggagctgatcaagcagaagaaggacatcagcatccagctgagcagcgcccagagccgctgcaccctgctggagaagcagctggagtacaccaagaggatggtgctgaatgtggagcgggagaagaacatgatcctggagcagcaggcccagctgcagcgggagaaggagcaggaccagatgaagctgtatgccaagctggagaagctggatgtgctggagaaggagtgcttccggctgaccaccacccagaagacagctgaggacaagatcaagcacctggaggagaagctgaaggaggagtag

SEQ ID NO: 22067 - DNA, 1050 bp, synthetic construct; identical to SEQ ID NO: 18364
  source 1..1050: mol_type = other DNA; note = Synthetic coding sequence

SEQ ID NO: 22068 - DNA, 429 bp, synthetic construct
  source 1..429: mol_type = other DNA; note = Synthetic coding sequence
atgcccagcatcaagctgcagagcagtgatggagagatctttgaggtggatgtggagatcgccaagcagagcgtgaccatcaagaccatgctggaggacctgggcatggatgatgaaggagatgatgatcctgtgcccctgcccaacgtgaatgctgccatcctgaagaaggtgatccagtggtgcacccaccacaaggatgatcctcctcctccagaagatgatgagaacaaggagaagaggacagatgacatccctgtgtgggaccaggagttcctgaaggtggaccagggcaccctgtttgagctgatcctggccgccaactacctggacatcaagggcctgctggatgtgacctgcaagacagtggccaacatgatcaagggcaagaccccagaggagatcaggaagaccttcaacatcaagtag

SEQ ID NO: 22069 - DNA, 375 bp, synthetic construct
  source 1..375: mol_type = other DNA; note = Synthetic coding sequence
atgtctgccaccgtggtggatgctgtgaatgctgcccccctgagcggcagcaaggagatgagcctggaggagcccaagaagatgacccgggaggactggaggaagaagaaggagctggaggagcagaggaagctgggcaatgccccagctgaggtggatgaggagggcaaggacatcaacccccacatcccccagtacatcagctctgtgccctggtacatcgaccccagcaagaggcccaccctgaagcaccagaggccccagcctgagaagcagaagcagttcagcagcagcggggagtggtacaagaggggcgtgaaggagaacagcatcatcaccaagtacagaaaaggagcctgtgagaactgtggctag

SEQ ID NO: 22070 - DNA, 750 bp, synthetic construct; identical to SEQ ID NO: 18913
  source 1..750: mol_type = other DNA; note = Synthetic coding sequence

SEQ ID NO: 22071 - DNA, 120 bp, synthetic construct
  source 1..120: mol_type = other DNA; note = Synthetic coding sequence
atgaagttcaacccctttgtgaccagtgacaggagcaagaacaggaagaggcacttcaatgcccccagccacgtgcggaggaagatcatgagcagccccctgagcaaggagctgaggtag

SEQ ID NO: 22072 - DNA, 1401 bp, synthetic construct; identical to SEQ ID NO: 18363
  source 1..1401: mol_type = other DNA; note = Synthetic coding sequence

SEQ ID NO: 22073 - DNA, 528 bp, synthetic construct
  source 1..528: mol_type = other DNA; note = Synthetic coding sequence
atggccagcaaccacaagagcagcgctgcccggcctgtgtcccggggcggcgtgggcctgaccggccggccccccagcggcatccggcccctgagcggcaacatccgggtggccacagccatgcctcctggaacagcccggcccggcagccggggctgccccatcggcactggaggagtgctgagcagccagatcaaggtggcccacaggcctgtgacccagcagggcctgaccggcatgaagacaggcaccaagggcccccagaggcagatcctggacaagagctactacctgggcctgctgcggagcaagatcagcgagctgaccacagaggtgaacaagctgcagaagggcatcgagatgtacaaccaggagaacagcgtgtacctgtcctatgagaagagagctgagaccctggccgtggagatcaaggagctgcagggccagctggccgactacaacatgctggtggacaagctgaacaccaacacagagatggaggaggtgatgaatgactacaacatgtag

SEQ ID NO: 22074 - DNA, 438 bp, synthetic construct; identical to SEQ ID NO: 18515
  source 1..438: mol_type = other DNA; note = Synthetic coding sequence

SEQ ID NO: 22075 - DNA, 2136 bp, synthetic construct; identical to SEQ ID NO: 20524
  source 1..2136: mol_type = other DNA; note = Synthetic coding sequence

SEQ ID NO: 22076 - DNA, 471 bp, synthetic construct
  source 1..471: mol_type = other DNA; note = Synthetic coding sequence
atggcctctgtgctgagccggcggctgggcaagaggagcctgctgggcgcccgggtgctgggccccagcgccagcgagggccccagcgctgccccacccagcgagcccctgctggagggcgccgccccccagcccttcaccaccagtgatgacaccccctgccaggagcagcccaaggaggtgctgaaggcccccagcaccagcggcctgcagcaggtggccttccagcccggccagaaggtgtatgtgtggtatggaggccaggagtgcaccggcctggtggagcagcacagctggatggagggccaggtgacagtgtggctgctggagcagaagctgcaggtgtgctgccgggtggaggaggtgtggctggccgagctgcagggcccctgcccccaggccccacccctggagcccggggcccaggccctggcctacagacctgtgtccagaaatattgatgtgccctag

SEQ ID NO: 22077 - DNA, 309 bp, synthetic construct
  source 1..309: mol_type = other DNA; note = Synthetic coding sequence
atgcccagcatcaagctgcagagcagtgatggagagatctttgaggtggatgtggagatcgccaagcagagcgtgaccatcaagaccatgctggaggacctgggcatggatgatgaaggagatgatgatcctgtgcccctgcccaacgtgaatgctgccatcctgaagaaggtgatccagtggtgcacccaccacaaggatgatcctcctcctccagaagatgatgagaacaaggagaagaggacagatgacatccctgtgtgggaccaggagttcctgaaggtggaccagggcaccctgtttgaatag

SEQ ID NO: 22078 - DNA, 465 bp, synthetic construct
  source 1..465: mol_type = other DNA; note = Synthetic coding sequence
atggctgatgacctggactttgaaacaggagatgctggggccagcgccaccttccccatgcagtgcagcgccctgaggaagaatggatttgtggtgctgaagggctggccctgcaagatcgtggagatgtctgccagcaagacaggcaagcacggccacgccaaggtgcacctggtgggcatcgacatcttcaccgggaagaagtatgaggacatctgccccagcacccacaacatggatgtgcccaacatcaagagaaatgacttccagctgattggcatccaggacggctacctgagcctgctgcaggacagcggggaggtgcctgaggacctgcggctgcctgagggggacctgggcaaggagattgagcagaagtatgactgtggggaggagatcctgatcaccgtgctgagcgccatgacagaggaggccgctgtggccatcaaggccatggccaagtag

SEQ ID NO: 22079 - DNA, 306 bp, synthetic construct
  source 1..306: mol_type = other DNA; note = Synthetic coding sequence
atgtctgccaccgtggtggatgctgtgaatgctgcccccctgagcggcagcaaggagatgagcctggaggagcccaagaagatgacccgggaggactggaggaagaagaaggagctggaggagcagaggaagctgggcaatgccccagctgaggtggatgaggagggcaaggacatcaacccccacatcccccagtacatcagctctgtgccctggtacatcgaccccagcaagaggcccaccctgaagcaccagaggccccagcctgagaagcagaagcagttcagcagcagcggggagtggtag

SEQ ID NO: 22080 - DNA, 3201 bp, synthetic construct
  source 1..3201: mol_type = other DNA; note = Synthetic coding sequence
atggccggggccctgcggcggggccgggccctgggcagccggcccagcggccccaccgtgagcagcagaagaagcccccagtgccctgtggcccaggagggcctgggcgcccggagccggccccgggtggcccccaggagcctggcccgctgtggccccagcagccggctgatgggctggaagcccagcgaggcccggggccagagccagagcttccaggccagcggcctgcagcccaggagcctgaaggccgcccggcgggccaccggccgcccagacaggagcagagctgcccggcccaccatggaccccagcgcccacaggagcagagctgccccacccaacatggaccctgacccccaggccggcgtgcaggtgggcatgagggtggtgcggggcgtggactggaagtggggccagcaggacggcggggagggcggcgtgggcaccgtggtggagctgggcagacatggcagccccagcaccccagacagaacagtggtggtgcagtgggaccagggcaccaggaccaactacagagctggctaccagggcgcccatgacctgctgctgtatgacaatgcccagattggagtgcgccaccccaacatcatctgtgactgctgcaagaagcacggcctgcggggcatgcgctggaagtgccgggtgtgcctggactatgacctgtgcacccagtgctacatgcacaacaagcatgagctggcccacgcctttgacagatatgaaacagcccacagcaggcctgtgaccctgagcccccggcagggcctgccccgcatccccctgcggggcatcttccagggcgccaaggtggtgcggggccctgactgggagtggggcagccaggacggcggggagggcaagccaggccgggtggtggacatccggggctgggatgtggagaccggccgctctgtggcctctgtgacctgggcagatggcaccaccaacgtgtacagagtgggccacaagggcaaggtggacctgaagtgtgtgggggaggccgccggcggcttctactacaaggaccacctgccccggctgggcaagccagctgagctgcagaggagagtgtctgctgacagccagcccttccagcacggggacaaggtgaagtgcctgctggacacagatgtgctgcgggagatgcaggagggccacggcggctggaaccccaggatggccgagaccggcaccgtgcaccgcatcacagacagaggagatgtgcgggtgcagttcaaccacgagacccgctggaccttccaccctggggccctgaccaagcaccacagcttctgggtgggagatgtggtgcgggtcatcggggacctggacacagtgaagaggctgcaggccggccatggagagtggacagatgacatggccccagccctgggccgggtgggcaaggtggtgaaggtgtttggagatggcaacctgcgggtggccgtggccggccagcgctggaccttcagccccagctgcctggtggcctacagacctgaggaggatgccaacctggatgtggccgagcgggcccgggagaacaagagcagcctgtctgtggccctggacaagctgcgggcccagaagagtgaccctgagcaccctggccgcctggtggtggaggtggccctgggcaatgctgcccgggccctggacctgctgcggcggcggcctgagcaggtggacaccaagaaccagggccgcacagccctgcaggtggccgcctacctgggccaggtggagctgatccggctgctgctgcaggcccgggccggcgtggacctgcctgatgatgagggcaacacagccctgcactacgccgccctgggcaaccagcctgaggccaccagggtgctgctgtctgctggctgcagagcagatgccatcaacagcacccagagcacagccctgcacgtggccgtgcagaggggcttcctggaggtggtgcgggccctgtgtgagcggggctgtgatgtgaacctgcctgatgcccacagcgacacccccctgcacagcgccatctctgctggcactggagccagcggcatcgtggaggtgctgacagaggtgcccaacattgatgtgacagccaccaacagccagggcttcaccctgctgcaccacgccagcctgaagggccacgccctggccgtgaggaagatcctggcccgggcccggcagctggtggatgccaagaaggaggatggcttcaccgccctgcacctggccgccctgaacaaccaccgggaggtggcccagatcctgatccgggagggccgctgtgatgtgaatgtgaggaacaggaagctgcagagccccctgcacctggccgtgcagcaggcccacgtgggcctggtgcccctgctggtggatgctggctgcagcgtgaatgcagaagatgaggagggggacacagccctgcacgtggccctgcagaggcaccagctgctgcccctggtggctgatggagctggaggagaccccggccccctgcagctgctgagccggctgcaggccagcggcctgcccggcagcgctgagctgactgtgggcgctgctgtggcctgcttcctggccctggagggcgcagatgtgtcctacaccaaccaccggggccgcagccccctggacctggccgctgagggccgggtgctgaaggccctgcagggctgtgcccagcgcttccgggagcggcaggccggcggcggggccgcccctggcccccggcagaccctgggcacccccaacacagtgaccaacctgcacgtgggcgccgcccctggccctgaggccgctgagtgcctggtgtgcagcgagctggccctgctggtgctcttcagcccctgccagcacaggacagtgtgtgaggagtgtgcccggaggatgaagaagtgcatccgctgccaggtggtggtgtccaagaagctgcggccagatggcagcgaggtggccagcgctgccccagcccctggccccccccggcagctggtggaggagctgcagagccgctaccggcagatggaggagcgcatcacctgccccatctgcatcgacagccacatccggctggtgttccagtgtggccacggggcctgtgccccctgtggcagcgccctgagcgcctgccccatctgccggcagcccatccgggaccgcatccagatctttgtgtag

SEQ ID NO: 22081 - DNA, 348 bp, synthetic construct
  source 1..348: mol_type = other DNA; note = Synthetic coding sequence
atgatgctgggcacagaaggaggagagggctttgtggtgaaggtgcggggcctgccctggagctgcagcgcagatgaggtgcagcgcttcttcagtgactgcaagatccagaatggagcccagggcatccgcttcatctacacccgggagggccggcccagcggggaggcctttgtggagctggagagtgaagatgaggtgaagctggccctgaagaaggaccgggagaccatgggccaccgctacgtggaggtgttcaagagcaacaacgtggagatggactgggtgctgaagcacacaggccccaacagcccagacacagccaatgatggctttgtgcggctgtag

SEQ ID NO: 22082 - DNA, 375 bp, synthetic construct
  source 1..375: mol_type = other DNA; note = Synthetic coding sequence
atggcctctgtgctgagccggcggctgggcaagaggagcctgctgggcgcccgggtgctgggccccagcgccagcgagggccccagcgctgccccacccagcgagcccctgctggagggcgccgccccccagcccttcaccaccagtgatgacaccccctgccaggagcagcccaaggaggtgctgaaggcccccagcaccagcggcctgcagcaggtggccttccagcccggccagaaggtgtatgtgtggtatggaggccaggagtgcaccggcctggtggagcagcacagctggatggagggccaggtgacagtgtggctgctggagcagaagctgcaggtgtgctgccgggtggaggaggtgtggctgtag

SEQ ID NO: 22083 - DNA, 438 bp, synthetic construct; identical to SEQ ID NO: 18515
  source 1..438: mol_type = other DNA; note = Synthetic coding sequence

SEQ ID NO: 22084 - DNA, 339 bp, synthetic construct
  source 1..339: mol_type = other DNA; note = Synthetic coding sequence
atggattctgagctgatgcacagcatcgtgggcagctaccacaagcccccagagcgggtgtttgtgcccagcttcacccagaatgagcccagccagaactgccacccagccaacctggaggtgaccagccccaagatcctgcacagccccaacagccaggccctgatcctggccctgaagaccctgcaggagaagatccaccggctggagctggagaggacccaggccgaggacaacctgaacatcctgagccgggaggccgcccagtacaagaaggccctggagaatgagaccaatgaaagaaacctggcccaccaggagctgatcaagcagaagtag

SEQ ID NO: 22085 - DNA, 345 bp, synthetic construct
  source 1..345: mol_type = other DNA; note = Synthetic coding sequence
atgcccagcgctgaggccaagctgaagaagaacagatgtgccaactgctttgactgccccggctgcatgcacaccctgagcacccgggccaccagcatcagcacccagctgcctgatgatcctgccaagaccaccatgaagaaggcctactacctggcctgtggcttctgccgctggaccagcagagatgtgggcatggctgacaagtctgtggccagcggcggctggcaggagcctgagaacccccacacccagaggatgaacaagctgattgagtactaccagcagctggcccagaaggagaaggtggagcgggacaggaagaagctggccaggagaagatag

SEQ ID NO: 22086 - DNA, 648 bp, synthetic construct
  source 1..648: mol_type = other DNA; note = Synthetic coding sequence
atgcctggagaggccacagagaccgtgcctgccacagagcaggagctgccccagagccaggccgagactggaagtggcacagccagtgacagcggggagagcgtgcccggcatcgaggagcaggacagcacccagaccaccacccagaaggcctggctggtggccgctgctgagattgatgaggagcctgtgggcaaggccaagcagagccgctctgagaagagggccaggaaggccatgagcaagctgggcctgctgcaggtgactggagtgaccagggtgaccatctggaagagcaagaacatcctcttcgtcatcaccaagctggatgtgtacaagagccctgccagtgatgcctacatcgtgtttggagaggccaagatccaggacctgagccagcaggcccagctggccgctgctgagaagttccgggtgcagggcgaggccgtgggcaacatccaggagaacacccagacccccaccgtgcaggaggagagcgaggaggaggaggtggatgagaccggggtggaggtgaaggatgtgaagctggtgatgagccaggccaacgtgtcccgggccaaggctgtgcgggccctgaagaacaacagcaatgacatcgtgaatgccatcatggagctgactgtgtag

SEQ ID NO: 22087 - DNA, 432 bp, synthetic construct
  source 1..432: mol_type = other DNA; note = Synthetic coding sequence
atgtctgccaccgtggtggatgctgtgaatgctgcccccctgagcggcagcaaggagatgagcctggaggagcccaagaagatgacccgggaggactggaggaagaagaaggagctggaggagcagaggaagctgggcaatgccccagctgaggtggatgaggagggcaaggacatcaacccccacatcccccagtacatcagctctgtgccctggtacatcgaccccagcaagaggcccaccctgaagcaccagaggccccagcctgagaagcagaagcagttcagcagcagcggggagtggtacaagaggggcgtgaaggagaacagcatcatcaccaagtacagaaaaggagcctgtgagaactgtggggccatgacccacaagaagaaggactgctttgagcggccccggcgggtgggcgccaagtag

SEQ ID NO: 22088 - DNA, 567 bp, synthetic construct
  source 1..567: mol_type = other DNA; note = Synthetic coding sequence
atggcctctgtgctgagccggcggctgggcaagaggagcctgctgggcgcccgggtgctgggccccagcgccagcgagggccccagcgctgccccacccagcgagcccctgctggagggcgccgccccccagcccttcaccaccagtgatgacaccccctgccaggagcagcccaaggaggtgctgaaggcccccagcaccagcggcctgcagcaggtggccttccagcccggccagaaggtgtatgtgtggtatggaggccaggagtgcaccggcctggtggagcagcacagctggatggagggccaggtgacagtgtggctgctggagcagaagctgcaggtgtgctgccgggtggaggaggtgtggctggccgagctgcagggcccctgcccccaggccccacccctggagcccggggcccaggccctggcctacagacctgtgtccagaaatattgatgtgcccaagaggaagagtgatgctgtggagatggatgagatgatggccgccatggtgctgaccagcctgagctgcagccctgtggtgcagagccccccaggatag

SEQ ID NO: 22089 - DNA, 87 bp, synthetic construct
  source 1..87: mol_type = other DNA; note = Synthetic coding sequence
atgatgctgggcacagaaggaggagagggctttgtggtgaaggtgcggggcctgccctggagctgcagcgcagatgaggtgcagtag

SEQ ID NO: 22090 - DNA, 87 bp, synthetic construct
  source 1..87: mol_type = other DNA; note = Synthetic coding sequence
atggattctgagctgatgcacagcatcgtgggcagctaccacaagcccccagagcgggtgtttgtgcccagcttcacccagaactag

SEQ ID NO: 22091 - DNA, 1074 bp, synthetic construct; identical to SEQ ID NO: 19561
  source 1..1074: mol_type = other DNA; note = Synthetic coding sequence

SEQ ID NO: 22092 - DNA, 483 bp, synthetic construct
  source 1..483: mol_type = other DNA; note = Synthetic coding sequence
atgcccagcatcaagctgcagagcagtgatggagagatctttgaggtggatgtggagatcgccaagcagagcgtgaccatcaagaccatgctggaggacctgggcatggatgatgaaggagatgatgatcctgtgcccctgcccaacgtgaatgctgccatcctgaagaaggtgatccagtggtgcacccaccacaaggatgatcctcctcctccagaagatgatgagaacaaggagaagaggacagatgacatccctgtgtgggaccaggagttcctgaaggtggaccagggcaccctgtttgagctgatcctggccgccaactacctggacatcaagggcctgctggatgtgacctgcaagacagtggccaacatgatcaagggcaagaccccagaggagatcaggaagaccttcaacatcaagaatgacttcacagaggaggaggaggcccaggtgggcagcacccagttctgcctgtag

SEQ ID NO: 22093 - DNA, 342 bp, synthetic construct
  source 1..342: mol_type = other DNA; note = Synthetic coding sequence
atggattctgagctgatgcacagcatcgtgggcagctaccacaagcccccagagcgggtgtttgtgcccagcttcacccagaatgagcccagccagaactgccacccagccaacctggaggtgaccagccccaagatcctgcacagccccaacagccaggccctgatcctggccctgaagaccctgcaggagaagatccaccggctggagctggagaggacccaggccgaggacaacctgaacatcctgagccgggaggccgcccagtacaagaaggccctggagaatgagaccaatgaaagaaacctggcccaccaggagctgatcaagcagaagaagtag

SEQ ID NO: 22094 - DNA, 309 bp, synthetic construct
  source 1..309: mol_type = other DNA; note = Synthetic coding sequence
atggcctctgtgctgagccggcggctgggcaagaggagcctgctgggcgcccgggtgctgggccccagcgccagcgagggccccagcgctgccccacccagcgagcccctgctggagggcgccgccccccagcccttcaccaccagtgatgacaccccctgccaggagcagcccaaggaggtgctgaaggcccccagcaccagcggcctgcagcaggtggccttccagcccggccagaaggtgtatgtgtggtatggaggccaggagtgcaccggcctggtggagcagcacagctggatggagggctag

SEQ ID NO: 22095 - DNA, 492 bp, synthetic construct; identical to SEQ ID NO: 19389
  source 1..492: mol_type = other DNA; note = Synthetic coding sequence

SEQ ID NO: 22096 - DNA, 441 bp, synthetic construct
  source 1..441: mol_type = other DNA; note = Synthetic coding sequence
atgtgccccggcaactggctgtgggcctccatgaccttcatggcccgcttcagccgcagcagcagccgcagccctgtgaggacccggggcaccctggaggagatgcccaccgtgcagcaccccttcctgaatgtgtttgagctggagcggctgctgtacaccgggaagacagcctgcaaccacgcagatgaggtgtggccaggcctgtacctgggggaccaggacatggccaacaacagaagagagctgcggcggctgggcatcacccacgtgctgaatgccagccacagccgctggaggggcaccccagaggcctatgagggcctgggcatccgctacctgggcgtggaggcccatgacagccctgcctttgacatgagcatccacttccagacagctgctgacttcatccaccgggccctgagccagcccggcggctag

SEQ ID NO: 22097 - DNA, 1542 bp, synthetic construct; identical to SEQ ID NO: 19319
  source 1..1542: mol_type = other DNA; note = Synthetic coding sequence

SEQ ID NO: 22098 - DNA, 438 bp, synthetic construct
  source 1..438: mol_type = other DNA; note = Synthetic coding sequence
atggctgtgtccactggagtgaaggtgcccaggaacttccggctgctggaggagctggaggagggccagaagggcgtgggagatggcaccgtgtcctggggcctggaggatgatgaggacatgaccctgacccgctggacaggcatgatcatcggcccccccaggaccaactatgaaaatcgcatctacagcctgaaggtggagtgtggccccaagtacccagaggcccctccttctgtgcgctttgtgaccaagatcaacatgaatggcatcaacaacagcagcggcatggtggatgcccggagcatccctgtgctggccaagtggcagaacagctacagcatcaaggtggtgctgcaggagctgcggcggctgatgatgagcaaggagaacatgaagctgccccagcccccagagggccagacctacaacaactag

SEQ ID NO: 22099 - DNA, 1542 bp, synthetic construct; identical to SEQ ID NO: 19319
  source 1..1542: mol_type = other DNA; note = Synthetic coding sequence

SEQ ID NO: 22100 - DNA, 57 bp, synthetic construct
  source 1..57: mol_type = other DNA; note = Synthetic coding sequence
atgcccagcatcaagctgcagagcagtgatggagagatctttgaggtggatgtgtag

SEQ ID NO: 22101 - DNA, 1929 bp, synthetic construct
  source 1..1929: mol_type = other DNA; note = Synthetic coding sequence
gtggccagcgagggctctgtgcggcggcccagcggccctgtgcctgccccccagcccccagccttccgctttgtgtcccggcccggccgggcccggtctgagagcgagaccctggagaggagccccccccagagccctggccctgggaaggctggagatgcccccaacagaagaagtggccacgtgcggggggcccgggtgctgagccccccaggaagaagagcccggctgagcagccctggccccagccgcagcagcgaggcccgggaggagctgcggcggcacctggtgggcctcatcgagaggagccgggtggtgatcttcagcaagagctactgcccccacagcaccagggtgaaggagctgttcagcagcctgggcgtggagtgcaatgtgctggagctggaccaggtggatgatggagcccgggtgcaggaggtgctgtctgagatcaccaaccagaagacagtgcccaacatctttgtgaacaaggtgcacgtgggcggctgtgaccagaccttccaggcctaccagagcggcctgctgcagaagctgctgcaggaggacctggcctatgactatgacctgatcatcattggaggcggcagcggcggcctgagctgtgccaaggaggccgccatcctgggcaagaaggtgatggtgctggactttgtggtgcccagcccccagggcacctcctggggcctgggcggcacctgtgtgaatgtgggctgcatccccaagaagctgatgcaccaggccgccctgctgggccaggccctgtgtgacagcaggaagtttggctgggagtacaaccagcaggtgcgccacaactgggagaccatgaccaaggccatccagaaccacatcagcagcctgaactggggctaccgcctgagcctgcgggagaaggctgtggcctacgtgaacagctatggagaatttgtggagcaccacaagatcaaggccaccaacaagaagggccaggagacctactacacagctgcccagtttgtgattgccaccggggagcggccccgctacctgggcatccagggcgacaaggagtactgcatcaccagtgatgacctcttcagcctgccctactgccctgggaagaccctggtggtgggcgccagctatgtggccctggagtgtgccggcttcctggccggcttcggcctggatgtgacagtgatggtgcgcagcatcctgctgcggggctttgaccaggagatggccgagaaggtgggcagctacatggagcagcacggcgtgaagttcctgaggaagttcatccctgtgatggtgcagcagctggagaagggcagccctgggaagctgaaggtgctggccaagagcacagagggcacagagaccattgaaggagtgtacaacacagtgctgctggccatcggccgggacagctgcaccaggaagattggcctggagaagattggagtgaagatcaatgagaagagcggcaagatccctgtgaatgatgtggagcagaccaacgtgccctacgtgtatgctgtgggggacatcctggaggacaagccagagctgacccctgtggccatccagagcggcaagctgctggcccagaggctgtttggagccagcctggagaagatctaccacaccctcttctggcccctggagtggacagtggccggccgggagaacaacacctgctacgccaagatcatctgcaacaagtttgaccatgacagagtgattggcttccacatcctgggccccaatgctggggaggtgacccagggctttgctgctgccatgaagtgtggcctgaccaagcagctgctggatgacaccatcggcatccaccccacctgtggggaggtgttcaccaccctggagatcaccaagagcagcggcctggacatcacccagaagggctgctag

SEQ ID NO: 22102 - DNA, 1338 bp, synthetic construct
  source 1..1338: mol_type = other DNA; note = Synthetic coding sequence
atgaacaagggcatcagcagcatccccatcaacctgcgggtgtacagcccccacgtgctgaacctgaccctgattgacctgcccggcatcaccaaggtgcctgtgggggaccagcccccagacatcgagtaccagatccgggagatgatcatgcagttcatcacccgggagaactgcctgatcctggccgtgaccccagccaacacagacctggccaacagtgatgccctgaagctggccaaggaggtggacccccagggcctgcggaccatcggggtcatcaccaagctggacctgatggatgagggcacagatgccagagatgtgctggagaacaagctgctgcccctgcggcggggctacgtgggcgtggtgaacagaagccagaaggacattgatggcaagaaggacatcaaggccgccatgctggccgagaggaagttcttcctgagccacccagcctaccgccacatcgctgacaggatgggcaccccccacctgcagaaggtgctgaaccagcagctgaccaaccacatccgggacaccctgcccaacttcaggaacaagctgcagggccagctgctgagcattgaacatgaggtggaggcctacaagaacttcaagccagaggaccccaccaggaagaccaaggccctgctgcagatggtgcagcagtttgctgtggactttgagaagagaattgagggcagcggggaccaggtggacaccctggagctgtctggaggagccaagatcaaccgcatcttccacgagcgcttcccctttgagatcgtgaagatggagttcaatgagaaggagctgcggcgggagatctcctatgccatcaagaacatccacggcatcagaacaggcctcttcaccccagacatggcctttgaggccatcgtgaagaagcagatcgtgaagctgaagggccccagcctgaagtctgtggacctggtgatccaggagctgatcaacacagtgaagaagtgcaccaagaagctggccaacttcccccggctgtgtgaggagacagaaagaattgtggccaaccacatccgggagcgggagggcaagaccaaggaccaggtgctgctgctgattgacatccaggtgtcctacatcaacaccaaccacgaggacttcatcggctttgccaatgcccagcagaggagcagccaggtgcacaagaagaccaccgtgggcaaccaggtgatcaggaagggctggctgaccatcagcaacatcggcatcatgaagggcggcagcaagggctactggtttgtgctgacagctgagagcctgtcctggtacaaggatgatgaggagaagtag

SEQ ID NO: 22103 - DNA, 1560 bp, synthetic construct
  source 1..1560: mol_type = other DNA; note = Synthetic coding sequence
atgctgcagctgatggattctggcatcaccatctgcctgagaaatggagctgcctctgtgttcaagaagaaggagtggagcacccagggcgaggagaacaagcaggacagcaagctgaagaagctgtctgaggacagcctgaccaagcagcctgaggaggtgtttgatgtgctggagaagctgggggagggcagctatggcagcgtcttcaaggccatccacaaggagagcggccaggtggtggccatcaagcaggtgcctgtggagagtgacctgcaggagatcatcaaggagatcagcatcatgcagcagtgtgacagcccctacgtggtgaagtactacggcagctacttcaagaacacagacctgtggatcgtgatggagtactgtggggccggctctgtgtctgacatcatccggctgaggaacaagaccctgattgaagatgaaattgccaccatcctgaagagcaccctgaagggcctggagtacctgcacttcatgaggaagatccaccgggacatcaaggccggcaacatcctgctgaacacagagggccacgccaagctggccgactttggagtggccggccagctgacagacaccatggccaagaggaacacagtcatcggcacccccttctggatggcccctgaggtgatccaggagatcggctacaactgtgtggccgacatctggagcctgggcatcaccagcattgagatggccgagggcaagccaccctatgctgacatccaccccatgagggccatcttcatgatccccaccaaccccccacccaccttcaggaagccagagctgtggagcgatgacttcacagactttgtgaagaagtgcctggtgaagaaccctgagcagagggccacagccacccagctgctgcagcaccccttcatcaagaatgccaagcctgtgtccatcctgcgggacctgatcacagaggccatggagatcaaggccaagagacatgaggagcagcagcgggagctggaggaggaggaggagaacagtgatgaagatgagctggacagccacaccatggtgaagacctctgtggagagcgtgggcaccatgagggccaccagcaccatgtctgagggcgcccagaccatgattgagcacaacagcaccatgctggagagtgacctgggcaccatggtgatcaacagtgaagatgaggaggaggaggatggcaccatgaagagaaatgccaccagcccccaggtgcagaggcccagcttcatggactactttgacaagcaggacttcaagaacaagagccatgagaactgcaaccagaacatgcatgagcccttccccatgagcaagaatgtgtttcctgacaactggaaggtgccccaggatggagactttgacttcctgaagaacctgagcctggaggagctgcagatgaggctgaaggccctggaccccatgatggagcgggagattgaggagctgcggcagcgctacacagccaagaggcagcccatcctggatgccatggatgccaagaagaggcggcagcagaacttctag

SEQ ID NO: 22104 - DNA, 1392 bp, synthetic construct
  source 1..1392: mol_type = other DNA; note = Synthetic coding sequence
atgaagatcatggacagcgagctgatgcacagcatcgtgggcagctaccacaagcccccagagcgggtgtttgtgcccagcttcacccagaatgagcccagccagaactgccacccagccaacctggaggtgaccagccccaagatcctgcacagccccaacagccaggccctgatcctggccctgaagaccctgcaggagaagatccaccggctggagctggagaggacccaggccgaggacaacctgaacatcctgagccgggaggccgcccagtacaagaaggccctggagaatgagaccaatgaaagaaacctggcccaccaggagctgatcaagcagaagaaggacatcagcatccagctgagcagcgcccagagccgctgcaccctgctggagaagcagctggagtacaccaagaggatggtgctgaatgtggagcgggagaagaacatgatcctggagcagcaggcccagctgcagcgggagaaggagcaggaccagatgaagctgtatgccaagctggagaagctggatgtgctggagaaggagtgcttccggctgaccaccacccagaagacagctgaggacaagatcaagcacctggaggagaagctgaaggaggaggagcaccagaggaagctgttccaggacaaggccagcgagctgcagacaggcctggagatcagcaagatcatcatgagctctgtgagcaacctgaagcacagcaaggagaagaagaagagcagcaagaagaccaagtgcatcaagaggcggcccccctggcagatctgcagcaagtttggagccctgccctttgtggccgagaagatgaggcagcaccgggacccccacatcctgcagaagcccttcaacgtgacagagacccgctgcctgcccaagcccagcaggaccacctcctggtgcaaggccatccccccagacagcgagaagagcatcagcatctgtgacaacctgtctgagctgctgatggccatgcaggatgagctggaccagatgtccatggagcaccaggagctgctgaagcagatgaaggagacagagagccacagcgtgtgtgatgacattgaatgtgagctggagtgcctgctgaagaagatggagatcaagggggagcagatcagcaagctgaagaagcaccaggacagcgtgtgcaagctgcagcagaaggtgcagaacagcaagatgtctgaggccagcggcatccagcaggaggacagctaccccaagggcagcaagaacatcaagaacagccccaggaagtgcctgacagacaccaacctcttccagaagaacagcagcttccaccccatccgggtgcacaacctgcagatgaagctgcggagagatgacatcatgtgggagcagtag

SEQ ID NO: 22105 - DNA, 1050 bp, synthetic construct; identical to SEQ ID NO: 18364
  source 1..1050: mol_type = other DNA; note = Synthetic coding sequence

SEQ ID NO: 22106 - DNA, 636 bp, synthetic construct; identical to SEQ ID NO: 18393
  source 1..636: mol_type = other DNA; note = Synthetic coding sequence

SEQ ID NO: 22107 - DNA, 438 bp, synthetic construct
  source 1..438: mol_type = other DNA; note = Synthetic coding sequence
atgatccccatctggaagcagcaggcccggcctggagatggccctgtgatctgggactaccacgtggtgctgctgcacgtgtcctctgggggccagaacttcatctatgacctggacacagtgctgcccttcccctgcctgtttgacacctacgtggaggatgccttcaagagtgatgatgacatccacccccagttccggaggaagttccgggtcatccgggctgacagctacctgaagaactttgccagtgacaggagccacatgaaggacagcagcggcaactggagggagcccccaccaccctacccctgcatcgagaccggggacagcaagatgaacctgaatgacttcatctccatggaccccaaggtgggctggggcgctgtgtacaccctgtctgagttcacccaccgcttcggcagcaagaactgctag

SEQ ID NO: 22108 - DNA, 258 bp, synthetic construct
  source 1..258: mol_type = other DNA; note = Synthetic coding sequence
atgtctgacaagagtgacctgaaggccgagctggagaggaagaagcagaggctggcccagatccgggaggagaagaagaggaaggaggaggagaggaagaagaaggaggccgacatgcagcagaagaaggagcctgtgcaggatgacagcgacctggacaggaagaggcgggagacagaggccctgctgcagagcatcggcatcagccctgagccccccctggtgcccacccccatgagccccagcagcaagagctag

SEQ ID NO: 22109 - DNA, 588 bp, synthetic construct
  source 1..588: mol_type = other DNA; note = Synthetic coding sequence
atggattctgagctgatgcacagcatcgtgggcagctaccacaagcccccagagcgggtgtttgtgcccagcttcacccagaatgagcccagccagaactgccacccagccaacctggaggtgaccagccccaagatcctgcacagccccaacagccaggccctgatcctggccctgaagaccctgcaggagaagatccaccggctggagctggagaggacccaggccgaggacaacctgaacatcctgagccgggaggccgcccagtacaagaaggccctggagaatgagaccaatgaaagaaacctggcccaccaggagctgatcaagcagaagaaggacatcagcatccagctgagcagcgcccagagccgctgcaccctgctggagaagcagctggagtacaccaagaggatggtgctgaatgtggagcgggagaagaacatgatcctggagcagcaggcccagctgcagcgggagaaggagcaggaccagatgaagctgtatgccaagctggagaagctggatgtgctggagaaggagtgcttccggctgaccaccacccagaagacagctgaggacaagtag

SEQ ID NO: 22110 - DNA, 1272 bp, synthetic construct; identical to SEQ ID NO: 19799
  source 1..1272: mol_type = other DNA; note = Synthetic coding sequence

SEQ ID NO: 22111 - DNA, 2091 bp, synthetic construct
  source 1..2091: mol_type = other DNA; note = Synthetic coding sequence
ggtgtgggcggccgcggggagcggctgccccggggctttgcccgggtggtgcgggtggccagcgagggctctgtgcggcggcccagcggccctgtgcctgccccccagcccccagccttccgctttgtgtcccggcccggccgggcccggtctgagagcgagaccctggagaggagccccccccagagccctggccctgggaaggctggagatgcccccaacagaagaagtggccacgtgcggggggcccgggtgctgagccccccaggaagaagagcccggctgagcagccctggccccagccgcagcagcgaggcccgggaggagctgcggcggcacctggtgggcctcatcgagaggagccgggtggtgatcttcagcaagagctactgcccccacagcaccagggtgaaggagctgttcagcagcctgggcgtggagtgcaatgtgctggagctggaccaggtggatgatggagcccgggtgcaggaggtgctgtctgagatcaccaaccagaagacagtgcccaacatctttgtgaacaaggtgcacgtgggcggctgtgaccagaccttccaggcctaccagagcggcctgctgcagaagctgctgcaggaggacctggcctatgactatgacctgatcatcattggaggcggcagcggcggcctgagctgtgccaaggaggccgccatcctgggcaagaaggtgatggtgctggactttgtggtgcccagcccccagggcacctcctggggcctgggcggcacctgtgtgaatgtgggctgcatccccaagaagctgatgcaccaggccgccctgctgggccaggccctgtgtgacagcaggaagtttggctgggagtacaaccagcaggtgcgccacaactgggagaccatgaccaaggccatccagaaccacatcagcagcctgaactggggctaccgcctgagcctgcgggagaaggctgtggcctacgtgaacagctatggagaatttgtggagcaccacaagatcaaggccaccaacaagaagggccaggagacctactacacagctgcccagtttgtgattgccaccggggagcggccccgctacctgggcatccagggcgacaaggagtactgcatcaccagtgatgacctcttcagcctgccctactgccctgggaagaccctggtggtgggcgccagctatgtggccctggagtgtgccggcttcctggccggcttcggcctggatgtgacagtgatggtgcgcagcatcctgctgcggggctttgaccaggagatggccgagaaggtgggcagctacatggagcagcacggcgtgaagttcctgaggaagttcatccctgtgatggtgcagcagctggagaagggcagccctgggaagctgaaggtgctggccaagagcacagagggcacagagaccattgaaggagtgtacaacacagtgctgctggccatcggccgggacagctgcaccaggaagattggcctggagaagattggagtgaagatcaatgagaagagcggcaagatccctgtgaatgatgtggagcagaccaacgtgccctacgtgtatgctgtgggggacatcctggaggacaagccagagctgacccctgtggccatccagagcggcaagctgctggcccagaggctgtttggagccagcctggagaagtgtgactacatcaacgtgcccaccaccgtcttcacccccctggagtatggctgctgcggcctgtctgaggagaaggccatcgaggtgtacaagaaggagaacctggagatctaccacaccctcttctggcccctggagtggacagtggccggccgggagaacaacacctgctacgccaagatcatctgcaacaagtttgaccatgacagagtgattggcttccacatcctgggccccaatgctggggaggtgacccagggctttgctgctgccatgaagtgtggcctgaccaagcagctgctggatgacaccatcggcatccaccccacctgtggggaggtgttcaccaccctggagatcaccaagagcagcggcctggacatcacccagaagggctgctag

SEQ ID NO: 22112 - DNA, 609 bp, synthetic construct
  source 1..609: mol_type = other DNA; note = Synthetic coding sequence
atgacaggcagcaacagccacatcaccatcctgaccctgaaggtgctgccccactttgagagcctgggcaagcaggagaagatccccaacaagatgtctgccttcaggaaccactgcccccacctggacagcgtgggggagatcaccaaggaggacctgatccagaagagcctgggcacctgccaggactgcaaggtgcagggccccaacctgtgggcctgcctggagaaccgctgcagctatgtgggctgtggggagagccaggtggaccacagcaccatccacagccaggagaccaagcactacctgactgtgaacctgaccaccctgcgggtgtggtgctacgcctgcagcaaggaggtgttcctggacaggaagctgggcacccagcccagcctgccccacgtgcggcagccccaccagatccaggagaacagcgtgcaggacttcaagatccccagcaacaccaccctgaagacccccctggtggccgtgtttgatgacctggacattgaagcagatgaggaggatgagctgcgggcccggggcctgaccggcctgaagaacatcggcaacacctgctacatgaatgctgccctgcaggcctag

SEQ ID NO: 22113 - DNA, 1443 bp, synthetic construct; identical to SEQ ID NO: 21609
  source 1..1443: mol_type = other DNA; note = Synthetic coding sequence

SEQ ID NO: 22114 - DNA, 309 bp, synthetic construct; identical to SEQ ID NO: 20332
  source 1..309: mol_type = other DNA; note = Synthetic coding sequence

SEQ ID NO: 22115 - DNA, 318 bp, synthetic construct
  source 1..318: mol_type = other DNA; note = Synthetic coding sequence
atgagccagagcggggctgtgtcctgctgccctggggccaccaacggcagcctgggccgcagtgatggagtggccaagatgagccccaaggacctgtttgagcagaggaagaagtacagcaacagcaatgtcatcatgcatgagaccagccagtaccacgtgcagcacctggccaccttcatcatggacaagtctgaggccatcacctctgtggatgatgccatcaggaagctggtgcagctgagcagcaaggagaagatctggacccaggagatgctgctgcaggtgaatgaccagagcctgcggctgctggactag

SEQ ID NO: 22116 - DNA, 222 bp, synthetic construct
  source 1..222: mol_type = other DNA; note = Synthetic coding sequence
atgtctgccttcaggaaccactgcccccacctggacagcgtgggggagatcaccaaggaggacctgatccagaagagcctgggcacctgccaggactgcaaggtgcagggccccaacctgtgggcctgcctggagaaccgctgcagctatgtgggctgtggggagagccaggtggaccacagcaccatccacagccaggagaccaagcactacctgacctag

SEQ ID NO: 22117 - DNA, 276 bp, synthetic construct
  source 1..276: mol_type = other DNA; note = Synthetic coding sequence
atggccatgacagtggtgaccaaggagaagaacaagaaggtgcccaccatcttcctgagcaagaagccccgggagaaggaggtggacagcaagagccaggtgattgagggcatcagccgcctcatctgcagcgccaagcagcagcagaccatgctgcgggtgtccattgatggagtggagtggagcgacatcaagttcttccagctggccgcccagtggcccacccacgtgaagcacttccctgtgggcctcttcagcggcagcaaggccacctag

SEQ ID NO: 22118 - DNA, 2535 bp, synthetic construct
  source 1..2535: mol_type = other DNA; note = Synthetic coding sequence
atgttctggaagtttgacctgcacagcagcagccacatcgacaccctgctggagcgggaggatgtgaccctgaaggagctgatggatgaagaagatgtgctgcaggagtgcaaggcccagaacaggaagctgattgagttcctgctgaaggccgagtgcctggaggacctggtgtccttcatcatcgaggagcccccccaggacatggatgagaagatccgctacaagtaccccaacatcagctgtgagctgctgaccagtgatgtgtcccagatgaatgaccggctgggggaggatgagagcctgctgatgaagctgtacagcttcctgctgaatgacagccccctgaaccccctgctggccagcttcttcagcaaggtgctgagcatcctgatcagcaggaagccagagcagatcgtggacttcctgaagaagaagcatgactttgtggacctgatcatcaagcacatcggcaccagcgccatcatggacctgctgctgcggctgctgacctgcatcgagcccccccagccccggcaggatgtgctgaactggctgaatgaggagaagatcatccagaggctggtggagatcgtgcaccccagccaggaggaggacagacacagcaatgccagccagagcctgtgtgagatcgtgcggctgagccgggaccagatgctgcagatccagaacagcacagagccagaccccctgctggccaccctggagaagcaggagatcatcgagcagctgctgagcaacatcttccacaaggagaagaatgaaagtgccatcgtgtctgccatccagatcctgctgaccctgctggagacccggcggcccacctttgagggccacatcgagatctgccccccaggcatgagccacagcgcctgcagcgtgaacaagtctgtgctggaggccatccggggccgcctgggcagcttccacgagctgctgctggagccccccaagaagtctgtgatgaagaccacctggggcgtgctggacccccctgtgggcaacacccggctgaatgtcatccgcctcatcagcagcctgctgcagaccaacaccagcagcatcaatggagacctgatggagctgaacagcattggagtcatcctgaacatgttcttcaagtacacctggaacaacttcctgcacacccaggtggagatctgcatcgccctgatcctggccagcccctttgaaaatacagaaaatgccaccatcacagaccaggacagcactggagacaacctgctgctgaagcacctgttccagaagtgccagctgattgaaagaatcctggaggcctgggagatgaatgagaagaagcaggccgagggcggcagaagacatggctacatgggccacctgacccgcatcgccaactgcatcgtgcacagcacagacaagggccccaacagcgccctggtgcagcagctgatcaaggacctgcctgatgaggtgcgggagcgctgggagaccttctgcaccagcagcctgggggagaccaacaagaggaacacagtggacctggccttcagtgactaccagatgcagcagatgaccagcaacttcatcgaccagtttggcttcaatgatgagaagtttgctgaccaggatgacattggaaatgtgtcctttgacagagtgtctgacatcaacttcaccctgaacaccaatgaaagtggcaacatcgccctgtttgaggcctgctgcaaggagcgcatccagcagtttgatgatggcggcagtgatgaggaggacatctgggaggagaagcacatcgccttcaccccagagagccagaggaggagcagcagcggcagcacagacagcgaggagagcacagacagcgaggaggaggatggagccaagcaggacctgtttgagcccagcagcgccaacacagaggacaagatggaggtggacctgtctgagccccccaactggagcgccaactttgatgtgcccatggagaccacccacggggcccccctggacagcgtgggcagtgatgtgtggagcacagaggagcccatgcccaccaaggagaccggctgggccagcttcagcgagttcaccagcagcctgagcaccaaggacagcctgcggagcaacagccctgtggagatggagaccagcacagagcccatggaccccctgacccccagcgctgctgccctggccgtgcagcctgaggccgccggctctgtggccatggaggccagcagtgatggagaggaggatgctgagagcacagacaaggtgacagaaacagtgatgaatggaggcatgaaggagaccctgagcctgactgtggatgccaagacagaaacagctgtgttcaagtctgaggagggcaagctgagcaccagccaggatgctgcctgcaaggatgctgaggagtgcccagagacagctgaggccaagtgtgccgccccccggccccccagcagcagccctgagcagaggacaggccagcccagcgcccctggggacacctctgtgaatggacctgtgtag

SEQ ID NO: 22119 - DNA, 2604 bp, synthetic construct
  source 1..2604: mol_type = other DNA; note = Synthetic coding sequence
atgttctggaagtttgacctgcacagcagcagccacatcgacaccctgctggagcgggaggatgtgaccctgaaggagctgatggatgaagaagatgtgctgcaggagtgcaaggcccagaacaggaagctgattgagttcctgctgaaggccgagtgcctggaggacctggtgtccttcatcatcgaggagcccccccaggacatggatgagaagatccgctacaagtaccccaacatcagctgtgagctgctgaccagtgatgtgtcccagatgaatgaccggctgggggaggatgagagcctgctgatgaagctgtacagcttcctgctgaatgacagccccctgaaccccctgctggccagcttcttcagcaaggtgctgagcatcctgatcagcaggaagccagagcagatcgtggacttcctgaagaagaagcatgactttgtggacctgatcatcaagcacatcggcaccagcgccatcatggacctgctgctgcggctgctgacctgcatcgagcccccccagccccggcaggatgtgctgaactggctgaatgaggagaagatcatccagaggctggtggagatcgtgcaccccagccaggaggaggacagacacagcaatgccagccagagcctgtgtgagatcgtgcggctgagccgggaccagatgctgcagatccagaacagcacagagccagaccccctgctggccaccctggagaagcaggagatcatcgagcagctgctgagcaacatcttccacaaggagaagaatgaaagtgccatcgtgtctgccatccagatcctgctgaccctgctggagacccggcggcccacctttgagggccacatcgagatctgccccccaggcatgagccacagcgcctgcagcgtgaacaagtctgtgctggaggccatccggggccgcctgggcagcttccacgagctgctgctggagccccccaagaagtctgtgatgaagaccacctggggcgtgctggacccccctgtgggcaacacccggctgaatgtcatccgcctcatcagcagcctgctgcagaccaacaccagcagcatcaatggagacctgatggagctgaacagcattggagtcatcctgaacatgttcttcaagtacacctggaacaacttcctgcacacccaggtggagatctgcatcgccctgatcctggccagcccctttgaaaatacagaaaatgccaccatcacagaccaggacagcactggagacaacctgctgctgaagcacctgttccagaagtgccagctgattgaaagaatcctggaggcctgggagatgaatgagaagaagcaggccgagggcggcagaagacatggctacatgggccacctgacccgcatcgccaactgcatcgtgcacagcacagacaagggccccaacagcgccctggtgcagcagctgatcaaggacctgcctgatgaggtgcgggagcgctgggagaccttctgcaccagcagcctgggggagaccaacaagaggaacacagtggacctggtgaccacctgccacatccacagcagcagtgatgatgaaattgacttcaaggagaccggcttcagccaggacagcagcctgcagcagatgcagcagatgaccagcaacttcatcgaccagtttggcttcaatgatgagaagtttgctgaccaggatgacattggaaatgtgtcctttgacagagtgtctgacatcaacttcaccctgaacaccaatgaaagtggcaacatcgccctgtttgaggcctgctgcaaggagcgcatccagcagtttgatgatggcggcagtgatgaggaggacatctgggaggagaagcacatcgccttcaccccagagagccagaggaggagcagcagcggcagcacagattctgaggagagcacagattctgaggaggaggatggagccaagcaggacctgtttgagcccagcagcgccaacacagaggacaagatggaggtggacctgtctgagccccccaactggagcgccaactttgatgtgcccatggagaccacccatggagcccccctggacagcgtgggcagtgatgtgtggagcacagaggagcccatgcccaccaaggagaccggctgggccagcttcagcgagttcaccagcagcctgagcaccaaggacagcctgcggagcaacagccctgtggagatggagaccagcacagagcccatggaccccctgaccccatctgctgctgccctggccgtgcagcctgaggccgccggctctgtggccatggaggccagcagtgatggagaagaagatgctgagagcacagacaaggtgacagagaccgtgatgaatggaggcatgaaggagaccctgagcctgactgtggatgccaagacagaaacagctgtgttcaagtctgaggagggcaagctgagcaccagccaggatgctgcctgcaaggatgctgaagaatgtcctgagacagctgaggccaagtgtgccgcccccaggcctcccagcagcagccctgagcagaggacaggccagcccagcgcccctggggacacctctgtgaatggacctgtgtag

SEQ ID NO: 22120 - DNA, 174 bp, synthetic construct
  source 1..174: mol_type = other DNA; note = Synthetic coding sequence
atgaccagcaagaagctggtgaacagcgtggccggctgtgctgatgatgccctggccggcctggtggcctgcaaccccaacctgcagctgctgcagggccaccgggtggccctgcggagtgacctggacagcctgaagggccgggtggccctgctgagcggcggcggcagctag

SEQ ID NO: 22121 - DNA, 2709 bp, synthetic construct; identical to SEQ ID NO: 18732
  source 1..2709: mol_type = other DNA; note = Synthetic coding sequence

SEQ ID NO: 22122 - DNA, 537 bp, synthetic construct
  source 1..537: mol_type = other DNA; note = Synthetic coding sequence
atgaacagaagaaggaagttcctgctggcctctgtgctggccctgcagaacagcagcttcatctaccccagctgccagaagtgcttcagccgcatcatcctggtgtccaagaggagcaactgccccaagtgtggcagcactggagagagcggaaatgccaactaccgctacaagctgagcctgaaggtggccgagagcaacaagctgtttgtgatcaccgtgtttggcagctgcctggacaccttcttcggcctgacagccaccggcctgcaccgctacatccaggaccccaacaagatccctgagaccctggacaatgacaccacccagaacctgctgaccaaggctgtggagacctgctttgtgggccagagcttcatcttcggcgtgaccaactttgagaaccagcccggccagggcagtgatgccagcaacttcctgcagcagtgcagcgaccacaagaggaaggccaaggccctggtggcctgccagatcgtgctgcctgaccctgccacccaggatgccaagaccaagtag

SEQ ID NO: 22123 - DNA, 441 bp, synthetic construct
  source 1..441: mol_type = other DNA; note = Synthetic coding sequence
atggtggccatggccgaggccgaggccggcgtggccgtggaggtgcggggcctgcccccagctgtgcctgatgagctgctgaccctgtactttgagaacagaagaagaagtggcggcggccctgtgctgtcctggcagaggctgggctgcggcggcgtgctgaccttccgggagccagcagatgctgagcgggtgctggcccaggccgaccacgagctgcacggggcccagctgagcctgcggcctgccccaccccgggccccagcccggctgctgctgcagggcctgcccccaggcaccaccccccagaggctggagcagcacgtgcaggccctgctgcgggccagcggcctgcctgtgcagccctgctgtgccctggccagccccaggccagaccgggccctggtgcagctgcccaagcccctgtctgaggccggctag

SEQ ID NO: 22124 - DNA, 348 bp, synthetic construct
  source 1..348: mol_type = other DNA; note = Synthetic coding sequence
atggccggccggcccctgcgcatcggggaccagctggtgctggaggaggactatgatgagacctacatccccagcgagcaggagatcctggagtttgcccgggagatcggcatcgaccccatcaaggagcctgagctgatgtggctggcccgggagggcatcgtggcccccctgcctggagagtggaagccctgccaggacatcactggagacatctactacttcaactttgccaacggccagagcatgtgggaccacccctgtgatgagcactaccgcagcctggtgatccaggagcgggccaagctgagcaccagcggggccatcaagaagaagaagaagaagtag

SEQ ID NO: 22125 - DNA, 1191 bp, synthetic construct
  source 1..1191: mol_type = other DNA; note = Synthetic coding sequence
atgaggaccagctacacagtgaccctgcctgaagatcctcctgctgcccccttccctgccctggccaaggagctgcggcccaggagccccctgagccccagcctgctgctgagcacctttgtgggcctgctgctgaacaaggccaagaacagcaagagcgcccagggcctggccggcctgaggaacctgggcaacacctgcttcatgaacagcatcctgcagtgcctgagcaacacccgggagctgcgggactactgcctgcagaggctgtacatgagggacctgcaccacggcagcaatgcccacacagccctggtggaggagtttgccaagctgatccagaccatctggaccagcagccccaatgatgtggtgagccccagcgagttcaagacccagatccagagatatgcccccaggtttgtgggctacaaccagcaggatgcccaggagttcctgcgcttcctgctggatggcctgcacaatgaggtgaacagagtgaccctgcggcccaagagcaaccctgagaacctggaccacctgcctgatgatgagaagggccggcagatgtggaggaagtacctggagcgggaggacagccgcatcggggacctgtttgtgggccagctgaagagcagcctgacctgcacagactgtggctactgcagcacagtgtttgaccccttctgggacctgagcctgcccatcgccaagaggggctacccagaggtgaccctgatggactgcatgaggctcttcaccaaggaggatgtgctggatggagatgagaagcccacctgctgccgctgccggggcaggaagcgctgcatcaagaagttcagcatccagcgcttccccaagatcctggtgctgcacctgaagcgcttcagcgagagccgcatccgcaccagcaagctgaccacctttgtgaacttccccctgcgggacctggacctgcgggagtttgccagcgagaacaccaaccacgctgtgtacaacctgtatgctgtgagcaaccacagcggcaccaccatgggcggccactacacagcctactgccgcagccctggcaccggggagtggcacaccttcaatgacagctctgtgacccccatgagcagcagccaggtgaggaccagtgatgcctacctgctcttctatgagctggccagcccccccagcaggatgtag

SEQ ID NO: 22126 - DNA, 633 bp, synthetic construct; identical to SEQ ID NO: 19581
  source 1..633: mol_type = other DNA; note = Synthetic coding sequence

SEQ ID NO: 22127 - DNA, 1428 bp, synthetic construct
  source 1..1428: mol_type = other DNA; note = Synthetic coding sequence
atggagctgtggcaggccgccctgagcaccctgaaccccaaccccacagacagctgccccctgtacctgaactatgccaccgtggccgccctgccctgccgggtgagccgccacaacagccccagcgctgcccacttcatcacccggctggtgaggacctgcctgcccccaggggcccaccgctgcatcgtgatggtgtgtgagcagcctgaggtgtttgccagcgcctgtgccctggcccgggccttccccctcttcacccacaggtctggggccagccggcggctggagaagaagacagtgacagtggagttcttcctggtgggccaggacaatggacctgtggaggtgtccaccctgcagtgcctggccaatgccacagatggagtgcggctggccgcccgcatcgtggacaccccctgcaatgagatgaacacagacaccttcctggaggagatcaacaaggtgggcaaggagctgggcatcatccccaccatcatcagagatgaggagctgaagacccggggctttggaggcatctatggagtgggcaaggccgccctgcaccccccagccctggccgtgctgagccacaccccagatggagccacccagaccatcgcctgggtgggcaagggcatcgtgtatgacaccggcggcctgagcatcaagggcaagaccaccatgcctggcatgaagagggactgtggcggcgctgctgctgtgctgggcgccttccgggccgccatcaagcagggcttcaaggacaacctgcatgctgtgttctgcctggccgagaacagcgtgggccccaatgccaccaggccagatgacatccacctgctgtacagcggcaagacagtggagatcaacaacacagatgctgagggccgcctggtgctggctgatggagtgtcctatgcctgcaaggacctgggcgctgacatcatcctggacatggccaccctgaccggggcccagggcatcgccaccgggaagtaccacgccgctgtgctgaccaacagcgctgagtgggaggccgcctgtgtgaaggccggcaggaaatgtggggacctggtgcaccccctggtgtactgcccagagctgcacttcagcgagttcaccagcgctgtggccgacatgaagaacagcgtggccgaccgggacaacagccccagcagctgtgccggcctcttcatcgccagccacatcggctttgactggccaggagtgtgggtgcacctggacattgctgcccctgtgcatgctggggagcgggccaccggcttcggcgtggccctgctgctggccctgtttggccgggccagcgaggaccccctgctgaacctggtgagccccctgggctgtgaggtggatgtggaggagggggacctgggccgggacagcaagagaagaaggctggtgtag

SEQ ID NO: 22128 - DNA, 537 bp, synthetic construct
  source 1..537: mol_type = other DNA; note = Synthetic coding sequence
atggtggccatggccgaggccgaggccggcgtggccgtggaggtgcggggcctgcccccagctgtgcctgatgagctgctgaccctgtactttgagaacagaagaagaagtggcggcggccctgtgctgtcctggcagaggctgggctgcggcggcgtgctgaccttccgggagccagcagatgctgagcgggtgctggcccaggccgaccacgagctgcacggggcccagctgagcctgcggcctgccccaccccgggccccagcccggctgctgctgcagggcctgcccccaggcaccaccccccagaggctggagcagcacgtgcaggccctgctgcgggccagcggcctgcctgtgcagccctgctgtgccctggccagccccaggccagaccgggccctggtgcagctgcccaagcccctgtctgaggctgatgtgcgggtgctggaggagcaggcccagaacctgggcctggagggcaccctggtgtccctggcccgggtgccccaggcccgggctgtgcgggtggtgtag

SEQ ID NO: 22129 - DNA, 1893 bp, synthetic construct
  source 1..1893: mol_type = other DNA; note = Synthetic coding sequence
atggagaaggtgctgggctgtgagctgctgaagggcctgaatgtgctggacctgggcctgaacatggagatcctggaggagcagatgctgcacgagatcctgtgccgggagtacccagagctggagacccgctggcaggacctgaagatccgggccctggacacctgcaaggctgtggaggccgctgaggagcggctgctgaccatgctgctcttccagaaccccaagaggcagaagccagccaagttcctgagaaatattgtgcgggcccagggcaagctgtgccagctgcgggcccactgtgaggagctggagggccagaagctgcaggagatggtgctgtgggccccctacagacctgtggtgtggcacggcatggccatggtgaaggccctgagccagctgcagaacctgctgcccctcttctgcatgagccctgagaactggctggccgtgaccaagcaggccctggacagcatgaagccccgggagatcaaccacggggaggacctggccagccacctgctgcagctgcgggcccacctgacccggcagctgctgggcagcacagtgacagccctgggcctgacccaggtgcccctggtgggcgccctgggcgccctggccctgctgcaggccaccgggaaggccagcgagctggagcggctggccctgtggccaggcctggccgccagccccagcacagtgcacagcaagcctgtgtctgatgtggcccggcctgcctggctgggccccaaggcctggcatgaatgtgagatgctggagctgctgcccccatttgtgggcctgtgtgccagcctggccggccacagcagcgcctggcaggcctacctgagcctgagcagcacagtgctgggccctgcccctggccctggccctgagcccctgagcctgctgcagaagctgatcctgtggagggtgctgcggcctgagtgcctggccggggccctggccgacttcaccaccagcctgctgggccggcccctggatgagaacacctacgcccccaccatgcccttcaagcacagccaggccacccagcccatgctgatcctgctgcccccacctggccaccccagcgccaccctgcaccccctgaccgtcatccagaagctggccgccaagtaccagcagggccagaagcagctgcaggtgattgccctgggcagcgaggcctgggaccctgtgtctgtggtggtgtccaccctgagccaggccatgtatgagggccactggctggtgctggacaactgccacctgatgccccactggcccaaggagctgctgcagctgctgctggagctgctgggccgggccaaggtggtggccgacctggagagcgagcagctgctggaccagcctgagagcagaaatgtgtccacagtgcaccgggacttccggctgtggctgattgtgcctgctgagagcagcgccagcctgcctgctgtgctgacccagcacagcatgcctgtgttctggaaccagagcctggagctgggccacgtgctgattgattctgtggagctggcccagcaggtgctgtacatgcagccccccacccaggccctgcccctgctgctgctgcacggcctgctgctgcaccggcagctgtatggcacccggctgcaggcccaccggggccgctggagccaggtgaccctgacccaggtgctgcagacccaggaccagctgtgggccagcctgagcaacccccgggccgccatgcaggagctggccggggagaccctgcccctgcccctgggcgtcatcagcccccaggagagcctggaggagggcggcggcggcatccagttcaccgccctggtgctggccgtggtggagacagagggcactggaacagagcggctgtag

SEQ ID NO: 22130 - DNA, 1488 bp, synthetic construct
  source 1..1488: mol_type = other DNA; note = Synthetic coding sequence
atggagctgcacggcggcaacagaggaggctaccagcccaaggccctggagcagagcggctgctggctgtggcaggccgccctgagcaccctgaaccccaaccccacagacagctgccccctgtacctgaactatgccaccgtggccgccctgccctgccgggtgagccgccacaacagccccagcgctgcccacttcatcacccggctggtgaggacctgcctgcccccaggggcccaccgctgcatcgtgatggtgtgtgagcagcctgaggtgtttgccagcgcctgtgccctggcccgggccttccccctcttcacccacaggtctggggccagccggcggctggagaagaagacagtgacagtggagttcttcctggtgggccaggacaatggacctgtggaggtgtccaccctgcagtgcctggccaatgccacagatggagtgcggctggccgcccgcatcgtggacaccccctgcaatgagatgaacacagacaccttcctggaggagatcaacaaggtgggcaaggagctgggcatcatccccaccatcatcagagatgaggagctgaagacccggggctttggaggcatctatggagtgggcaaggccgccctgcaccccccagccctggccgtgctgagccacaccccagatggagccacccagaccatcgcctgggtgggcaagggcatcgtgtatgacaccggcggcctgagcatcaagggcaagaccaccatgcctggcatgaagagggactgtggcggcgctgctgctgtgctgggcgccttccgggccgccatcaagcagggcttcaaggacaacctgcatgctgtgttctgcctggccgagaacagcgtgggccccaatgccaccaggccagatgacatccacctgctgtacagcggcaagacagtggagatcaacaacacagatgctgagggccgcctggtgctggctgatggagtgtcctatgcctgcaaggacctgggcgctgacatcatcctggacatggccaccctgaccggggcccagggcatcgccaccgggaagtaccacgccgctgtgctgaccaacagcgctgagtgggaggccgcctgtgtgaaggccggcaggaaatgtggggacctggtgcaccccctggtgtactgcccagagctgcacttcagcgagttcaccagcgctgtggccgacatgaagaacagcgtggccgaccgggacaacagccccagcagctgtgccggcctcttcatcgccagccacatcggctttgactggccaggagtgtgggtgcacctggacattgctgcccctgtgcatgctggggagcgggccaccggcttcggcgtggccctgctgctggccctgtttggccgggccagcgaggaccccctgctgaacctggtgagccccctgggctgtgaggtggatgtggaggagggggacctgggccgggacagcaagagaagaaggctggtgtag

SEQ ID NO: 22131 - DNA, 618 bp, synthetic construct
  source 1..618: mol_type = other DNA; note = Synthetic coding sequence
atggagacagacctgaacagccaggacaggaaggacctggacaagttcatcaagttctttgccctgaagacagtgcaggtgattgtgcaggcccggctgggggagaagatctgcaccaggagcagcagcagccccaccggcagtgactggttcaacctggccatcaaggacatccctgaggtgacccatgaggccaagaaggccctggccggccagctgcctgctgtgggccgctccatgtgtgtggagatcagcctgaagaccagcgagggggacagcatggagctggagatctggtgcctggagatgaatgagaagtgtgacaaggagatcaaggtgtcctacacagtgtacaaccggctgagcctgctgctgaagagcctgctggccatcaccagggtgaccccagcctaccgcctgagcaggaagcagggccacgagtatgtgatcctgtaccgcatctactttggagaggtgcagctgagcggcctgggggagggcttccagacagtgcgggtgggcaccgtgggcacccctgtgggcaccatcaccctgagctgtgcctaccgcatcaacctggccttcatgagcacccggcagtttgagaggaccccctag

SEQ ID NO: 22132 - DNA, 117 bp, synthetic construct
  source 1..117: mol_type = other DNA; note = Synthetic coding sequence
atggccgccttcaagctggacttcctgcctgagatgatggtggaccactgcagcctgaacagcagccctgtgtccaagaagatgaatggcaccctggaccacccagaccagccctag

SEQ ID NO: 22133 - DNA, 1554 bp, synthetic construct; identical to SEQ ID NO: 18881
  source 1..1554: mol_type = other DNA; note = Synthetic coding sequence

SEQ ID NO: 22134 - DNA, 768 bp, synthetic construct
  source 1..768: mol_type = other DNA; note = Synthetic coding sequence
atggagaggagcggccagagggtgaccacctgggactgtgaccagggcaagcacagcgacagcgcccagaagaatgaaagagagagcatccggcagaagctggccctgggcagcttctttgatgatggccctggcatctacaccagctgcagcaagagcggcaagcccagcctgagcagccggctgcagagcggcatgaacctgcagatctgctttgtgaatgacagcggcagtgacaaggacagtgatgctgatgacagcaagacagagaccagcctggacacccccctgagccccatgagcaagcagagcagcagctacagcgaccgggacaccacagaggaggagagcgagagcctggatgacatggacttcctgacccggcagaagaagctgcaggccgaggccaagatggccctggccatggccaagcccatggccaagatgcaggtggaggtggagaagcagaacaggaagaagagccctgtggccgacctgctgccccacatgccccacatcagtgaatgtctgatgaagaggagcctgaagcccacagacctgcgggacatgaccatcggccagctgcaggtgattgtgaatgacctgcacagccagatcgagagcctgaatgaggagctggtgcagctgctgctgatcagagatgagctgcacacagagcaggatgccatgctggtggacatcgaggacctgaccaggcatgctgagagccagcagaagcacatggccgagaagatgcctgccaagtag

SEQ ID NO: 22135 - DNA, 78 bp, synthetic construct
  source 1..78: mol_type = other DNA; note = Synthetic coding sequence
atgagccagagcggggctgtgtcctgctgccctggggccaccaacggcagcctgggccgcagtgatggagtggcctag

SEQ ID NO: 22136 - DNA, 360 bp, synthetic construct
  source 1..360: mol_type = other DNA; note = Synthetic coding sequence
atggtgctggagggcaaccctgaggtgggcagccccaggaccagtgacctgcagcaccggggcaacaagggcagctgtgtgctgagcagccctggagaagatgcccagcctggagaggagcccatcaagtacggggagctgattgtgctgggctgctgtgaggagggcggggaggagacagaggcccagagaggagaggtgacaggcccccgggcccacagctgctacaacggctgcctggccagcggggacaagggcagaagaagaagccggctggccctgagccgccgcagccacgccaatggagtgaagccagatgtgatgcaccacatcagcacccccctggtgtccaaggcctag

SEQ ID NO: 22137 - DNA, 348 bp, synthetic construct; identical to SEQ ID NO: 22124
  source 1..348: mol_type = other DNA; note = Synthetic coding sequence

SEQ ID NO: 22138 - DNA, 471 bp, synthetic construct
  source 1..471: mol_type = other DNA; note = Synthetic coding sequence
atgagctctgtgcagagccagcaggagcagctgagccagagcgaccccagccccagccccaacagctgcagcagctttgagctgattgacatggatgctggcagcctgtatgagcctgtgagcccccactggttctactgcaagatcatcgacagcaaggagacctggatccccttcaacagcgaggacagccagcagctggaggaggcctacagcagcggcaagggctgcaatggccgggtggtgcccacagatggcggccgctatgatgtgcacctgggggagaggatgagatatgctgtgtactgggatgagctggccagcgaggtgcggcgctgcacctggttctacaagggggacaaggacaacaagtatgtgccctacagcgagagcttcagccaggtgctggaggagacctacatgctggccgtgaccctggatgagtggaagaagaagctggagagcccctag

SEQ ID NO: 22139 - DNA, 14262 bp, synthetic construct; identical to SEQ ID NO: 18383
  source 1..14262: mol_type = other DNA; note = Synthetic coding sequence

SEQ ID NO: 22140 - DNA, 390 bp, synthetic construct
  source 1..390: mol_type = other DNA; note = Synthetic coding sequence
atggtggccatggccgaggccgaggccggcgtggccgtggaggtgcggggcctgcccccagctgtgcctgatgagctgctgaccctgtactttgagaacagaagaagaagtggcggcggccctgtgctgtcctggcagaggctgggctgcggcggcgtgctgaccttccgggagccagcagatgctgagcgggtgctggcccaggccgaccacgagctgcacggggcccagctgagcctgcggcctgccccaccccgggccccagcccggctgctgctgcagggcctgcccccaggcaccaccccccagaggctggagcagcacgtgcaggccctgctgcgggccagcggcctgcctgtgcagccctgctgtgccctggccagcccctag

SEQ ID NO: 22141 - DNA, 867 bp, synthetic construct
  source 1..867: mol_type = other DNA; note = Synthetic coding sequence
atggagcgggagcccagcgccagcgaggccgccccagctgctgctgccctgtttgcctggggcgccaacagctatggccagctgggcctgggccacaaggaggatgtgctgctgccccagcagctgaatgacttctgcaagcccaggtctgtgcggcgcatcactggaggcggcggccacagcgctgtggtgacagatggaggagacctgtttgtgtgtggcctgaacaaggatggccagctgggcctgggccacacagaggacatcccctacttcaccccctgcaagagcctgtttggctgccccatccagcaggtggcctgtggctgggacttcaccatcatgctgacagaaaatggccaggtgctgagctgtggcagcaacagctttggccagctgggcgtgccccacggcccccggcgctgtgtggtgccccaggccatcgagctgcacaaggagaaggtggtgtgcatcgccgccggcctgcggcatgctgtggccgccacagccagcggcatcgtgttccagtggggcaccggcctggccagctgtggccggcggctgtgccccggccagaccctgcccctcttcttcaccgccaaggagcccagccgggtgacaggcctggagaacagcaaggccatgtgtgtgctggccggcagtgaccacagcgccagcctgacagatgctggggaggtgtatgtgtggggcagcaacaagcacggccagctggccaatgaggccgccttcctgcctgtgccccagaagattgaggcccactgcttccagaatgagaaggtgacagccatctggagcggctggacccacctggtggcccagacaggcctgctgtggctgcgggcctag

SEQ ID NO: 22142 - DNA, 372 bp, synthetic construct
  source 1..372: mol_type = other DNA; note = Synthetic coding sequence
atgaacagaagaaggaagttcctgctggcctctgtgctggccctgcagaacagcagcttcatctaccccagctgccagaagtgcttcagccgcatcatcctggtgtccaagaggagcaactgccccaagtgtggcagcactggagagagcggaaatgccaactaccgctacaagctgagcctgaaggtggccgagagcaacaagctgtttgtgatcaccgtgtttggcagctgcctggacaccttcttcggcctgacagccaccggcctgcaccgctacatccaggaccccaacaagatccctgagaccctggacaatgacaccacccagaacctgctgaccaaggctgtggagacctgctttgtgggctag

SEQ ID NO: 22143 - DNA, 324 bp, synthetic construct
  source 1..324: mol_type = other DNA; note = Synthetic coding sequence
atgctgcggctgtacccaggccccatggtgacagaagctgagggcaagggcggccctgagatggccagcctgagcagctctgtggtgcctgtgtccttcatcagcaccctgcgggagagcgtgctggaccccggggtgggcggggagggcgccagtgacaagcagaggagcaagctgagcctgagccacagcatgatcccagctgccaagatccacacagagctgtgcctgcctgccttcttctccccagctggcacccagaggcgcttccagcagccccagcaccacctgaccctgagcatcatccacacagctgccaggtag

SEQ ID NO: 22144 - DNA, 1653 bp, synthetic construct
  source 1..1653: mol_type = other DNA; note = Synthetic coding sequence
atggagacagacctgaacagccaggacaggaaggacctggacaagttcatcaagttctttgccctgaagacagtgcaggtgattgtgcaggcccggctgggggagaagatctgcaccaggagcagcagcagccccaccggcagtgactggttcaacctggccatcaaggacatccctgaggtgacccatgaggccaagaaggccctggccggccagctgcctgctgtgggccgctccatgtgtgtggagatcagcctgaagaccagcgagggggacagcatggagctggagatctggtgcctggagatgaatgagaagtgtgacaaggagatcaaggtgtcctacacagtgtacaaccggctgagcctgctgctgaagagcctgctggccatcaccagggtgaccccagcctaccgcctgagcaggaagcagggccacgagtatgtgatcctgtaccgcatctactttggagaggtgcagctgagcggcctgggggagggcttccagacagtgcgggtgggcaccgtgggcacccctgtgggcaccatcaccctgagctgtgcctaccgcatcaacctggccttcatgagcacccggcagtttgagaggaccccacccatcatgggcatcatcatcgaccactttgtggaccggccctaccccagcagcagccccatgcacccctgcaactacagaacagctggggaggacaccggggtcatctaccccagcgtggaggacagccaggaggtgtgcaccaccagcttcagcaccagcccccccagccagtgtgtgttcaccgtgaccaaggcccacttccagacccccacccctgtggtgacagacaccctgcgggtgcccatggccggcctggccttcagccaccagctgagcagcagccggctgagctaccagcctgctgccctgggcgtgggcagcgctgacctggcctaccctgtggtgtttgctgctggcctgaatgccacccacccccaccagctgatggtgcctgggaaggagggcggcgtgcccctggcccccaaccagcctgtgcacggcacccaggccgaccaggagcggctggccacctgcacccccagcgacaggacccactgtgccgccacccccagcagcagcgaggacacagagaccgtgagcaacagcagcgagggccgggccagcccccatgatgtgctggagaccatctttgtgaggaaggtgggcgcctttgtgaacaagcccatcaaccaggtgaccctgaccagcctggacatcccctttgccatgtttgcccccaagaacctggagctggaggacacagaccccatggtgaaccccccagacagccctgagacagagagccccctgcagggcagcctgcacagtgatggcagcagcggcggcagcagcggcaacacccatgatgactttgtgatgattgacttcaagccagccttcagcaaggatgacatcctgcccatggacctgggcaccttctaccgggagttccagaaccccccccagctgagcagcctgagcattgacatcggggcccagagcatggccgaggacctggacagcctgcctgagaagctggccgtgcatgagaagaatgtgcgggagtttgatgcctttgtggagaccctgcagtag

SEQ ID NO: 22145 - DNA, 4104 bp, synthetic construct
  source 1..4104: mol_type = other DNA; note = Synthetic coding sequence
atgggcaacagcgacagccagtacaccctgcagggcagcaagaaccacagcaacaccatcactggagccaagcagatcccctgcagcctgaagatccggggcatccacgccaaggaggagaagagcctgcacggctggggccacggcagcaatggagctggctacaagagccgcagcctggcccggagctgcctgagccacttcaagagcaaccagccctatgccagccggctgggcggccccacctgcaaggtgtcccggggcgtggcctacagcacccacaggaccaatgcccctgggaaggacttccagggcatctctgctgccttcagcacagaaaatggcttccacagcgtgggccacgagctggccgacaaccacatcaccagccgggactgcaatggccacctgctgaactgctatggaagaaatgaaagcatcgccagcaccccacctggagaggacaggaagagcccccgggtgctgatcaagaccctgggcaagctggatggctgcctgcgggtggagttccacaatggaggcaaccccagcaaggtgcctgctgaggactgcagcgagcctgtgcagctgctgcgctacagccccaccctggccagcgagaccagccctgtgcctgaggcccggcggggcagcagcgctgacagcctgcccagccaccggcccagccccacagacagccggctgcggagcagcaagggcagcagcctgagcagcgagagctcctggtatgacagcccctggggcaatgctggggagctgtctgaggccgagggcagcttcctggcccctggcatgccagaccccagcctgcacgccagcttccccccaggagatgccaagaagcccttcaaccagagcagcagcctgagcagcctgcgggagctgtacaaggatgccaacctgggcagcctgagccccagcggcatccggctgagtgatgagtacatgggcacccacgccagcctgagcaacagagtgtcctttgccagtgacattgatgtgcccagccgggtggcccatggagaccccatccagtacagcagcttcaccctgccctgcaggaagcccaaggcctttgtggaggacacagccaagaaggacagcctgaaggccaggatgaggcgcatcagtgactggacaggcagcctgagcaggaagaagaggaagctgcaggagcccaggagcaaggagggcagtgactactttgacagcagaagtgatggcctgaacacagatgtgcagggcagcagccaggccagcgccttcctgtggagcggcggcagcacccagatcctgagccagaggtctgagagcacccacgccatcggcagtgaccccctgcggcagaacatctatgagaacttcatgagggagctggagatgagcaggaccaacacagagaacatcgagaccagcacagaaacagctgagagcagcagcgagagcctgagcagcctggagcagctggacctgctgtttgagaaggagcagggcgtggtgaggaaggccggctggctgttcttcaagcccctggtgacagtgcagaaggagaggaagctggagctggtggcccggaggaagtggaagcagtactgggtgaccctgaagggctgcaccctgctcttctatgagacctacggcaagaacagcatggaccagagcagcgccccccgctgtgccctgtttgctgaagattccatcgtgcagagcgtgcctgagcaccccaagaaggaaaatgtgttctgcctgagcaacagctttggagatgtgtacctgttccaggccaccagccagacagacctggagaactgggtgacagctgtgcacagcgcctgtgccagcctgtttgccaagaagcacggcaaggaggacaccctgcggctgctgaagaaccagaccaagaacctgctgcagaagattgacatggacagcaagatgaagaagatggccgagctgcagctgtctgtggtgtctgaccccaagaacaggaaggccatcgagaaccagatccagcagtgggagcagaacctggagaagttccacatggacctcttcaggatgcgctgctacctggccagcctgcagggcggggagctgcccaaccccaagagcctgctggccgccgccagccggcccagcaagctggccctgggccgcctgggcatcctgtctgtgagcagcttccacgccctggtgtgcagcagagatgattctgccctgaggaagaggaccctgagcctgacccagagaggaagaaacaagaagggcatcttcagcagcctgaagggcctggacaccctggccaggaagggcaaggagaagaggcccagcatcacccaggtggatgagctgctgcacatctacggcagcacagtggatggagtgccccgggacaatgcctgggagatccagacctacgtgcacttccaggacaaccacggcgtgacagtgggcatcaagccagagcaccgggtggaggacatcctgaccctggcctgcaagatgaggcagctggagcccagccactacggcctgcagctgaggaagctggtggatgacaacgtggagtactgcatcccagccccctatgagtacatgcagcagcaggtgtatgatgaaattgaggtgttccccctgaatgtgtatgatgtgcagctgaccaagacaggctctgtgtgtgactttggatttgctgtgacagcccaggtggatgagcggcagcacctgagccgcatcttcatcagtgatgtgctgcctgatggcctggcctatggagagggcctgaggaaaggaaatgagatcatgaccctgaatggagaggccgtgtctgacctggacctgaagcagatggaggccctcttcagcgagaagtctgtgggcctgaccctgattgcccggcccccagacaccaaggccaccctgtgcacctcctggagcgacagcgacctcttcagccgggaccagaagagcctgctgcccccacccaaccagagccagctgctggaggagttcctggacaacttcaagaagaacacagccaatgacttcagcaatgtgcctgacatcaccaccggcctgaagaggagccagacagatggcaccctggaccaggtgagccaccgggagaagatggagcagaccttccgctctgctgagcagatcacagccctgtgccgctccttcaatgacagccaggccaacggcatggagggcccccgggagaaccaggaccccccacccaggagcctggcccggcacctgagtgatgctgaccggctgaggaaggtgatccaggagctggtggacacagagaagagctatgtgaaggacctgagctgcctgtttgagctgtacctggagcccctgcagaatgagaccttcctgacccaggatgagatggagagcctgtttggcagcctgcctgagatgctggagttccagaaggtgttcctggagaccctggaggatggcatcagcgccagcagtgacttcaacaccctggagacccccagccagttcaggaagctgctcttcagcctgggcggcagcttcctgtactatgctgaccacttcaagctgtacagcggcttctgtgccaaccacatcaaggtgcagaaggtgctggagcgggccaagacagacaaggccttcaaggccttcctggatgccaggaaccccaccaagcagcacagcagcaccctggagagctacctgatcaagcctgtgcagagggtgctgaagtaccccctgctgctgaaggagctggtgtccctgacagaccaggagagcgaggagcactaccacctgacagaggccctgaaggccatggagaaggtggccagccacatcaatgagatgcagaagatctatgaggactatggcaccgtgtttgaccagctggtggccgagcagagcggcacagagaaggaggtgacagagctgtccatgggagagctgctgatgcacagcacagtgtcctggctgaaccccttcctgagcctgggcaaggccaggaaggacctggagctgactgtgtttgtgttcaagagagctgtgatcctggtgtacaaggagaactgctag

SEQ ID NO: 22146 - DNA, 45 bp, synthetic construct
  source 1..45: mol_type = other DNA; note = Synthetic coding sequence
atgaatggcaccctggaccacccagaccagcctgacctggactag

SEQ ID NO: 22147 - DNA, 519 bp, synthetic construct
  source 1..519: mol_type = other DNA; note = Synthetic coding sequence
atggtggccatggccgaggccgaggccggcgtggccgtggaggtgcggggcctgcccccagctgtgcctgatgagctgctgaccctgtactttgagaacagaagaagaagtggcggcggccctgtgctgtcctggcagaggctgggctgcggcggcgtgctgaccttccgggagccagcagatgctgagcgggtgctggcccaggccgaccacgagctgcacggggcccagctgagcctgcggcctgccccaccccgggccccagcccggctgctgctgcagggcctgcccccaggcaccaccccccagaggctggagcagcacgtgcaggccctgctgcgggccagcggcctgcctgtgcagccctgctgtgccctggccagccccaggccagaccgggccctggtgcagctgcccaagcccctgtctgaggctgatgtgcgggtgctggaggagcaggcccagaacctgggcctggagggcaccctggtgtccctggcccgggtgccccaggcctag

SEQ ID NO: 22148 - DNA, 27 bp, synthetic construct
  source 1..27: mol_type = other DNA; note = Synthetic coding sequence
atgttctggaagtttgacctgcactag

SEQ ID NO: 22149 - DNA, 411 bp, synthetic construct
  source 1..411: mol_type = other DNA; note = Synthetic coding sequence
atggtggccatggccgaggccgaggccggcgtggccgtggaggtgcggggcctgcccccagctgtgcctgatgagctgctgaccctgtactttgagaacagaagaagaagtggcggcggccctgtgctgtcctggcagaggctgggctgcggcggcgtgctgaccttccgggagccagcagatgctgagcgggtgctggcccaggccgaccacgagctgcacggggcccagctgagcctgcggcctgccccaccccgggccccagcccggctgctgctgcagggcctgcccccaggcaccaccccccagaggctggagcagcacgtgcaggccctgctgcgggccagcggcctgcctgtgcagccctgctgtgccctggccagccccaggccagaccgggccctggtgtag

SEQ ID NO: 22150 - DNA, 5844 bp, synthetic construct
  source 1..5844: mol_type = other DNA; note = Synthetic coding sequence
ggccggcccatcgacccccgggagggccctggccggccccccctggatggccgggaccacttcggccggccccctgtggacatccgggagaacctggtgcggcccggcatcgaccacctgggccggcgggaccacttcggcttcaaccctgagaagccctggggccacagaggagactttgatgagcgggagcaccgggtgctgcctgtgtatggaggccccaagggcctgcacgaggagcggggccgcttccgcagcggcaactacagatttgaccccaggagcggcccctggaacagaggcttcggccaggaggtgcaccgggactttgatgacagaagaagaccctgggagcggcagagggacagagatgaccgggactttgacttctgccgggagatgaatggaaaccggctgggccgggaccgcatccagaacacctgggtgcccccacctcatgcccgggtgtttgactactttgagggcgccaccagccagaggaagggggacaacgtgccccaggtgaatggagagaacacagaaagacatgcccagcccccacccatccctgtgcagaatgaccctgagctgtatgagaagctgaccagcagcaatgagatcaacaaggagaagagtgacacagtggccgacatcgagagcgagcctgtggtggagagcacagaaacagagggcacccccctgaccagcctgacagctgagacccggcggcaggtgaagatgggcaacagcgacagccagtacaccctgcagggcagcaagaaccacagcaacaccatcactggagccaagcagatcccctgcagcctgaagatccggggcatccacgccaaggaggagaagagcctgcacggctggggccacggcagcaatggagctggctacaagagccgcagcctggcccggagctgcctgagccacttcaagagcaaccagccctatgccagccggctgggcggccccacctgcaaggtgtcccggggcgtggcctacagcacccacaggaccaatgcccctgggaaggacttccagggcatctctgctgccttcagcacagaaaatggcttccacagcgtgggccacgagctggccgacaaccacatcaccagccgggactgcaatggccacctgctgaactgctatggaagaaatgaaagcatcgccagcaccccacctggagaggacaggaagagcccccgggtgctgatcaagaccctgggcaagctggatggctgcctgcgggtggagttccacaatggaggcaaccccagcaaggtgcctgctgaggactgcagcgagcctgtgcagctgctgcgctacagccccaccctggccagcgagaccagccctgtgcctgaggcccggcggggcagcagcgctgacagcctgcccagccaccggcccagccccacagacagccggctgcggagcagcaagggcagcagcctgagcagcgagagctcctggtatgacagcccctggggcaatgctggggagctgtctgaggccgagggcagcttcctggcccctggcatgccagaccccagcctgcacgccagcttccccccaggagatgccaagaagcccttcaaccagagcagcagcctgagcagcctgcgggagctgtacaaggatgccaacctgggcagcctgagccccagcggcatccggctgagtgatgagtacatgggcacccacgccagcctgagcaacagagtgtcctttgccagtgacattgatgtgcccagccgggtggcccatggagaccccatccagtacagcagcttcaccctgccctgcaggaagcccaaggcctttgtggaggacacagccaagaaggacagcctgaaggccaggatgaggcgcatcagtgactggacaggcagcctgagcaggaagaagaggaagctgcaggagcccaggagcaaggagggcagtgactactttgacagcagaagtgatggcctgaacacagatgtgcagggcagcagccaggccagcgccttcctgtggagcggcggcagcacccagatcctgagccagaggtctgagagcacccacgccatcggcagtgaccccctgcggcagaacatctatgagaacttcatgagggagctggagatgagcaggaccaacacagagaacatcgagaccagcacagaaacagctgagagcagcagcgagagcctgagcagcctggagcagctggacctgctgtttgagaaggagcagggcgtggtgaggaaggccggctggctgttcttcaagcccctggtgacagtgcagaaggagaggaagctggagctggtggcccggaggaagtggaagcagtactgggtgaccctgaagggctgcaccctgctcttctatgagacctacggcaagaacagcatggaccagagcagcgccccccgctgtgccctgtttgctgaagattccatcgtgcagagcgtgcctgagcaccccaagaaggaaaatgtgttctgcctgagcaacagctttggagatgtgtacctgttccaggccaccagccagacagacctggagaactgggtgacagctgtgcacagcgcctgtgccagcctgtttgccaagaagcacggcaaggaggacaccctgcggctgctgaagaaccagaccaagaacctgctgcagaagattgacatggacagcaagatgaagaagatggccgagctgcagctgtctgtggtgtctgaccccaagaacaggaaggccatcgagaaccagatccagcagtgggagcagaacctggagaagttccacatggacctcttcaggatgcgctgctacctggccagcctgcagggcggggagctgcccaaccccaagagcctgctggccgccgccagccggcccagcaagctggccctgggccgcctgggcatcctgtctgtgagcagcttccacgccctggtgtgcagcagagatgattctgccctgaggaagaggaccctgagcctgacccagagaggaagaaacaagaagggcatcttcagcagcctgaagggcctggacaccctggccaggaagggcaaggagaagaggcccagcatcacccaggtggatgagctgctgcacatctacggcagcacagtggatggagtgccccgggacaatgcctgggagatccagacctacgtgcacttccaggacaaccacggcgtgacagtgggcatcaagccagagcaccgggtggaggacatcctgaccctggcctgcaagatgaggcagctggagcccagccactacggcctgcagctgaggaagctggtggatgacaacgtggagtactgcatcccagccccctatgagtacatgcagcagcaggtgtatgatgaaattgaggtgttccccctgaatgtgtatgatgtgcagctgaccaagacaggctctgtgtgtgactttggatttgctgtgacagcccaggtggatgagcggcagcacctgagccgcatcttcatcagtgatgtgctgcctgatggcctggcctatggagagggcctgaggaaaggaaatgagatcatgaccctgaatggagaggccgtgtctgacctggacctgaagcagatggaggccctcttcagcgagaagtctgtgggcctgaccctgattgcccggcccccagacaccaaggccaccctgtgcacctcctggagcgacagcgacctcttcagccgggaccagaagagcctgctgcccccacccaaccagagccagctgctggaggagttcctggacaacttcaagaagaacacagccaatgacttcagcaatgtgcctgacatcaccaccggcctgaagaggagccagacagatggcaccctggaccaggtgagccaccgggagaagatggagcagaccttccgctctgctgagcagatcacagccctgtgccgctccttcaatgacagccaggccaacggcatggagggcccccgggagaaccaggaccccccacccaggagcctggcccggcacctgagtgatgctgaccggctgaggaaggtgatccaggagctggtggacacagagaagagctatgtgaaggacctgagctgcctgtttgagctgtacctggagcccctgcagaatgagaccttcctgacccaggatgagatggagagcctgtttggcagcctgcctgagatgctggagttccagaaggtgttcctggagaccctggaggatggcatcagcgccagcagtgacttcaacaccctggagacccccagccagttcaggaagctgctcttcagcctgggcggcagcttcctgtactatgctgaccacttcaagctgtacagcggcttctgtgccaaccacatcaaggtgcagaaggtgctggagcgggccaagacagacaaggccttcaaggccttcctggatgccaggaaccccaccaagcagcacagcagcaccctggagagctacctgatcaagcctgtgcagagggtgctgaagtaccccctgctgctgaaggagctggtgtccctgacagaccaggagagcgaggagcactaccacctgacagaggccctgaaggccatggagaaggtggccagccacatcaatgagatgcagaagatctatgaggactatggcaccgtgtttgaccagctggtggccgagcagagcggcacagagaaggaggtgacagagctgtccatgggagagctgctgatgcacagcacagtgtcctggctgaaccccttcctgagcctgggcaaggccaggaaggacctggagctgactgtgtttgtgttcaagagagctgtgatcctggtgtacaaggagaactgcaagctgaagaagaagctgcccagcaacagcaggcctgcccacaacagcacagacctggaccccttcaagttccgctggctgatccccatcagcgccctgcaggtgcggctgggcaacccagctggaacagagaacaacagcatctgggagctgatccacaccaagtcagaaattgagggccggcctgagaccatcttccagctgtgctgcagcgacagcgagagcaagaccaacatcgtgaaggtgatccgcagcatcctgcgggagaacttcagaagacacatcaagtgtgagctgcccctggagaagacctgcaaggaccggctggtgcccctgaagaacagagtgcctgtgtctgccaagctggccagcagccgcagcctgaaggtgctgaagaacagcagcagcaatgagtggacaggagagaccgggaagggcaccctgctggacagtgatgagggcagcctgagcagcggcacccagagcagcggctgccccacagctgagggccggcaggacagcaagagcaccagccctgggaagtacccccaccctggcctggccgactttgctgacaacctgatcaaggagagtgacatcctgagtgatgaagatgatgaccaccggcagacagtgaagcagggcagccccaccaaggacatcgagatccagttccagaggctgcgcatcagtgaagatcctgatgtgcaccctgaggccgagcagcagcccggccctgagagcggggagggccagaagggcggggagcagcccaagctggtgcggggccacttctgccccatcaagaggaaggccaacagcaccaagagggaccggggcaccctgctgaaggcccagatccgccaccagagcctggacagccagagtgaaaatgccaccatcgacctgaacagcgtgctggagcgggagttctctgtgcagagcctgacctctgtggtgtctgaggagtgcttctatgaaacagagagccacggcaagagctag

SEQ ID NO: 22151 - DNA, 294 bp, synthetic construct
  source 1..294: mol_type = other DNA; note = Synthetic coding sequence
atggaggccgcagatgccagccgcagcaatggcagcagccctgaggccagagatgcccggagccccagcggccccagcggcagcctggagaatggcaccaaggcagatggcaaggatgccaagaccaccaacggccacggcggggaggccgctgagggcaagagcctgggcagcgccctgaagccaggagagggccgcagcgccctgtttgctggaaatgagtggaggcggcccatcatccagtttgtggagagcggagatgacaagaacagcaactacttctccatggactag

SEQ ID NO: 22152 - DNA, 117 bp, synthetic construct
  source 1..117: mol_type = other DNA; note = Synthetic coding sequence
atggaggccgcagatgccagccgcagcaatggcagcagccctgaggccagagatgcccggagccccagcggccccagcggcagcctggagaatggcaccaaggcagatggcaagtag

SEQ ID NO: 22153 - DNA, 1455 bp, synthetic construct
  source 1..1455: mol_type = other DNA; note = Synthetic coding sequence
atggccatcggcaagaggctggccaccctgcccaccaaggagcagaagacccagaggctcatcagcgagctgagcctgctgaaccacaagctgcctgcccgggtgtggctgcccacagctggctttgaccaccacgtggtgcgggtgccccacacccaggccgtggtgctgaacagcaaggacaaggccccctacctgatctacgtggaggtgctggagtgtgaaaattttgacaccacctctgtgcctgcccgcatccctgagaaccgcatccgcagcaccaggtctgtggagaacctgcctgaatgtggcatcacccatgagcagagagctggcagcttcagcacagtgcccaactatgacaatgatgatgaggcctggagcgtggatgacatcggggagctgcaggtggagctgcctgaggtgcacaccaacagctgtgacaacatcagccagttctctgtggacagcatcaccagccaggagagcaaggagcccgtcttcatcgctgctggggacatcagaagaaggctgtctgagcagctggcccacacccccacagccttcaagagggaccctgaggaccccagcgctgtggccctgaaggagccctggcaggagaaggtgcggcgcatccgggagggcagcccctacggccacctgcccaactggaggctgctgagcgtcatcgtgaagtgtggagatgacctgcggcaggagctgctggccttccaggtgctgaagcagctgcagagcatctgggagcaggagcgggtgcccctgtggatcaagccctacaagatcctggtgatctctgctgacagcggcatgattgagcctgtggtgaatgctgtgtccatccaccaggtgaagaagcagagccagctgagcctgctggactacttcctgcaggagcacggcagctacaccacagaggccttcctgagcgcccagaggaactttgtgcagagctgtgccggctactgcctggtgtgctacctgctgcaggtgaaggacagacacaacggcaacatcctgctggatgctgagggccacatcatccacatcgactttggcttcatcctgagcagcagccccaggaacctgggctttgagaccagcgccttcaagctgaccacagaatttgtggatgtgatgggcggcctggatggagacatgttcaactactacaagatgctgatgctgcagggcctgattgctgccaggaagcacatggacaaggtggtgcagatcgtggagatcatgcagcagggcagccagctgccctgcttccacggcagcagcaccatccggaacctgaaggagcgcttccacatgtccatgacagaggagcagctgcagctgctggtggagcagatggtggatggctccatgaggagcatcaccaccaagctgtatgatggcttccagtacctgaccaacggcatcatgtag

SEQ ID NO: 22154 - DNA, 228 bp, synthetic construct
  source 1..228: mol_type = other DNA; note = Synthetic coding sequence
atggccatccccatcaccgtgctggactgtgacctgctgctgtatggccggggccacaggaccctggaccgcttcaagctggatgatgtgacagatgagtacctgatgtccatgtatggcttcccccggcagttcatctactacctggtggagctgctgggcgccaacctgagccggcccacccagaggagccgggccatcagccctgagacccaggtgctggcctag

SEQ ID NO: 22155 - DNA, 2754 bp, synthetic construct
  source 1..2754: mol_type = other DNA; note = Synthetic coding sequence
atggatggagctgctggccctggagatggccctgcccgggaggccctgcagagcctgagccagaggctgcgggtgcaggagcaggagatggagctggtgaaggccgccctggccgaggccctgcggctgctgcggctgcaggtgccccccagcagcctgcagggcagcggcaccccagcccctcctggggacagcctggccgcccctcctggcctgccccccacctgcacccccagcctggtgtcccggggcacccagacagaaacagaggtggagctgaagagcagccctggccccccaggcctgagcaatggccccccagccccccagggcgccagcgaggagcccagcggcacccagagcgagggcggcggcagcagcagcagtggagctggcagccctggccccccaggcatcctgcggcccctgcagcccccccagagagctgacaccccaagaagaaacagcagcagcagcagcagccccagcgagcggccccggcagaagctgagcaggaaggccatcagcagcgccaacctgctggtgcgcagcggcagcacagagagcagaggaggcaaggaccccctgagcagccctgggggccctggcagcagaagaagcaactacaacctggagggcatctctgtgaagatgttcctgcggggccggcccatcaccatgtacatccccagcggcatccgcagcctggaggagctgcccagcggccccccacctgagaccctgagcctggactgggtgtatggctaccggggccgggacagccgcagcaacctgtttgtgctgcggagcggggaggtggtgtacttcatcgcctgtgtggtggtgctgtacagacctgggggcggccctgggggccctgggggcggcggccagaggcactaccggggccacacagactgtgtgcgctgcctggccgtgcacccagatggagtgcgggtggccagcggccagacagctggggtggacaaggatggcaagcccctgcagcctgtggtgcacatctgggacagcgagaccctgctgaagctgcaggagatcggcctgggcgcctttgagcggggcgtgggcgccctggccttctctgctgctgaccagggcgccttcctgtgtgtggtggatgacagcaatgagcacatgctgtctgtgtgggactgcagccggggcatgaagctggccgagatcaagagcaccaatgattctgtgctggccgtgggcttcaacccccgggacagcagctgcatcgtgaccagcggcaagagccacgtgcacttctggaactggagcggaggagtgggcgtgcctggaaatggcaccctgaccaggaagcagggcgtgtttgggaagtacaagaagcccaagttcatcccctgctttgtgttcctgcctgatggagacatcctgactggagacagcgagggcaacatcctgacctggggccgcagccccagcgacagcaagaccccaggccggggcggggccaaggagacctacggcatcgtggcccaggcccacgcccacgagggcagcatctttgccctgtgcctgcggagagatggcaccgtgctgagcggcggcggccgggaccggcggctggtgcagtggggccctggcctggtggccctgcaggaggccgagatccctgagcactttggagctgtgcgggccatcgccgagggcctgggcagcgagctgctggtgggcaccaccaagaatgccctgctgcggggggacctggcccagggcttcagccctgtgatccagggccacacagatgagctgtggggcctgtgcacccaccccagccagaaccgcttcctgacctgtggccatgaccggcagctgtgcctgtgggatggagagagccacgccctggcctggagcattgacctgaaggagaccggcctgtgtgccgacttccaccccagcggggctgtggtggccgtgggcctgaacacaggccgctggctggtgctggacacagagacccgggagatcgtgtctgatgtgattgatggaaatgagcagctgtctgtggtgcgctacagcccagatggcctgtacctggccatcggcagccatgacaacgtcatctacatctacagcgtgtccagtgatggagccaagagcagcagatttggccgctgcatgggccacagcagcttcatcacccacctggactggagcaaggatggcaacttcatcatgagcaacagcggggactatgagatcctgtactgggatgtggccggcggctgcaagcagctgaagaacagatatgagagccgggaccgggagtgggccacctacacctgtgtgctgggcttccacgtgtatgtgcctgtgcgcagctgccagggcgctgagccccacgtgcggggcccccggcagccccgggaccagaggcccatccacgcccggcggctggccccccggctggccggccggcagggccggcagcacctgcctgtggccagcgctggccgctggggccgcggggccggggcccggcatgccctgagcaaccccctgcctgtgccccggctgctgccccggcggctgattgctgcctggagggaccggctggccaggagaagaggccctgccccaccctgccccagcctggcccagagccccaccacccggggccgcctcttccctggcctgaccagccgccacagccgcagccgcatcttcctggagggcgccaacggggccccagcccacacagtgtag

SEQ ID NO: 22156 - DNA, 321 bp, synthetic construct
  source 1..321: mol_type = other DNA; note = Synthetic coding sequence
atggtggccatggccgaggccgaggccggcgtggccgtggaggtgcggggcctgcccccagctgtgcctgatgagctgctgaccctgtactttgagaacagaagaagaagtggcggcggccctgtgctgtcctggcagaggctgggctgcggcggcgtgctgaccttccgggagccagcagatgctgagcgggtgctggcccaggccgaccacgagctgcacggggcccagctgagcctgcggcctgccccaccccgggccccagcccggctgctgctgcagggcctgcccccaggcaccaccccccagaggctggagtag

SEQ ID NO: 22157 - DNA, 228 bp, synthetic construct
  source 1..228: mol_type = other DNA; note = Synthetic coding sequence
atgttctggaagtttgacctgcacagcagcagccacatcgacaccctgctggagcgggaggatgtgaccctgaaggagctgatggatgaagaagatgtgctgcaggagtgcaaggcccagaacaggaagctgattgagttcctgctgaaggccgagtgcctggaggacctggtgtccttcatcatcgaggagcccccccaggacatggatgagaagatccgctactag

SEQ ID NO: 22158 - DNA, 1275 bp, synthetic construct; identical to SEQ ID NO: 20975
  source 1..1275: mol_type = other DNA; note = Synthetic coding sequence

SEQ ID NO: 22159 - DNA, 288 bp, synthetic construct
  source 1..288: mol_type = other DNA; note = Synthetic coding sequence
atggaggccgcagatgccagccgcagcaatggcagcagccctgaggccagagatgcccggagccccagcggccccagcggcagcctggagaatggcaccaaggcagatggcaaggatgccaagaccaccaacggccacggcggggaggccgctgagggcaagagcctgggcagcgccctgaagccaggagagggccgcagcgccctgtttgctggaaatgagtggaggcggcccatcatccagtttgtggagagcggagatgacaagaacagcaactacttctcctag

SEQ ID NO: 22160 - DNA, 3144 bp, synthetic construct
  source 1..3144: mol_type = other DNA; note = Synthetic coding sequence
atggccccccggctgcagctggagaaggccgcctggcgctgggccgagaccgtgcggcctgaggaggtgtcccaggagcacatcgagacagcctaccgcatctggctggagccctgcatccggggcgtgtgcagaagaaactgcaagggcaaccccaactgcctggtgggcatcggggagcacatctggctgggggagattgatgaaaattccttccacaacattgatgaccccaactgtgagaggaggaagaagaacagctttgtgggcctgaccaacctgggcgccacctgctacgtgaacaccttcctgcaggtgtggttcctgaacctggagctgcggcaggccctgtacctgtgccccagcacctgcagcgactacatgctgggagatggcatccaggaggagaaggactatgagccccagaccatctgtgagcacctgcagtacctgtttgccctgctgcagaacagcaacagacgctacatcgaccccagcggctttgtgaaggccctgggcctggacaccggccagcagcaggatgcccaggagttcagcaagctgttcatgagcctgctggaggacaccctgagcaagcagaagaacccagatgtgaggaacatcgtgcagcagcagttctgtggggagtatgcctacgtgacagtgtgcaaccagtgtggccgggagagcaagctgctgagcaagttctatgagctggagctgaacatccagggccacaagcagctgacagactgcatcagcgagttcctgaaggaggagaagctggagggggacaaccgctacttctgtgagaactgccagagcaagcagaatgccaccaggaagatccggctgctgagcctgccctgcaccctgaacctgcagctgatgagatttgtgtttgaccggcagacaggccacaagaagaagctgaacacctacatcggcttcagcgagatcctggacatggagccctacgtggagcacaagggcggcagctatgtgtatgagctgtctgctgtgctgatccaccggggcgtgtctgcctacagcggccactacatcgcccacgtgaaggacccccagagcggggagtggtacaagttcaatgatgaggacatcgagaagatggagggcaagaagctgcagctgggcatcgaggaggacctggagcccagcaagagccagaccaggaagcccaagtgtgggaagggcacccactgcagcagaaatgcctacatgctggtgtaccgcctgcagacccaggagaagcccaacaccaccgtgcaggtgcctgccttcctgcaggagctggtggaccgggacaacagcaagtttgaggagtggtgcatcgagatggccgagatgaggaagcagagcgtggacaagggcaaggccaagcatgaggaggtgaaggagctgtaccagaggctgcctgctggagctgagccctatgaatttgtgtccctggagtggctgcagaagtggctggatgagagcacccccaccaagcccatcgacaaccacgcctgcctgtgcagccatgacaagctgcacccagacaagatcagcatcatgaagaggatcagtgaatatgctgctgacatcttctacagccgctatggaggcggcccccggctgactgtgaaggccctgtgcaaggaatgtgtggtggagcgctgccgcatcctgcggctgaagaaccagctgaatgaagactacaagacagtgaacaacctgctgaaggctgctgtgaagggcagtgatggcttctgggtgggcaagagcagcctgcgctcctggaggcagctggccctggagcagctggatgagcaggatggagatgctgagcagagcaatggcaagatgaatggcagcaccctgaacaaggatgagagcaaggaggagaggaaggaggaggaggagctgaacttcaatgaagacatcctgtgcccccatgctgtgttcttcttcagcaagtacatcttcctgaacagcggggagctgtgcatcagtgaaaatgaaagaaggctggtgtccaaggaggcctggagcaagctgcagcagtacttccccaaggcccctgagttccccagctacaaggagtgctgcagccagtgcaagatcctggagcgggagggggaggagaatgaggccctgcacaagatgattgccaatgagcagaagaccagcctgcccaacctcttccaggacaagaaccggccctgcctgagcaactggccagaggacacagatgtgctgtacatcgtgtcccagttctttgtggaggagtggaggaagtttgtgaggaagcccacccgctgcagccctgtgtcctctgtgggcaacagcgccctgctgtgcccccacggcggcctgatgttcacctttgcctccatgaccaaggaggacagcaagctgattgccctgatctggcccagcgagtggcagatgatccagaagctgtttgtggtggaccacgtgatcaagatcacccgcatcgaggtgggagatgtgaaccccagcgagacccagtacatcagcgagcccaagctgtgcccagaatgtcgggagggcctgctgtgccagcagcagagggacctgcgggagtacacccaggccaccatctacgtgcacaaggtggtggacaacaagaaggtgatgaaggacagcgcccctgagctgaatgtgagcagcagcgagacagaggaggacaaggaggaggccaagccagatggagagaaggaccctgacttcaaccagagcaatggaggcaccaagaggcagaagatcagccaccagaactacatcgcctaccagaagcaggtgatcagaagatccatgaggcacaggaaggtgcggggggagaaggccctgctggtgtctgccaaccagaccctgaaggagctgaagatccagatcatgcacgccttctctgtggccccctttgaccagaacctgagcattgatggcaagatcctgagtgatgactgtgccaccctgggcaccctgggcgtcatccctgagagcgtcatcctgctgaaggcagatgagcccatcgctgactatgctgccatggatgatgtgatgcaggtgtgcatgcctgaggagggcttcaagggcaccggcctgctgggccactag

SEQ ID NO: 22161 - DNA, 1443 bp, synthetic construct; identical to SEQ ID NO: 21609
  source 1..1443: mol_type = other DNA; note = Synthetic coding sequence

SEQ ID NO: 22162 - DNA, 2376 bp, synthetic construct
  source 1..2376: mol_type = other DNA; note = Synthetic coding sequence
atgttctggaagtttgacctgcacagcagcagccacatcgacaccctgctggagcgggaggatgtgaccctgaaggagctgatggatgaagaagatgtgctgcaggagtgcaaggcccagaacaggaagctgattgagttcctgctgaaggccgagtgcctggaggacctggtgtccttcatcatcgaggagcccccccaggacatggatgagaagatccgctacaagtaccccaacatcagctgtgagctgctgaccagtgatgtgtcccagatgaatgaccggctgggggaggatgagagcctgctgatgaagctgtacagcttcctgctgaatgacagccccctgaaccccctgctggccagcttcttcagcaaggtgctgagcatcctgatcagcaggaagccagagcagatcgtggacttcctgaagaagaagcatgactttgtggacctgatcatcaagcacatcggcaccagcgccatcatggacctgctgctgcggctgctgacctgcatcgagcccccccagccccggcaggatgtgctgaactggctgaatgaggagaagatcatccagaggctggtggagatcgtgcaccccagccaggaggaggacagacacagcaatgccagccagagcctgtgtgagatcgtgcggctgagccgggaccagatgctgcagatccagaacagcacagagccagaccccctgctggccaccctggagaagcaggagatcatcgagcagctgctgagcaacatcttccacaaggagaagaatgaaagtgccatcgtgtctgccatccagatcctgctgaccctgctggagacccggcggcccacctttgagggccacatcgagatctgccccccaggcatgagccacagcgcctgcagcgtgaacaagtctgtgctggaggccatccggggccgcctgggcagcttccacgagctgctgctggagccccccaagaacatgttcttcaagtacacctggaacaacttcctgcacacccaggtggagatctgcatcgccctgatcctggccagcccctttgagaacacagaaaatgccaccatcacagaccaggacagcactggagacaacctgctgctgaagcacctgttccagaagtgccagctgattgagcgcatcctggaggcctgggagatgaatgagaagaagcaggccgagggcggccgccgccacggctacatgggccacctgaccagaattgccaactgcatcgtgcacagcacagacaagggccccaacagcgccctggtgcagcagctgatcaaggacctgcctgatgaggtgcgggagcgctgggagaccttctgcaccagcagcctgggggagaccaacaagaggaacacagtggacctggccttcagtgactaccagatgcagcagatgaccagcaacttcatcgaccagtttggcttcaatgatgagaagtttgctgaccaggatgacattggaaatgtgtcctttgacagagtgtctgacatcaacttcaccctgaacaccaatgaaagtggcaacatcgccctgtttgaggcctgctgcaaggagcgcatccagcagtttgatgatggcggcagtgatgaggaggacatctgggaggagaagcacatcgccttcaccccagagagccagaggaggagcagcagcggcagcacagattctgaggagagcacagattctgaggaggaggatggagccaagcaggacctgtttgagcccagcagcgccaacacagaggacaagatggaggtggacctgtctgagccccccaactggagcgccaactttgatgtgcccatggagaccacccatggagcccccctggacagcgtgggcagtgatgtgtggagcacagaggagcccatgcccaccaaggagaccggctgggccagcttcagcgagttcaccagcagcctgagcaccaaggacagcctgcggagcaacagccctgtggagatggagaccagcacagagcccatggaccccctgaccccatctgctgctgccctggccgtgcagcctgaggccgccggctctgtggccatggaggccagcagtgatggagaagaagatgctgagagcacagacaaggtgacagagaccgtgatgaatggaggcatgaaggagaccctgagcctgactgtggatgccaagacagaaacagctgtgttcaagtctgaggagggcaagctgagcaccagccaggatgctgcctgcaaggatgctgaagaatgtcctgagacagctgaggccaagtgtgccgcccccaggcctcccagcagcagccctgagcagagcggcgtggagatcccagccctgcccggccagtggagccagcagtag

SEQ ID NO: 22163 - DNA, 1500 bp, synthetic construct
  source 1..1500: mol_type = other DNA; note = Synthetic coding sequence
atgtttggagatgccagcaccagcctggtggtgcctgagaaggtgaagacccccatgaagagcagcaagacagacctgcagggcagcgccagccccagcaaggtggagggcgtgcacaccccccggcagaagaggagcacccccctgaaggagcggcagctgagcaagcccctgtctgagaggaccaacagcagtgacagcgagaggagcccagacctgggccacagcacccagatccccaggaaggtggtgtatgaccagctgaaccagatcctggtgtctgatgctgccctgcctgaaaatgtcatcctggtgaacaccacagactggcagggccagtatgtggccgagctgctgcaggaccagaggaagcctgtggtgtgcacctgcagcacagtggaggtgcaggccgtgctgagcgccctgctgacccgcatccagcgctactgcaactgcaacagctccatgcccaggcctgtgaaggtggccgctgtgggcggccagagctacctgagcagcatcctgcgcttctttgtgaagagcctggccaacaagaccagtgactggctgggctacatgaggttcctgatcatccccctgggcagccaccctgtggccaagtacctgggctctgtggacagcaagtacagcagcagcttcctggacagcggctggagggacctcttcagccgctctgagccccctgtgtctgagcagctggatgtggccggccgggtgatgcagtatgtgaatggagctgccaccacccaccagctgcctgtggccgaggccatgctgacctgccgccacaagttcccagatgaagattcctaccagaagttcatccccttcatcggcgtggtgaaggtgggcctggtggaggacagccccagcacagctggagatggagatgacagccctgtggtgtccctgactgtgcccagcaccagcccccccagcagcagcggcctgagcagagatgccacagccaccccacccagcagccccagcatgagcagcgccctggccatcgtgggcagccccaacagcccctatggagatgtgattggcctgcaggtggactactggctgggccaccctggagagaggagaagagaaggagacaagagagatgccagcagcaagaacaccctgaagtctgtgttccgctctgtgcaggtgtcccggctgccccacagcggggaggcccagctgagcggcaccatggccatgacagtggtgaccaaggagaagaacaagaaggtgcccaccatcttcctgagcaagaagccccgggagaaggaggtggacagcaagagccaggtgattgagggcatcagccgcctcatctgcagcgccaagcagcagcagaccatgctgcgggtgtccattgatggagtggagtggagcgacatcaagttcttccagctggccgcccagtggcccacccacgtgaagcacttccctgtgggcctcttcagcggcagcaaggccacctag

SEQ ID NO: 22164 - DNA, 435 bp, synthetic construct
  source 1..435: mol_type = other DNA; note = Synthetic coding sequence
atggtggccatggccgaggccgaggccggcgtggccgtggaggtgcggggcctgcccccagctgtgcctgatgagctgctgaccctgtactttgagaacagaagaagaagtggcggcggccctgtgctgtcctggcagaggctgggctgcggcggcgtgctgaccttccgggagccagcagatgctgagcgggtgctggcccaggccgaccacgagctgcacggggcccagctgagcctgcggcctgccccaccccgggccccagcccggctgctgctgcagggcctgcccccaggcaccaccccccagaggctggagcagcacgtgcaggccctgctgcgggccagcggcctgcctgtgcagccctgctgtgccctggccagccccaggccagaccgggccctggtgcagctgcccaagcccctgtctgagtag

SEQ ID NO: 22165 - DNA, 513 bp, synthetic construct; identical to SEQ ID NO: 18990
  source 1..513: mol_type = other DNA; note = Synthetic coding sequence

SEQ ID NO: 22166 - DNA, 270 bp, synthetic construct
  source 1..270: mol_type = other DNA; note = Synthetic coding sequence
atggtggccatggccgaggccgaggccggcgtggccgtggaggtgcggggcctgcccccagctgtgcctgatgagctgctgaccctgtactttgagaacagaagaagaagtggcggcggccctgtgctgtcctggcagaggctgggctgcggcggcgtgctgaccttccgggagccagcagatgctgagcgggtgctggcccaggccgaccacgagctgcacggggcccagctgagcctgcggcctgccccaccccgggccccagcctag

SEQ ID NO: 22167 - DNA, 1206 bp, synthetic construct
  source 1..1206: mol_type = other DNA; note = Synthetic coding sequence
atgtgtgtggagatcagcctgaagaccagcgagggggacagcatggagctggagatctggtgcctggagatgaatgaaaaatgtgacaaggagatcaaggtgtcctacacagtgtacaaccggctgagcctgctgctgaagagcctgctggccatcaccagggtgaccccagcctaccgcctgagcaggaagcagggccatgaatatgtgatcctgtaccgcatctactttggagaggtgcagctgagcggcctgggggagggcttccagacagtgcgggtgggcaccgtgggcacccctgtgggcaccatcaccctgagctgtgcctaccgcatcaacctggccttcatgagcacccggcagtttgagaggaccccacccatcatgggcatcatcatcgaccactttgtggaccggccctaccccagcagcagccccatgcacccctgcaactacagaacagctggagaagatactggagtcatctaccccagcgtggaggacagccaggaggtgtgcaccaccagcttcagcaccagcccccccagccagctgatggtgcctgggaaggagggcggcgtgcccctggcccccaaccagcctgtgcacggcacccaggccgaccaggagcggctggccacctgcacccccagcgacaggacccactgtgccgccacccccagcagcagcgaggacacagaaacagtgagcaacagcagcgagggccgggccagcccccatgatgtgctggagaccatctttgtgaggaaggtgggcgcctttgtgaacaagcccatcaaccaggtgaccctgaccagcctggacatcccctttgccatgtttgcccccaagaacctggagctggaggacacagaccccatggtgaaccccccagacagccctgagacagagagccccctgcagggcagcctgcacagtgatggcagcagcggcggcagcagcggcaacacccatgatgactttgtgatgattgacttcaagccagccttcagcaaggatgacatcctgcccatggacctgggcaccttctaccgggagttccagaaccccccccagctgagcagcctgagcattgatattggagcccagagcatggccgaggacctggacagcctgcctgagaagctggccgtgcatgagaagaatgtgcgggagtttgatgcctttgtggagaccctgcagtag

SEQ ID NO: 22168 - DNA, 2148 bp, synthetic construct; identical to SEQ ID NO: 18953
  source 1..2148: mol_type = other DNA; note = Synthetic coding sequence

SEQ ID NO: 22169 - DNA, 336 bp, synthetic construct
  source 1..336: mol_type = other DNA; note = Synthetic coding sequence
atgacaggcagcaacagccacatcaccatcctgaccctgaaggtgctgccccactttgagagcctgggcaagcaggagaagatccccaacaagatgtctgccttcaggaaccactgcccccacctggacagcgtgggggagatcaccaaggaggacctgatccagaagagcctgggcacctgccaggactgcaaggtgcagggccccaacctgtgggcctgcctggagaaccgctgcagctatgtgggctgtggggagagccaggtggaccacagcaccatccacagccaggagaccaagcactacctgactgtgaacctgaccaccctgaggtag

SEQ ID NO: 22170 - DNA, 228 bp, synthetic construct
  source 1..228: mol_type = other DNA; note = Synthetic coding sequence
atggccggccaggaggaccctgtgcagcgggagatccaccaggactgggccaaccgggagtacatcgagatcatcaccagcagcatcaagaagattgctgacttcctgaacagctttgacatgagctgccgcagccggctggccaccctgaatgagaagctgacagccctggagaggagaattgagtacatcgaggcccgggtgaccaagggggagaccctgacctag

SEQ ID NO: 22171 - DNA, 348 bp, synthetic construct; identical to SEQ ID NO: 18978
  source 1..348: mol_type = other DNA; note = Synthetic coding sequence

SEQ ID NO: 22172 - DNA, 1077 bp, synthetic construct; identical to SEQ ID NO: 20583
  source 1..1077: mol_type = other DNA; note = Synthetic coding sequence

SEQ ID NO: 22173 - DNA, 4047 bp, synthetic construct
  source 1..4047: mol_type = other DNA; note = Synthetic coding sequence
atggctgacacagacctcttcatggagtgtgaggaggaggagctggagccctggcagaagatcagtgatgtgattgaggacagcgtggtggaggactacaacagcgtggacaagaccaccacagctggcaaccccctggtgcagcagggcggccagcccctcatcctgacccagaacccagcccctggcctgggcaccatggtgacccagcctgtgctgcggcctgtgcaggtgatgcagaatgccaaccacgtgaccagcagccctgtggccagccagcccatcttcatcaccacccagggcttccctgtgagaaatgtgcggcctgtgcagaatgccatgaaccaggtgggcatcgtgctgaatgtgcagcagggccagacagtgcggcccatcaccctggtgcctgcccctggcacccagtttgtgaagcccaccgtgggcgtgccccaggtgttcagccagatgacccctgtgcggcccggcagcaccatgcctgtgcggcccaccaccaacaccttcaccaccgtcatcccagccaccctgaccatccgcagcacagtgccccagagccagagccagcagaccaagagcacccccagcaccagcaccacccccacagccacccagcccaccagcctgggccagctggccgtgcagagccctggccagagcaaccagaccaccaaccccaagctggtgtccatcgccagctttgtgacagtgaagaggcctggggtgactggagagaacagcaatgaggtggccaagctggtgaacaccctgaacaccatccccagcctgggccagagccctggccctgtggtggtgagcaacaacagcagcgcccacggcagccagaggaccagcggccctgagagctccatgaaggtgaccagcagcatccctgtgtttgacctgcaggacggcggcaggaagatctgcccccgctgcaatgcccagttccgggtgacagaggccctgcggggccacatgtgctactgctgcccagagatggtggagtaccagaagaagggcaagagcctggacagcgagcccagcgtgcccagcgctgccaagccacccagccctgagaagacagcccctgtggccagcacccccagcagcacccccatcccagccctgagcccccccaccaaggtgcctgagcccaatgaaaatgtgggagatgctgtgcagaccaagctgatcatgctggtggatgacttctactacggcagagatggcggcaaggtggcccagctgaccaacttccccaaggtggccaccagcttccgctgcccccactgcaccaagaggctgaagaacaacatccgcttcatgaaccacatgaagcaccacgtggagctggaccagcagaatggagaggtggatggccacaccatctgccagcactgctaccggcagttcagcacccccttccagctgcagtgccacctggagaatgtgcacagcccctatgagagcaccaccaagtgcaagatctgtgagtgggcctttgaaagtgagcccctcttcctgcagcacatgaaggacacccacaagccaggagagatgccctacgtgtgccaggtgtgccagtaccgcagcagcctgtacagcgaggtggatgtgcacttcaggatgattcatgaggacaccaggcacctgctgtgcccctactgcctgaaggtgttcaagaatggaaatgccttccagcagcactacatgaggcaccagaagagaaatgtgtaccactgcaacaagtgccgcctgcagttcctgtttgccaaggacaagattgagcacaagctgcagcaccacaagaccttcaggaagcccaagcagctggagggcctgaagccaggcaccaaggtgaccatccgggccagccggggccagcccaggacagtgcctgtgagcagcaatgacaccccacccagcgccctgcaggaggccgcccccctgaccagctccatggaccccctgcccgtcttcctgtacccacctgtgcagaggagcatccagaagagagctgtgaggaagatgtctgtgatgggccggcagacctgcctggagtgcagctttgagatcccagacttccccaaccacttccccacctacgtgcactgcagcctgtgccgctacagcacctgctgcagccgggcctatgccaaccacatgatcaacaaccacgtgcccaggaagagccccaagtacctggccctcttcaagaacagcgtgtctggcatcaagctggcctgcaccagctgcacctttgtgacctctgtgggagatgccatggccaagcacctggtgttcaaccccagccacaggagcagcagcatcctgccccggggcctgacctggatcgcccacagccgccacggccagacccgggacagagtgcatgacagaaatgtgaagaacatgtaccccccacccagcttccccaccaacaaggccgccaccgtgaagtctgctggggccaccccagctgagcctgaggagctgctgacccccctggccccagccctgcccagccctgccagcacagccaccccaccacccacccccacccacccccaggccctggccctgccccccctggccacagagggcgctgagtgcctgaatgtggatgaccaggatgagggcagccctgtgacccaggagcctgagctggccagcggcggcggcggcagcggcggcgtgggcaagaaggagcagctgtctgtgaagaagctgcgggtggtgctgtttgccctgtgctgcaacacagagcaggccgctgagcacttcaggaacccccagaggcgcatccgccgctggctgcggcgcttccaggccagccagggcgagaacctggagggcaagtacctgagctttgaagctgaggagaagctggccgagtgggtgctgacccagcgggagcagcagctgcctgtgaatgaggagaccctcttccagaaggccaccaagattggccgcagcctggagggcggcttcaagatctcctatgagtgggccgtgcgcttcatgctgcggcaccacctgaccccccacgcccggcgggctgtggcccacaccctgcccaaggatgtggctgaaaatgccggcctcttcatcgactttgtgcagaggcagatccacaaccaggacctgcccctgtccatgattgtggccattgatgagatcagcctcttcctggacacagaggtgctgagcagtgatgacagaaaagaaaatgccctgcagacagtgggcaccggggagccctggtgtgatgtggtgctggccatcctggctgatggcaccgtgctgcccaccctggtgttctaccggggccagatggaccagcctgccaacatgccagacagcatcctgctggaggccaaggagagcggctacagtgatgatgagatcatggagctgtggagcaccagggtgtggcagaagcacacagcctgccagaggagcaagggcatgctggtgatggactgccacaggacccacctgtctgaggaggtgctggccatgctgagcgccagcagcaccctgcctgctgtggtgcctgctggctgcagcagcaagatccagcccctggatgtgtgcatcaagaggacagtgaagaacttcctgcacaagaagtggaaggagcaggcccgggagatggctgacacagcctgtgacagtgatgtgctgctgcagctggtgctggtgtggctgggggaggtgctgggcgtcatcggggactgcccagagctggtgcagaggagcttcctggtggcctctgtgctgcccggcccagatggcaacatcaacagccccaccagaaatgctgacatgcaggaggagctgattgccagcctggaggagcagctgaagctgagcggggagcacagcgagagcagcaccccccggcccaggagcagccctgaggagaccatcgagcctgagagcctgcaccagctgtttgaaggagagagcgagacagagagcttctacggctttgaggaggccgacctggacctgatggagatctag

SEQ ID NO: 22174 - DNA, 561 bp, synthetic construct
  source 1..561: mol_type = other DNA; note = Synthetic coding sequence
atgttctggaagtttgacctgcacagcagcagccacatcgacaccctgctggagcgggaggatgtgaccctgaaggagctgatggatgaagaagatgtgctgcaggagtgcaaggcccagaacaggaagctgattgagttcctgctgaaggccgagtgcctggaggacctggtgtccttcatcatcgaggagcccccccaggacatggatgagaagatccgctacaagtaccccaacatcagctgtgagctgctgaccagtgatgtgtcccagatgaatgaccggctgggggaggatgagagcctgctgatgaagctgtacagcttcctgctgaatgacagccccctgaaccccctgctggccagcttcttcagcaaggtgctgagcatcctgatcagcaggaagccagagcagatcgtggacttcctgaagaagaagcatgactttgtggacctgatcatcaagcacatcggcaccagcgccatcatggacctgctgctgcggctgctgacctgcatcgagcccccccagccccggcaggatgtgctgaactggctgtag

SEQ ID NO: 22175 - DNA, 288 bp, synthetic construct
  source 1..288: mol_type = other DNA; note = Synthetic coding sequence
atgagccagagcggggctgtgtcctgctgccctggggccaccaacggcagcctgggccgcagtgatggagtggccaagatgagccccaaggacctgtttgagcagaggaagaagtacagcaacagcaatgtcatcatgcatgagaccagccagtaccacgtgcagcacctggccaccttcatcatggacaagtctgaggccatcacctctgtggatgatgccatcaggaagctggtgcagctgagcagcaaggagaagatctggacccaggagatgctgctgcagtag

SEQ ID NO: 22176 - DNA, 1740 bp, synthetic construct
  source 1..1740: mol_type = other DNA; note = Synthetic coding sequence
atggatgacagcaagcaggagagcaccaccagcaaggaggaggagaccaacatcatcagcagcatcgtgcccagcacccaggacatctaccagaggcagaacagcagtgatgtgcacaagagcctgctgcctgctgtggatgagaccacctgtggccacacccacttccagcagatgattgacaagtacatcaatgaggccaacctgatccctgagaagacagacctgcaggagctggagcacatcttccccaacctgcaccaccagctgttcaagcccctggagccccacccagactttgacctgagcagcagcagcagcggcatcagcccagacaacagagacttctaccagaggagtgacagcagcagcgagagccactgtgccaccggcctgagcaagagcacagtgtacttcaccgccctgcggaggacctccatgcacagcagcctgaacaccagccccaaccagcagcctgacaccaacctggcccacgtgggcgcccacagctttgccacagagaacatcattggaggcagcgagcagtgctttgagcagctgcagcctgagtacagcagccaggaggagagccagcacgccgacctgcccagcatcttcagcattgaggcccgggacagcagccagggcatgaagaaccagaactaccccagcgaggagcacacagagatcctgcagaacaagaagaagatcgtgcacttccagctgagcatcggcaacctgagctctgtgtacagcagcagtgatgaggccaacgtgtttgaccagctgaatgtgcagcacagcaccccctgtggcagcaacagcagtgaatgttccaccaagcaccagctggagagcaggaaggagagcatgggctttgaggagctgagcaagaggggcgtggtgaccatgctgcagagccagggcctgattgaggacaacaagaatgagacctgccgggtgctggacatcaacccccaggtggaggagacagacagccggctgtgtgtgaggacagtggagatgggcaccagcatccaggccccctacagcctgaccacccagaatgagaagtactttgaaaattctgctgagacagacatccccaagatcaccaagaagctgagccagctgggggagagcgagctgtttgccagcagcggcagcttcagcctgcagagcagcatccctgtgtgggagacagaaacaggccacggcatcatggaggagcctgagctgaccctcatcagcaccacagacaccagcattgctgagatggactttgccaacctgaccctggaggagaagtcagaaaatgaggccaagtgcttcttccaggtgtctgagttcctgcccctggtgtctgccacagaggccagtgactacccagctgtgtctgagctgagcattgagaagcccaggacagccagcacagctgagaccccccggcggctgacccctgtgcccggcagcctgcaggaggccttcatcaagaggaagaagagcttcatggagaggagccaccagaggcagaaggagatccggaacaagatccacgtgtctgagaacagccagatcaagacagtgaaggagaagcccagcatcagcagctctgtgtcccggctgaagggcgtgaacaaggtgcgggccagcttccctgaggacaggaagaccacccaggccctgcggcaccagaggggcctgcggctgtacaaccagctggccgaggtgaagcagtag

SEQ ID NO: 22177 - DNA, 435 bp, synthetic construct; identical to SEQ ID NO: 22164
  source 1..435: mol_type = other DNA; note = Synthetic coding sequence

SEQ ID NO: 22178 - DNA, 246 bp, synthetic construct
  source 1..246: mol_type = other DNA; note = Synthetic coding sequence
atggtggccatggccgaggccgaggccggcgtggccgtggaggtgcggggcctgcccccagctgtgcctgatgagctgctgaccctgtactttgagaacagaagaagaagtggcggcggccctgtgctgtcctggcagaggctgggctgcggcggcgtgctgaccttccgggagccagcagatgctgagcgggtgctggcccaggccgaccacgagctgcacggggcccagctgagcctgaggtag

SEQ ID NO: 22179 - DNA, 1539 bp, synthetic construct
  source 1..1539: mol_type = other DNA; note = Synthetic coding sequence
atggccgccttcaagctggacttcctgcctgagatgatggtggaccactgcagcctgaacagcagccctgtgtccaagaagatgaatggcaccctggaccacccagaccagcctgacctggatgccatcaagatgtttgtgggccaggtgcccaggacctggagcgagaaggacctgcgggagctgtttgagcagtacggggctgtgtatgagatcaacgtgctgcgggacaggagccagaaccccccccagagcaagggctgctgctttgtgaccttctacaccaggaaggccgccctggaggcccagaatgccctgcacaacatgaaggtgctgcccggcatgcaccaccccatccagatgaagccagctgacagcgagaagaacaacgtggaggacaggaagctgttcatcggcatgatcagcaagaagtgcacagaaaatgacatccgggtgatgttcagcagctttggccagatcgaggagtgccgcatcctgcggggcccagatggcctgagccggggctgtgcctttgtgaccttcaccacccgggccatggcccagacagccatcaaggccatgcaccaggcccagaccatggagggctgcagcagccccatggtggtgaagtttgctgacacccagaaggacaaggagcagaagaggatggcccagcagctgcagcagcagatgcagcagatctctgctgcctctgtgtggggcaacctggccggcctgaacaccctgggcccccagtacctggccctgtacctgcagctgctgcagcagacagccagcagcggcaacctgaacaccctgagcagcctgcaccccatgggcggcctgaatgccatgcagctgcagaacctggccgccctggccgccgccgccagcgctgcccagaacaccccatctggcaccaatgccctgaccaccagcagcagccccctgtctgtgctgaccagcagcggcagcagccccagcagcagcagcagcaacagcgtgaaccccatcgccagcctgggcgccctgcagaccctggccggggccacagctggcctgaatgtgggcagcctggccggcatggccgccctgaatggaggcctgggcagcagcggcctgagcaatggcaccggcagcaccatggaggccctgacccaggcctacagcggcatccagcagtatgctgctgctgccctgcccaccctgtacaaccagaacctgctgacccagcagagcatcggggctgctggcagccagaaggagggccctgagggcgccaacctcttcatctaccacctgccccaggagtttggagaccaggacctgctgcagatgttcatgccctttggaaatgtggtgtctgccaaggtgttcatcgacaagcagaccaacctgagcaagtgcttcggctttgtgtcctatgacaaccctgtgtctgcccaggccgccatccagagcatgaatggcttccagatcggcatgaagaggctgaaggtgcagctgaagaggagcaagaatgacagcaagccctactag

SEQ ID NO: 22180 - DNA, 1131 bp, synthetic construct
  source 1..1131: mol_type = other DNA; note = Synthetic coding sequence
atgaaggatgtgcccggcttcctgcagcagagccagaacagcggccctggccagcctgctgtgtggcaccggctggaggagctgtacaccaagaagctgtggcaccagctgaccctgcaggtgctggactttgtgcaggacccctgctttgcccagggagatggcctcatcaagctgtatgagaacttcatcagcgagtttgagcaccgggtgaaccccctgagcctggtggagatcatcctgcacgtggtgcggcagatgacagaccccaacgtggccctgaccttcctggagaagacccgggagaaggtgaagagcagtgatgaggccgtcatcctgtgcaagacagccatcggggccctgaagctgaacattggagacctgcaggtgaccaaggagaccattgaagatgtggaggagatgctgaacaacctgcccggggtgacctctgtgcacagccgcttctatgacctgagcagcaagtactaccagaccatcggcaaccacgccagctactacaaggatgccctgcgcttcctgggctgtgtggacatcaaggacctgcctgtgtctgagcagcaggagcgggccttcaccctgggcctggccggcctgctgggggagggcgtcttcaactttggagagctgctgatgcaccctgtgctggagagcctgaggaacacagaccggcagtggctgattgacaccctgtatgccttcaacagcggaaatgtggagcgcttccagaccctgaagacagcctggggccagcagcctgacctggccgccaatgaggcccagctgctgaggaagatccagctgctgtgcctgatggagatgaccttcaccaggcctgccaaccaccggcagctgacctttgaggagatcgccaagagcgccaagatcaccgtgaatgaggtggagctgctggtgatgaaggccctgtctgtgggcctggtgaagggcagcattgatgaggtggacaagagggtgcacatgacctgggtgcagccccgggtgctggacctgcagcagatcaagggcatgaaggaccggctggagttctggtgcacagatgtgaagtccatggagatgctggtggagcaccaggcccatgacatcctgacctag

SEQ ID NO: 22181 - DNA, 489 bp, synthetic construct
  source 1..489: mol_type = other DNA; note = Synthetic coding sequence
atgaccagcaagaagctggtgaacagcgtggccggctgtgctgatgatgccctggccggcctggtggcctgcaaccccaacctgcagctgctgcagggccaccgggtggccctgcggagtgacctggacagcctgaagggccgggtggccctgctgagcggcggcggcagcggccacgagcccgcccacgccggcttcatcggcaagggcatgctgactggagtgattgctggagctgtgttcaccagccctgctgtgggcagcatcctggccgccatccgggctgtggcccaggccggcaccgtgggcaccctgctgattgtgaagaactacaccggggaccggctgaactttggcctggcccgggagcaggcccgggcagagggcatccctgtggagatggtggtgattggagatgattctgccttcaccgtgctgaagaaggccggcagaagaggcctgtgtggcaccgtgctgatccacaagtag

SEQ ID NO: 22182 - DNA, 7854 bp, synthetic construct
  source 1..7854: mol_type = other DNA; note = Synthetic coding sequence
atgctgacagattctgggggcggcggcaccagctttgaggaggacctggacagcgtggcccccaggtctgccccagctggggccagcgagcccccacctcctgggggcgtgggcctgggcatcagaacagtgcggctgtttggagaggccggccctgccagcggcgtgggcagcagcggcggcggcggcagcggcagcggcaccggcggcggagatgctgccctggacttcaagctggccgctgctgtgctgaggactggaggcggcggcggggccagcggcagtgatgaagatgaggtgtctgaggtggagagcttcatcctggaccaggaggacctggacaaccctgtgctgaagaccaccagcgagatcttcctgagcagcacagctgagggcgctgacctgaggacagtggaccctgagacccaggcccggctggaggccctgctggaggccgccggcatcggcaagctgagcacagcagatggcaaggcctttgctgaccctgaggtgctgcggcggctgaccagctctgtgtcctgtgccctggatgaggccgccgccgccctgaccaggatgaaggccgagaacagccacaatgccggccaggtggacaccaggagcctggccgaggcctgcagtgatggagatgtgaatgctgtgaggaagctgctggatgagggccgctctgtgaatgagcacacagaggagggggagagcctgctgtgcctggcctgcagcgctggctactatgagctggcccaggtgctgctggccatgcacgccaacgtggaggaccggggcaacaagggggacatcacccccctgatggccgccagcagcggcggctacctggacatcgtgaagctgctgctgctgcatgatgctgatgtgaacagccagagcgccaccggcaacacagccctgacctacgcctgtgccggcggctttgtggacatcgtgaaggtgctgctgaatgaaggagccaacatcgaggaccacaatgaaaatggccacacccccctgatggaggccgccagcgctggccacgtggaggtggcccgggtgctgctggaccacggggccggcatcaacacccacagcaatgagttcaaggagagcgccctgaccctggcctgctacaagggccacctggacatggtgcgcttcctgctggaggccggggctgaccaggagcacaagacagatgagatgcacacagccctgatggaggcctgcatggatggccacgtggaggtggcccggctgctgctggacagcggggcccaggtgaacatgcctgctgacagctttgagagccccctgaccctggccgcctgtggcggccacgtggagctggccgccctgctgattgaaagaggagccaacctggaggaggtgaatgatgagggctacacccccctgatggaggccgcccgggagggccacgaggagatggtggccctgctgctggcccagggcgccaacatcaatgcccagacagaggagacccaggagacagccctgaccctggcctgctgcggcggcttcagcgaggtggccgacttcctgatcaaggccggggctgacatcgagctgggctgcagcacccccctgatggaggccagccaggagggccacctggagctggtgaagtacctgctggccagcggggccaacgtgcacgccaccacagccactggagacacagccctgacctacgcctgtgaaaatggccacacagatgtggctgatgtgctgctgcaggccggggctgacctggagcacgagagcgagggcggccgcacccccctgatgaaggccgcccgggccggccacctgtgcaccgtgcagttcctgatcagcaaaggagccaacgtgaacagagccacagccaacaatgaccacacagtggtgtccctggcctgtgccggcggccacctggccgtggtggagctgctgctggcccatggagctgaccccacccaccggctgaaggatggcagcaccatgctgattgaagctgccaagggcggccacaccaacgtggtgtcctacctgctggactaccccaacaacgtgctgtctgtgcccaccacagatgtgtcccagctgcccccacccagccaggaccagagccaggtgccccgggtgcccacccacaccctggccatggtggtgcccccccaggagccagacaggaccagccaggagaacagccctgccctgctgggcgtgcagaagggcaccagcaagcagaagagcagcagcctgcaggtggccgaccaggacctgctgcccagcttccacccctaccagcccctggagtgcatcgtggaggagacagagggcaagctgaatgagctgggccagaggatcagcgccatcgagaaggcccagctgaagagcctggagctgatccagggcgagcccctgaacaaggacaagattgaggagctgaagaagaaccgggaggagcaggtgcagaagaagaagaagatcctgaaggagctgcagaaggtggagcggcagctgcagatgaagacccagcagcagttcaccaaggagtacctggagaccaagggccagaaggacacagtgtccctgcaccagcagtgcagccacagaggagtcttccctgagggggagggagatggcagcctgcctgaggaccacttcagcgagctgccccaggtggacaccatcctcttcaaggacaatgatgtggatgatgagcagcagagcccccccagcgctgagcagattgactttgtgcctgtgcagcccctgagcagcccccagtgcaacttcagcagtgacctgggcagcaatggcaccaacagcctggagctgcagaaggtgtctggcaaccagcagatcgtgggccagccccagatcgccatcactggacatgaccagggcctgctggtgcaggagccagatggcctgatggtggccaccccagcccagaccctgacagacaccctggatgacctgattgctgctgtgtccaccagggtgcccaccggcagcaacagcagcagccagaccacagaatgtctgaccccagagagctgcagccagaccaccagcaatgtggccagccagagcatgcctcctgtgtaccccagcgtggacattgatgcccacacagagagcaaccacgacacagccctgaccctggcctgtgccggcggccacgaggagctggtgtctgtgctgattgccagagatgccaagattgagcaccgggacaagaagggcttcacccccctcatcctggccgccacagctggccacgtgggcgtggtggagatcctgctggacaagggcggggacatcgaggcccagagcgagaggaccaaggacacccccctgagcctggcctgcagcggcggccggcaggaggtggtggacctgctgctggcccggggggccaacaaggagcacagaaatgtgtctgactacacccccctgagcctggccgccagcggcggctacgtgaacatcatcaagatcctgctgaatgctggagctgagatcaacagcaggacaggcagcaagctgggcatcagccccctgatgctggccgccatgaatggccacgtgcctgctgtgaagctgctgctggacatgggcagtgacatcaatgcccagatcgagaccaacagaaacacagccctgaccctggcctgcttccagggccgggcagaggtggtgtccctgctgctggacaggaaggccaacgtggagcaccgggccaagacaggcctgacccccctgatggaggccgccagcggcggctacgccgaggtgggccgggtgctgctggacaagggagcagatgtgaatgcccctcctgtgcccagcagccgggacacagccctgaccatcgctgctgacaagggccactacaagttctgtgagctgctgatccacagaggagcccacattgatgtgaggaacaagaagggcaacacccccctgtggctggccagcaatggaggccactttgatgtggtgcagctgctggtgcaggccggggctgatgtggatgctgctgacaacaggaagatcacccccctgatgtctgccttcaggaagggccacgtgaaggtggtgcagtacctggtgaaggaggtgaaccagttccccagcgacatcgagtgcatgagatacatcgccaccatcacagacaaggagctgctgaagaagtgccaccagtgtgtggagaccatcgtgaaggccaaggaccagcaggccgctgaggccaacaagaatgccagcatcctgctgaaggagctggacctggagaagagccgggaggagagcaggaagcaggccctggccgccaagcgggagaagaggaaggagaagaggaagaagaagaaggaggagcagaagaggaagcaggaggaggatgaggagaacaagcccaaggaaaattctgagctgcctgaagatgaagatgaggaggagaatgatgaagatgtggagcaggaggtgcccatcgagccccccagcgccaccaccaccaccaccatcggcatcagcgccaccagcgccaccttcaccaacgtgtttgggaagaagagggccaacgtggtgaccacccccagcaccaacaggaagaacaagaagaacaagaccaaggagaccccacccacagcccacctgatcctgcctgagcagcacatgagcctggcccagcagaaggctgacaagaacaagatcaatggagagccccggggcggcggggccggcggcaacagcgacagcgacaacctggacagcacagactgcaacagcgagagcagcagcggcggcaagagccaggagctgaactttgtgatggatgtgaacagcagcaagtaccccagcctgctgctgcacagccaggaggagaagaccagcacagccaccagcaagacccagacccggctggagggggaggtgacccccaacagcctgagcaccagctacaagacagtgtccctgcccctgagcagccccaacatcaagctgaacctgaccagccccaagaggggccagaagcgggaggagggctggaaggaggtggtgagaagaagcaagaagctgtctgtgcctgcctctgtggtgagccgcatcatgggccggggcggctgcaacatcacagccatccaggatgtgactggagcccacattgatgtggacaagcagaaggacaagaatggagagaggatgatcaccatccggggcggcacagagagcaccaggtatgctgtgcagctgatcaatgccctgatccaggaccctgccaaggagctggaggacctgatccccaagaaccacatccgcaccccagccagcaccaagagcatccacgccaacttcagcagcggcgtgggcaccacagctgccagcagcaagaatgccttccccctgggcgcccccaccctggtgaccagccaggccaccaccctgagcaccttccagcctgccaacaagctgaacaagaatgtgcccaccaacgtgcgcagcagcttccctgtgtccctgcccctggcctacccccacccccactttgccctgctggccgcccagaccatgcagcagatccgccacccccggctgcccatggcccagtttggaggcaccttcagccccagccccaacacctggggccccttccctgtgcggcctgtgaaccctggcaacaccaacagcagccccaagcacaacaacaccagccggctgcccaaccagaatggaacagtgctgcccagcgagagcgctggcctggccacagccagctgccccatcaccgtgtcctctgtggtggccgccagccagcagctgtgtgtgaccaacaccaggacccccagctctgtgaggaagcagctgtttgcctgtgtgcccaagaccagccccccagccaccgtcatcagctctgtgaccagcacctgcagcagcctgcccagcgtgtcctctgcccccatcaccagcggccaggcccccaccaccttcctgcctgccagcaccagccaggcccagctgagcagccagaagatggagagcttctctgctgtgccccccaccaaggagaaggtgtccacccaggaccagcccatggccaacctgtgcacccccagcagcacagccaacagctgcagcagcagcgccagcaacacccctggggcccctgagacccaccccagcagcagccccacccccaccagcagcaacacccaggaggaggcccagcccagctctgtgtctgacctgagccccatgtccatgccctttgccagcaacagcgagcccgcccccctgaccctgaccagccccaggatggtggccgctgacaaccaggacaccagcaacctgccccagctggccgtgcctgccccccgggtgagccacaggatgcagccccggggcagcttctacagcatggtgcccaatgccaccatccaccaggacccccagagcatctttgtgaccaaccctgtgaccctgaccccaccccagggccccccagctgctgtgcagctgagcagcgctgtgaacatcatgaatggcagccagatgcacatcaacccagccaacaagagcctgccccccaccttcggccctgccaccctcttcaaccacttcagcagcctgtttgacagcagccaggtgcctgccaaccagggctggggagatggccccctgagcagccgggtggccacagatgccagcttcaccgtgcagagcgccttcctgggcaacagcgtgctgggccacctggagaacatgcacccagacaacagcaaggcccctggcttccggccccccagccagagggtgtccaccagccctgtgggcctgcccagcattgaccccagcggcagcagccccagcagcagcagcgcccccctggccagcttcagcggcatccctggcaccagggtcttcctgcagggccctgcccctgtgggcacccccagcttcaaccggcagcacttcagcccccacccctggaccagcgccagcaacagcagcaccagcgccccacccaccctgggccagcccaagggcgtgtctgccagccaggacaggaagatccccccacccatcggcacagagcggctggcccgcatccggcagggcggctctgtggcccaggccccagctggcaccagctttgtggcccctgtgggccacagcggcatctggagctttggagtgaatgctgtgtctgagggcctgagcggctggagccagagcgtgatgggcaaccaccccatgcaccagcagctgagtgaccccagcaccttcagccagcaccagcccatggagagagatgacagcggcatggtggcccccagcaacatcttccaccagcccatggccagcggctttgtggacttcagcaagggcctgcccatctccatgtatggaggcaccatcatccccagccacccccagctggctgatgtgcctgggggccccctcttcaacggcctgcacaacccagaccctgcctggaaccccatgatcaaggtgatccagaacagcacagaatgtacagatgcccagcaggccagcctgctgcccagcgtgcctgccctgaagggggagatccccagcccccagctgacccggcccaagaagagaattggccggcccatggtggccagccccaaccagaggcaccaggaccacctgcggcccaaggtgcctgctggggtgcaggagctgacccactgcccagacacccccctgctgccccccagcgacagccggggccacaacagcagcaacagccccagcctgcaggccggcggcgctgagggcgctggggaccggggccgggacaccaggtag

SEQ ID NO: 22183 - DNA, 753 bp, synthetic construct
  source 1..753: mol_type = other DNA; note = Synthetic coding sequence
atgggagacatcccagctgtgggcctgagctcctggaaggccagccctgggaaggtgacagaggccgtgaaggaggccattgatgctggctaccgccactttgactgtgcctacttctaccacaatgaaagagaggtgggcgccggcatccgctgcaagatcaaggagggcgctgtgcggcgggaggacctcttcatcgccaccaagctgtggtgcacctgccacaagaagagcctggtggagacagcctgcaggaagagcctgaaggccctgaagctgaactacctggacctgtacctgatccactggcccatgggcttcaagccaccccaccctgagtggatcatgagctgcagcgagctgtccttctgcctgagccacccccgggtgcaggacctgcccctggatgagagcaacatggtgatccccagcgacacagacttcctggacacctgggaggccatggaggacctggtgatcaccggcctggtgaagaacattggagtgagcaacttcaaccacgagcagctggagcggctgctgaacaagccaggcctgcgcttcaagcccctgaccaaccagatcctgatccgcttccagatccagagaaatgtcatcgtcatccctggcagcatcacccccagccacatcaaggagaacatccaggtgtttgattttgagctgacccagcacgacatggacaacatcctgagcctgaacagaaacctgcggctggccatgttccccatgtag

SEQ ID NO: 22184 - DNA, 525 bp, synthetic construct
  source 1..525: mol_type = other DNA; note = Synthetic coding sequence
atgctgacagaaaatggccaggtgctgagctgtggcagcaacagctttggccagctgggcgtgccccacggcccccggcgctgtgtggtgccccaggccatcgagctgcacaaggagaaggtggtgtgcatcgccgccggcctgcggcatgctgtggccgccacagccagcggcatcgtgttccagtggggcaccggcctggccagctgtggccggcggctgtgccccggccagaccctgcccctcttcttcaccgccaaggagcccagccgggtgacaggcctggagaacagcaaggccatgtgtgtgctggccggcagtgaccacagcgccagcctgacagatgctggggaggtgtatgtgtggggcagcaacaagcacggccagctggccaatgaggccgccttcctgcctgtgccccagaagattgaggcccactgcttccagaatgagaaggtgacagccatctggagcggctggacccacctggtggcccagacaggcctgctgtggctgcgggcctag

SEQ ID NO: 22185 - DNA, 228 bp, synthetic construct
  source 1..228: mol_type = other DNA; note = Synthetic coding sequence
atgaacagaagaaggaagttcctgctggcctctgtgctggccctgcagaacagcagcttcatctaccccagctgccagaagtgcttcagccgcatcatcctggtgtccaagaggagcaactgccccaagtgtggcagcactggagagagcggaaatgccaactaccgctacaagctgagcctgaaggtggccgagagcaacaagctgtttgtgatcaccgtcttctag

SEQ ID NO: 22186 - DNA, 252 bp, synthetic construct
  source 1..252: mol_type = other DNA; note = Synthetic coding sequence
atggtggccatggccgaggccgaggccggcgtggccgtggaggtgcggggcctgcccccagctgtgcctgatgagctgctgaccctgtactttgagaacagaagaagaagtggcggcggccctgtgctgtcctggcagaggctgggctgcggcggcgtgctgaccttccgggagccagcagatgctgagcgggtgctggcccaggccgaccacgagctgcacggggcccagctgagcctgcggcctgcctag

SEQ ID NO: 22187 - DNA, 528 bp, synthetic construct
  source 1..528: mol_type = other DNA; note = Synthetic coding sequence
atgctgtctgaggaggagaaggaggagctgaaggccgagctggtgcagctggaggatgagatcaccaccctgcggcaggtgctgagcgccaaggagcggcacctggtggagatcaagcagaagctgggcatgaacctgatgaatgagctgaagcagaacttcagcaagtcctggcatgacatgcagaccaccacagcctacaagaagacccatgagaccctgagccatgctggccagaaggccacagctgccttcagcaatgtgggcacagccatcagcaagaagtttggagacatgagctacagcatccgccacagcatctccatgcctgccatgaggaacagccccaccttcaagagctttgaggagcgggtggagaccaccgtgaccagcctgaagaccaaggtgggcggcaccaaccccaacggcggcagctttgaggaggtgctgagcagcacagcccacgccagcgcccagagcctggccggcggcagcaggaggaccaaggaggaggagctgcagtgctag

SEQ ID NO: 22188 - DNA, 231 bp, synthetic construct
  source 1..231: mol_type = other DNA; note = Synthetic coding sequence
atgaacagaagaaggaagttcctgctggcctctgtgctggccctgcagaacagcagcttcatctaccccagctgccagaagtgcttcagccgcatcatcctggtgtccaagaggagcaactgccccaagtgtggcagcactggagagagcggaaatgccaactaccgctacaagctgagcctgaaggtggccgagagcaacaagctgtttgtgatcaccgtgtttggatag

SEQ ID NO: 22189 - DNA, 456 bp, synthetic construct
  source 1..456: mol_type = other DNA; note = Synthetic coding sequence
atgagcatccccttcagcaacacccactaccgcatcccccagggcttcggcaacctgctggagggcctgacccgggagatcctgcgggagcagcctgacaacatcccagcctttgctgctgcctactttgagagcctgctggagaagcgggagaagaccaactttgatcctgctgagtggggcagcaaggtggaggaccgcttctacaacaaccacgcctttgaggagcaggagcccccagagaagagtgaccccaagcaggaggagagccagatcagcggcaaggaggaggagacctctgtgaccatcctggacagcagcgaggaggacaaggagaaggaggaggtggccgctgtgaagatccaggccgccttccggggccacatcgcccgggaggaggccaagaagatgaagaccaacagcctgcagaatgaggagaaggaggagaacaagtag

SEQ ID NO: 22190 - DNA, 270 bp, synthetic construct
  source 1..270: mol_type = other DNA; note = Synthetic coding sequence
atggaggccgcagatgccagccgcagcaatggcagcagccctgaggccagagatgcccggagccccagcggccccagcggcagcctggagaatggcaccaaggcagatggcaaggatgccaagaccaccaacggccacggcggggaggccgctgagggcaagagcctgggcagcgccctgaagccaggagagggccgcagcgccctgtttgctggaaatgagtggaggcggcccatcatccagtttgtggagagcggagatgacaagtag

SEQ ID NO: 22191 - DNA, 1542 bp, synthetic construct
  source 1..1542: mol_type = other DNA; note = Synthetic coding sequence
atggaggtgggcatcaccatccagcacgcctatgagaagcagcacccctggattgacctgaccagcatcggcttctcctatgtgattgacttcaacaccatgggccagatcaaccggcagacccagaggcagaggagagtgagaagaaggctggacctgatctaccccatggtgacaggcaccctgcccaaggcccagagctggcctgtgtccccaggccctgccaccagcccccccatgagcccctgcagctgcccccagtgtgtgctggtgatgtctgtgaaggctgctgtggtgaatggcagcacaggccccctgcagctgcctgtgaccaggaagaacatgcctcctcctggggtggtgaagctgccccccctgcccggcagcggggccaagcccctggacagcacaggcaccatccggggccccctgaagacagcccccagccaggtgatccggcggcaggccagctccatgcccaccggcaccaccatgggcagccctgccagccccccaggccccaacagcaagacaggccgggtggccctggccaccctgaacagaaccaacctgcagaggctggccatcgcccagagccgggtgctgattgccagcggcgtgcccaccgtgcctgtgaagaacctgaatggcagcagccctgtgaacccagccctggccggcatcaccggcatcctgatgtctgctgctggcctgcctgtgtgcctgaccaggcctcccaagctggtgctgcaccccccacctgtgtccaagtctgagatcaagagcatccctggggtgagcaacaccagcaggaagaccaccaagaagcaggccaagaagggcaagaccccagaggaggtgctgaagaagtacctgcagaaggtgcgccaccccccagatgaggactgcaccatctgcatggagcggctgacagcccccagcggctacaagggcccccagcccaccgtgaagccagacctggtgggcaagctgagccgctgtggccacgtgtaccacatctactgcctggtggccatgtacaacaatggaaacaaggatggcagcctgcagtgccccacctgcaagaccatctatggagtgaagacaggcacccagcccccaggcaagatggagtaccacctgatcccccacagcctgcccggccacccagactgcaagaccatccgcatcatctacagcatccccccaggcatccagggccctgagcaccccaaccctgggaagagcttcagcgcccggggcttccccaggcactgctacctgcctgattctgagaagggcaggaaggtgctgaagctgctgctggtggcctgggacagaagactcatctttgccatcggcaccagcagcaccactggagagagtgacaccgtcatctggaatgaggtgcaccacaagacagaatttggcagcaacctgactggacatggctacccagatgccaactacctggacaacgtgctggccgagctggccgcccagggcatcagcgaggacagcacagcccaggagaaggactag

SEQ ID NO: 22192 - DNA, 414 bp, synthetic construct
  source 1..414: mol_type = other DNA; note = Synthetic coding sequence
atgagctctgtgcagagccagcaggagcagctgagccagagcgaccccagccccagccccaacagctgcagcagctttgagctgattgacatggatgctggcagcctgtatgagcctgtgagcccccactggttctactgcaagatcatcgacagcaaggagacctggatccccttcaacagcgaggacagccagcagctggaggaggcctacagcagcggcaagggctgcaatggccgggtggtgcccacagatggcggccgctatgatgtgcacctgggggagaggatgagatatgctgtgtactgggatgagctggccagcgaggtgcggcgctgcacctggttctacaagggggacaaggacaacaagtatgtgccctacagcgagagcttcagccaggtgctggagtag

SEQ ID NO: 22193 - DNA, 120 bp, synthetic construct
  source 1..120: mol_type = other DNA; note = Synthetic coding sequence
atgttctggaagtttgacctgcacagcagcagccacatcgacaccctgctggagcgggaggatgtgaccctgaaggagctgatggatgaagaagatgtgctgcaggagtgcaaggcctag

SEQ ID NO: 22194 - DNA, 2157 bp, synthetic construct
  source 1..2157: mol_type = other DNA; note = Synthetic coding sequence
atgctgatgaccctggagatgacagagctgacagacccccaccacaccatgggagactacaaggtggcccacccccaggacccccaccaccccagcgagaagcctgtgatccactgccacaagtgtggggagccctgcaagggggaggtgctgcgggtgcagaccaagcacttccacatcaagtgcttcacctgcaaggtgtgtggctgtgacctggcccagggcggcttcttcatcaagaatggagagtacctgtgcaccctggactaccagaggatgtatggcacccgctgccacggctgtggggagtttgtggagggggaggtggtgacagccctgggcaagacctaccaccccaactgctttgcctgcaccatctgcaagaggcccttccccccaggggacagagtgaccttcaacggccgggactgcctgtgccagctgtgtgcccagcccatgagcagcagccccaaggagaccaccttcagcagcaactgtgccggctgcggccgggacatcaagaatggccaggccctgctggccctggacaagcagtggcacctgggctgcttcaagtgcaagagctgtgggaaggtgctgactggagagtacatcagcaaggatggagccccctactgtgagaaggactaccagggcctgtttggagtgaagtgtgaggcctgccaccagttcatcaccgggaaggtgctggaggccggggacaagcactaccaccccagctgtgcccgctgcagccgctgcaaccagatgttcacagaaggagaggagatgtacctgcagggcagcacagtgtggcacccagactgcaagcagagcaccaagacagaggagaagctgcggcccaccaggaccagcagcgagagcatctacagccggcccggcagcagcatccctggcagccctggccacaccatctatgccaaggtggacaatgagatcctggactacaaggacctggccgccatccccaaggtgaaggccatctatgacatcgagaggccagacctgatcacctatgagcccttctacaccagcggctatgatgacaagcaggagcggcagagcctgggggagagccccaggaccctgagccccaccccatctgctgagggctaccaggatgtgcgggacaggatgatccacaggagcaccagccagggcagcatcaacagccctgtgtacagccgccacagctacacccccaccaccagccgcagcccccagcacttccacaggcctggaaatgagcccagcagcggcaggaacagccccctgccctacagaccagacagccggcccctgacccccacctacgcccaggcccccaagcacttccacgtgcctgaccagggcatcaacatctacaggaagccacccatctacaagcagcacgccgccctggccgcccagagcaagagcagcgaggacatcatcaagttcagcaagtttcctgctgcccaggccccagaccccagcgagacccccaagattgaaacagaccactggccaggcccccccagctttgctgtggtgggccctgacatgaagaggaggagcagcggccgggaggaggatgatgaggagctgctgcggcggcggcagctgcaggaggagcagctgatgaagctgaacagcggcctgggccagctgatcctgaaggaggagatggagaaggagagccgggagaggagcagcctgctggccagccgctatgacagccccatcaacagcgccagccacatccccagcagcaagacagccagcctgcccggctatggaagaaatggcctgcacaggcctgtgtccacagactttgcccagtacaacagctatggagatgtgtctgggggcgtgcgggacttccagaccctgcctgatggccacatgcctgccatgaggatggaccggggcgtgtccatgcccaacatgctggagcccaagatcttcccctatgagatgctgatggtgaccaacagaggaagaaacaagatcctgcgggaggtggacaggacccggctggagcggcacctggcccctgaggtgttccgggagatcttcggcatgagcatccaggagtttgaccggctgcccctgtggaggagaaatgacatgaagaagaaggccaagctgttctag

SEQ ID NO: 22195 - DNA, 2148 bp, synthetic construct; identical to SEQ ID NO: 18953
  source 1..2148: mol_type = other DNA; note = Synthetic coding sequence

SEQ ID NO: 22196 - DNA, 360 bp, synthetic construct
  source 1..360: mol_type = other DNA; note = Synthetic coding sequence
atggagacagacctgaacagccaggacaggaaggacctggacaagttcatcaagttctttgccctgaagacagtgcaggtgattgtgcaggcccggctgggggagaagatctgcaccaggagcagcagcagccccaccggcagtgactggttcaacctggccatcaaggacatccctgaggtgacccatgaggccaagaaggccctggccggccagctgcctgctgtgggccgctccatgtgtgtggagatcagcctgaagaccagcgagggggacagcatggagctggagatctggtgcctggagatgaatgagaagtgtgacaaggagatcaaggtgtcctacacagtgtacaactag

SEQ ID NO: 22197 - DNA, 420 bp, synthetic construct
  source 1..420: mol_type = other DNA; note = Synthetic coding sequence
atggctgacacagacctcttcatggagtgtgaggaggaggagctggagccctggcagaagatcagtgatgtgattgaggacagcgtggtggaggactacaacagcgtggacaagaccaccaccgtgtctgtgtcccagcagcctgtgtctgcccctgtgcccatcgccgcccacgcctctgtggccggccacctgagcaccagcaccaccgtgagcagcagcggggcccagaacagcgacagcaccaagaagaccctggtgaccctcatcgccaacaacaatgccggcaaccccctggtgcagcagggcggccagcccctcatcctgacccagaacccagcccctggcctgggcaccatggtgacccagcctgtgctgcggcctgtgcaggtgatgcagaatgccaaccacgtgacctag

SEQ ID NO: 22198 - DNA, 492 bp, synthetic construct
  source 1..492: mol_type = other DNA; note = Synthetic coding sequence
atgcatgacaagggcatcaccacagctgctgtgtgtgtgtacccagcccgggtgtgtgatgctgtgaaggccctgaaggccgccggctgcaacatccctgtggcctctgtggccgccggcttccctgctggccagacccacctgaagacccggctggaggagatccggctggccgtggaggatggagccacagaaattgatgtggtgatcaacagaagcctggtgctgaccggccagtgggaggccctgtatgatgagatccggcagttcaggaaggcctgtggggaggcccacctgaagaccatcctggccactggagagctgggcaccctgaccaacgtgtacaaggcctccatgattgccatgatggccggcagtgacttcatcaagaccagcacaggcaaggagaccgtgaatgccaccttccctgtggccatcgtgatgctgcgggccatccgggacttcttctggaagacaggcaacaaggtgtag

SEQ ID NO: 22199 - DNA, 456 bp, synthetic construct
  source 1..456: mol_type = other DNA; note = Synthetic coding sequence
atggctgacacagacctcttcatggagtgtgaggaggaggagctggagccctggcagaagatcagtgatgtgattgaggacagcgtggtggaggactacaacagcgtggacaagaccaccaccgtgtctgtgtcccagcagcctgtgtctgcccctgtgcccatcgccgcccacgcctctgtggccggccacctgagcaccagcaccaccgtgagcagcagcggggcccagaacagcgacagcaccaagaagaccctggtgaccctcatcgccaacaacaatgccggcaaccccctggtgcagcagggcggccagcccctcatcctgacccagaacccagcccctggcctgggcaccatggtgacccagcctgtgctgcggcctgtgcaggtgatgcagaatgccaaccacgtgaccagcagccctgtggccagccagcccatcttcatcacctag

SEQ ID NO: 22200 - DNA, 252 bp, synthetic construct
  source 1..252: mol_type = other DNA; note = Synthetic coding sequence
atgagccagagcggggctgtgtcctgctgccctggggccaccaacggcagcctgggccgcagtgatggagtggccaagatgagccccaaggacctgtttgagcagaggaagaagtacagcaacagcaatgtcatcatgcatgagaccagccagtaccacgtgcagcacctggccaccttcatcatggacaagtctgaggccatcacctctgtggatgatgccatcaggaagctggtgcagctgagcagctag

SEQ ID NO: 22201 - DNA, 366 bp, synthetic construct
  source 1..366: mol_type = other DNA; note = Synthetic coding sequence
atggccggccggcccctgcgcatcggggaccagctggtgctggaggaggactatgatgagacctacatccccagcgagcaggagatcctggagtttgcccgggagatcggcatcgaccccatcaaggagcctgagctgatgtggctggcccgggagggcatcgtggcccccctgcctggagagtggaagccctgccaggacatcactggagacatctactacttcaactttgccaacggccagagcatgtgggaccacccctgtgatgagcactaccgcagcctggtgatccaggagcgggccaagctgagcaccagcggggccatcaagaagaagaagaagaagaaggagaagaaggacaagtag

SEQ ID NO: 22202 - DNA, 2997 bp, synthetic construct; identical to SEQ ID NO: 21162
  source 1..2997: mol_type = other DNA; note = Synthetic coding sequence

SEQ ID NO: 22203 - DNA, 504 bp, synthetic construct
  source 1..504: mol_type = other DNA; note = Synthetic coding sequence
atgggcaccacagcccctggccccatccacctgctggagctgtgtgaccagaagctgatggagttcctgtgcaacatggacaacaaggacctggtgtggctggaggagatccaggaggaggccgagaggatgttcacccgggagttcagcaaggagcctgagctgatgcccaagacccccagccagaagaacagaaggaagaagaggcgcatctcctatgtgcaggatgaaaatagagaccccatcagaagaaggctgagcaggaggaagagccgcagcagccagctgagcagccggcggctgcggagcaaggacagcgtggagaagctggccaccgtggtgggggagaatggatctgtgctgcggcgggtgaccagggctgctgctgctgctgctgctgccaccatggccctggccgcccccagcagccccaccccagagagccccaccatgctgaccaagaagccagaggacaaccacacccagtgccagctggtgccctag

SEQ ID NO: 22204 - DNA, 615 bp, synthetic construct
  source 1..615: mol_type = other DNA; note = Synthetic coding sequence
atggaggcccaggcccagggcctgctggagacagagcccctgcagggcacagatgaagatgctgtggccagcgctgacttcagctccatgctgtctgaggaggagaaggaggagctgaaggccgagctggtgcagctggaggatgagatcaccaccctgcggcaggtgctgagcgccaaggagcggcacctggtggagatcaagcagaagctgggcatgaacctgatgaatgagctgaagcagaacttcagcaagtcctggcatgacatgcagaccaccacagcctacaagaagacccatgagaccctgagccacgccggccagaaggccacagctgccttcagcaatgtgggcacagccatcagcaagaagtttggagacatgagctacagcatccgccacagcatctccatgcctgccatgaggaacagccccaccttcaagagctttgaggagcgggtggagaccaccgtgaccagcctgaagaccaaggtgggcggcaccaaccccaatggaggcagctttgaggaggtgctgagcagcacagcccacgccagcgcccagagcctggccggcggcagcaggaggaccaaggaggaggagctgcagtgctag

SEQ ID NO: 22205 - DNA, 1023 bp, synthetic construct
  source 1..1023: mol_type = other DNA; note = Synthetic coding sequence
atggctgctgcccgggaccccccagaggtgtccctgcgggaggccacccagaggaagctgcggcgcttcagcgagctgcggggcaagctggtggcccggggggagttctgggacatcgtggccatcacagctgctgatgagaagcaggagctggcctacaaccagcagctgtctgagaagctgaagaggaaggagctgcccctgggcgtgcagtaccacgtgtttgtggaccctgctggggccaagattggaaatggaggcagcaccctgtgtgccctgcagtgcctggagaagctgtatggagacaagtggaacagcttcaccatcctgctgatccacagcggcggctacagccagaggctgcccaatgccagcgccctgggcaagatcttcaccgccctgcccctggacatccctgagtgcagcggcaagaccagctgcatcatccagagcatcctggacagccgctgcagcgtggcccctggctctgtggtggagtacagccggctgggcccagatgtgtctgtgggggagaactgcatcatcagcggcagctacatcctgaccaaggccgccctgcctgcccacagctttgtgtgcagcctgagcctgaagatgaaccgctgcctgaagtatgccaccatggcctttggagtgcaggacaacctgaagaagtctgtgaagaccctgagtgacatcaagctgctgcagttctttggagtgtgcttcctgagctgcctggatgtgtggaacctgaaggtgacagaggagctgttcagcggcaacaagacctgcctgagcctgtggacagcccgcatcttccctgtgtgcagcagcctgagtgacagcgtcatcaccagcctgaagatgctgaatgctgtgaagaacaagagcgccttcagcctgaacagctacaagctgctgagcattgaggagatgctgatctacaaggatgtggaggacatgatcacctaccgggagcagatcttcctggagatcagcctgaagagcagcctgatgtag

SEQ ID NO: 22206 - DNA, 873 bp, synthetic construct
  source 1..873: mol_type = other DNA; note = Synthetic coding sequence
atggccgagctgacagccctggagagcctgattgagatgggcttcccccggggccgggcagagaaggccctggccctgactggaaaccagggcatcgaggccgccatggactggctgatggagcatgaagatgatcctgatgtggatgagcccctggagacccccctgggccacatcctgggccgggagcccaccagcagcgagcagggcggcctggagggcagcggcagcgctgctggggagggcaagccagccctgtctgaggaggagcggcaggagcagaccaagaggatgctggagctggtggcccagaagcagcgggagcgggaggagcgggaggagcgggaggccctggagcgggagcggcagaggcggcggcagggccaggagctgtctgctgcccggcagaggctgcaggaggatgagatgagaagagctgctgaggagaggagaagagagaaggccgaggagctggccgcccggcagagggtgcgggagaagattgaaagagacaaggccgagcgggccaagaagtatggaggctctgtgggcagccagcccccacctgtggcccctgagcccggccctgtgcccagcagccccagccaggagccccccaccaagcgggagtatgaccagtgccgcatccaggtgcggctgcctgatggcaccagcctgacccagaccttccgggcccgggagcagctggccgctgtgcggctgtatgtggagctgcacagaggagaggagctgggcggcggccaggaccctgtgcagctgctgagcggcttcccccggcgggccttcagcgaggccgacatggagcggcccctgcaggagctgggcctggtgcccagcgctgtgctgatctag

SEQ ID NO: 22207 - DNA, 309 bp, synthetic construct; identical to SEQ ID NO: 20332
  source 1..309: mol_type = other DNA; note = Synthetic coding sequence

SEQ ID NO: 22208 - DNA, 279 bp, synthetic construct
  source 1..279: mol_type = other DNA; note = Synthetic coding sequence
atgctgtctgaggaggagaaggaggagctgaaggccgagctggtgcagctggaggatgagatcaccaccctgcggcaggtgctgagcgccaaggagcggcacctggtggagatcaagcagaagctgggcatgaacctgatgaatgagctgaagcagaacttcagcaagtcctggcatgacatgcagaccaccacagcctacaagaagacccatgagaccctgagccatgctggccagaaggccacagctgccttcagcaatgtgggcacagccatctag

SEQ ID NO: 22209 - DNA, 3735 bp, synthetic construct; identical to SEQ ID NO: 19446
  source 1..3735: mol_type = other DNA; note = Synthetic coding sequence

SEQ ID NO: 22210 - DNA, 2676 bp, synthetic construct
  source 1..2676: mol_type = other DNA; note = Synthetic coding sequence
atggaccagcctgaggccccctgcagcagcacaggcccccggctggccgtggcccgggagctgctgctggccgccctggaggagctgagccaggagcagctgaagcgcttccgccacaagctgagagatgtgggcccagatggccgcagcatcccctggggccgcctggagcgggcagatgctgtggacctggccgagcagctggcccagttctacggccctgagcccgccctggaggtggccaggaagaccctgaagagagcagatgccagagatgtggccgcccagctgcaggagcggcggctgcagaggctgggcctgggcagcggcaccctgctgtctgtgtctgagtacaagaagaagtaccgggagcacgtgctgcagctgcacgcccgggtgaaggagagaaatgcccggtctgtgaagatcaccaagcgcttcaccaagctgctgattgcccctgagagcgctgcccctgaggaggccatgggccctgctgaggagcctgagcccggccgggccaggagaagtgacacccacaccttcaacagactcttcagaagagatgaggagggcagaagacccctgactgtggtgctgcagggccctgctggcatcggcaagaccatggccgccaagaagatcctgtatgactgggccgccggcaagctgtaccagggccaggtggactttgccttcttcatgccctgtggggagctgctggagcggcccggcaccaggagcctggccgacctgatcctggaccagtgcccagacagaggagcccctgtgccccagatgctggcccagccccagaggctgctcttcatcctggatggagcagatgagctgcctgccctgggcggccctgaggccgccccctgcacagacccctttgaagctgccagcggggcccgggtgctgggcggcctgctgagcaaggccctgctgcccacagccctgctgctggtgaccaccagggctgctgcccctggccgcctgcagggccgcctgtgcagcccccagtgtgccgaggtgcggggcttcagtgacaaggacaagaagaagtacttctacaagtacttcagagatgagcggcgggcagagcgggcctacagatttgtgaaggaaaatgagaccctgtttgccctgtgctttgtgccctttgtgtgctggatcgtgtgcaccgtgctgcggcagcagctggagctgggccgggacctgagcaggaccagcaagaccaccacctctgtgtacctgctcttcatcacctctgtgctgagcagcgcccctgtggctgatggcccccggctgcagggcgacctgaggaacctgtgccgcctggcccgggagggcgtgctgggccggcgggcccagtttgctgagaaggagctggagcagctggagctgcggggcagcaaggtgcagaccctcttcctgagcaagaaggagctgcccggggtgctggagacagaggtgacctaccagttcatcgaccagagcttccaggagttcctggccgccctgagctacctgctggaggatggaggagtgcccaggacagctgctggaggagtgggcaccctgctgcggggagatgcccagccccacagccacctggtgctgaccacccgcttcctgtttggcctgctgtctgctgagaggatgagggacatcgagcggcacttcggctgcatggtgtctgagcgggtgaagcaggaggccctgcgctgggtgcagggccagggccagggctgccctggggtggcccctgaggtgacagagggcgccaagggcctggaggacacagaggagcctgaggaggaggaggagggggaggagcccaactaccccctggagctgctgtactgcctgtatgagacccaggaggatgcctttgtgcggcaggccctgtgccgcttccctgagctggccctgcagagggtgcgcttctgcaggatggatgtggccgtgctgagctactgtgtgcgctgctgcccagctggccaggccctgcggctcatcagctgccgcctggtggccgcccaggagaagaagaagaagagcctgggcaagaggctgcaggccagcctgggcggcggcagcagccagggcaccaccaagcagctgcctgccagcctgctgcaccccctcttccaggccatgacagaccccctgtgccacctgagcagcctgaccctgagccactgcaagctgcctgatgctgtgtgccgggacctgtctgaggccctgcgggccgccccagccctgacagagctgggcctgctgcacaaccggctgtctgaggccggcctgaggatgctgtctgagggcctggcctggccccagtgccgggtgcagacagtgcgggtgcagctgcctgacccccagaggggcctgcagtacctggtgggcatgctgcggcagagccctgccctgaccaccctggacctgagcggctgccagctgcctgcccccatggtgacctacctgtgtgctgtgctgcagcaccagggctgcggcctgcagaccctgagcctggcctctgtggagctgtctgagcagagcctgcaggagctgcaggccgtgaagagggccaagccagacctggtgatcacccacccagccctggatggccacccccagccccccaaggagctgatcagcaccttctag

SEQ ID NO: 22211 - DNA, 240 bp, synthetic construct
  source 1..240: mol_type = other DNA; note = Synthetic coding sequence
atgagccagagcggggctgtgtcctgctgccctggggccaccaacggcagcctgggccgcagtgatggagtggccaagatgagccccaaggacctgtttgagcagaggaagaagtacagcaacagcaatgtcatcatgcatgagaccagccagtaccacgtgcagcacctggccaccttcatcatggacaagtctgaggccatcacctctgtggatgatgccatcaggaagctggtgtag

SEQ ID NO: 22212 - DNA, 543 bp, synthetic construct
  source 1..543: mol_type = other DNA; note = Synthetic coding sequence
atgggagacaagaagagccccacccggcccaagaggcagcccaagcccagcagtgatgagggctactgggactgcagcgtgtgcaccttcagaaattctgctgaggccttcaagtgcatgatgtgtgatgtgaggaagggcaccagcaccaggaagcccaggcctgtgtcccagctggtggcccagcaggtgacccagcagtttgtgccccccacccagagcaagaaggagaagaaggacaaggtggagaaggagaagtctgagaaggagaccaccagcaagaagaacagccacaagaagacccggccccggctgaagaatgtggacaggagcagcgcccagcacctggaggtgacagtgggggacctgaccgtcatcatcacagacttcaaggagaagaccaagagccccccagccagcagcgctgccagcgctgaccagcacagccagagcggcagcagcagtgacaacacagagcggggcatgagccgcagcagcagccccagaggagaggccagcagcctgaatggagagagccactag

SEQ ID NO: 22213 - DNA, 2196 bp, synthetic construct
  source 1..2196: mol_type = other DNA; note = Synthetic coding sequence
atgggcagcggggaggagcccggccagagcggggccagcctgaggacaggccccatggtgcagggccggggcatcatgaccaccggcagcggccaggagcccggccagagcggcaccagcctgaggacaggccccatgggcagcctgggccaggccgagcaggtgtcctccatgcccatgggcagcctggagcacgagggcctggtgtccctgcggcctgtgggcctgcaggagcaggagggccccatgagcctgggccctgtgggcagcgctggccctgtggagaccagcaagggcctgctgggccaggagggcctggtggagatcgccatggacagccctgagcaggagggcctggtgggccccatggagatcaccatgggcagcctggagaaggccggccctgtgtccccaggctgtgtgaagctggccggccaggagggcctggtggagatggtgctgctgatggagcccggggccatgaggttcctgcagctgtaccacgaggacctgctggccggcctgggagatgtggccctgctgcccctggagggccctgacatgacaggcttccggctgtgtggggcccaggccagctgccaggccgctgaggagttcctgcggagcctgctgggcagcatcagctgccacgtgctgtgcctggagcaccctggcagcgcccgcttcctgctgggccctgagggccagcacctgctgcagggcctggaggcccagttccagtgtgtgtttggaacagagcggctggccacagccaccctggacaccggcctggaggaggtggaccccacagaggccctgcctgtgctgcctggaaatgcccacaccctgtggaccccagacagcactggaggagaccaggaggatgtgtccctggaggaggtgcgggagctgctggccaccctggagggcctggacctggatggagaggactggctgccccgggagctggaggaggagggcccccaggagcagcctgaggaggaggtgaccccaggccacgaggaggaggagcctgtggcccccagcacagtggccccccgctggctggaggaggaggccgccctgcagctggccctgcacaggagcctggagccccagggccaggtggccgagcaggaggaggccgccgccctgcggcaggccctgaccctgagcctgctggagcagccccccctggaggccgaggagcccccagatggcggcacagatggcaaggcccagctggtggtgcacagcgcctttgagcaggatgtggaggagctggaccgggccctgcgggccgccctggaggtgcacgtgcaggaggagaccgtgggcccctggaggaggaccctgcctgctgagctgcgggcccggctggagcgctgccacggcgtgtctgtggccctgcggggggactgcaccatcctgcggggctttggagcccacccagcccgggccgcccggcacctggtggccctgctggccggcccctgggaccagagcctggccttccccctggccgccagcggccccaccctggccggccagaccctgaagggcccctggaacaacctggagcggctggctgaaaatactggagagttccaggaggtggtgcgggccttctatgacaccctggatgctgcccggagcagcatccgggtggtgcgggtggagcgggtgagccaccccctgctgcagcagcagtatgagctgtaccgggagcggctgctgcagagatgtgagcggcggcctgtggagcaggtgctgtaccacggcaccacagccccagctgtgcctgacatctgtgcccacggcttcaacagaagcttctgtggcagaaatgccaccgtgtatggcaagggcgtgtactttgcccggcgggccagcctgtctgtgcaggaccgctacagccccccaaatgctgatggccacaaggctgtgtttgtggcccgggtgctgaccggggactatggccagggcagaagaggcctgcgggccccacccctgcggggccctggccacgtgctgctgcgctatgattctgctgtggactgcatctgccagcccagcatcttcgtcatcttccatgacacccaggccctgcccacccacctgatcacctgtgagcacgtgccccgggccagcccagatgaccccagcggcctgcccggccgcagcccagacacctag

SEQ ID NO: 22214 - DNA, 1083 bp, synthetic construct
  source 1..1083: mol_type = other DNA; note = Synthetic coding sequence
atgcaggtgtatgagggcctggacatcatcaccaacaaggtgtctgcccaggagcagaggatctgccgccaccacatgatcagctttgtggaccccctggtgaccaactacacagtggtggacttcaggaacagagccacagccctgatctacctgcctgagaccaagttcctgctgctgtgggaggagcccatcatcaccctgaacctgtgcagcggcaagttcctgagcatccccaggagcctgcaggtgtttgaggagaccggcatcagccacagcgagttcctgcaccggcagcacacagaggagggcggcggccccctgggcggccccctgaagttcagcaacccctgcatcctgtggctgcacgccgaccaggccgtgctggatgagcggctggacaagagggtggatgacatgctggccgccggcctgctggaggagctgcgggacttccaccggcgctacaaccagaagaatgtgtctgagaacagccaggactaccagcacggcatcttccagagcatcggcttcaaggagttccacgagtacctgatcacagagggcaagtgcaccctggagaccagcaaccagctgctgaagaagggcatcgaggccctgaagcaggtgaccaagagatatgccaggaagcagaaccgctgggtgaagaaccgcttcctgagccggcccggccccatcgtgccccctgtgtatggcctggaggtgtctgatgtgtccaagtgggaggagagcgtgctggagcccgccctggagatcgtgcagagcttcatccagggccacaagcccacagccacccccatcaagatgccctacaatgaagctgagaacaagaggagctaccacctgtgtgacctgtgtgaccgcatcatcatcggggaccgggagtgggccgcccacatcaagagcaagagccacctgaaccagctgaagaagagaagaaggctggacagtgatgctgtgaacaccatcgagagccagagcgtgtccccagaccacaacaaggagcccaaggagaagggcagccctggccagaatgaccaggagctgaagtgcagcgtgtag

SEQ ID NO: 22215 - DNA, 828 bp, synthetic construct; identical to SEQ ID NO: 21402
  source 1..828: mol_type = other DNA; note = Synthetic coding sequence

SEQ ID NO: 22216 - DNA, 1692 bp, synthetic construct
  source 1..1692: mol_type = other DNA; note = Synthetic coding sequence
atggagacagccaagcagaaggccctggaggtggccaacagactctaccagaaggacctgcgggccccagatgtggtgattggagctgacaccatcgtgacagtgggcggcctcatcctggagaagcctgtggacaagcaggatgcctacaggatgctgagccggctgagcggccgggagcacagcgtcttcaccggggtggccatcgtgcactgcagcagcaaggaccaccagctggacaccagggtgtctgagttctatgaggagaccaaggtgaagttcagcgagctgtctgaggagctgctgtgggagtatgtgcacagcggggagcccatggacaaggccggcggctacggcatccaggccctgggcggcatgctggtggagagcgtgcacggggacttcctgaatgtggtgggcttccccctgaaccacttctgcaagcagctggtgaagctgtactacccacccaggcctgaggacctgcggcgctctgtgaagcatgacagcatcccagctgctgacacctttgaggacctgagtgatgtggagggcggcggcagcgagcccacccagagagatgctggcagcagagatgagaaggccgaggccggggaggccggccaggccacagctgaggccgagtgccacaggacccgggagaccctgccccccttccccacccggctgctggagctgattgagggcttcatgctgagcaagggcctgctgacagcctgcaagctgaaggtgtttgacctgctgaaggatgaggccccccagaaggctgctgacatcgccagcaaggtggatgccagcgcctgtggcatggagcggctgctggacatctgtgccgccatgggcctgctggagaagacagagcagggctacagcaacacagaaacagccaacgtgtacctggccagtgatggagagtacagcctgcacggcttcatcatgcacaacaatgacctgacctggaacctcttcacctacctggagtttgccatccgggagggcaccaaccagcaccaccgggccctgggcaagaaggcagaagatctcttccaggatgcctactaccagagccctgagacccggctgcgcttcatgagggccatgcacggcatgaccaagctgacagcctgccaggtggccacagccttcaacctgagccgcttcagcagcgcctgtgatgtgggcggctgcaccggggccctggcccgggagctggcccgggagtaccccaggatgcaggtgacagtgtttgacctgcctgacatcatcgagctggccgcccacttccagcccccaggcccccaggccgtgcagatccactttgctgctggggacttcttccgggaccccctgcccagcgctgagctgtatgtgctgtgccgcatcctgcatgactggccagatgacaaggtgcacaagctgctgagccgggtggccgagagctgcaagccaggggccggcctgctgctggtggagaccctgctggatgaggagaagagggtggcccagagggccctgatgcagagcctgaacatgctggtgcagacagagggcaaggagaggagcctgggggagtaccagtgcctgctggagctgcacggcttccaccaggtgcaggtggtgcacctgggcggcgtgctggatgccatcctggccaccaaggtggccccctag

SEQ ID NO: 22217 - DNA, 828 bp, synthetic construct; identical to SEQ ID NO: 21402
  source 1..828: mol_type = other DNA; note = Synthetic coding sequence

SEQ ID NO: 22218 - DNA, 999 bp, synthetic construct
  source 1..999: mol_type = other DNA; note = Synthetic coding sequence
atggagtacctgggcggcggcagcgccctggacctgctgaagccaggccccctggaggagacctacatcgccaccatcctgcgggagatcctgaagggcctggactacctgcacagcgagaggaagatccaccgggacatcaaggccgccaacgtgctgctgtctgagcagggagatgtgaagctggccgactttggagtggccggccagctgacagacacccagatcaagaggaacacctttgtgggcacccccttctggatggcccctgaggtgatcaagcagagcgcctatgacttcaaggctgacatctggagcctgggcatcacagccatcgagctggccaagggggagccccccaacagcgacctgcaccccatgagggtgctcttcctgatccccaagaacagcccccccaccctggagggccagcacagcaagcccttcaaggagtttgtggaggcctgcctgaacaaggacccccgcttccggcccacagccaaggagctgctgaagcacaagttcatcacccgctacaccaagaagaccagcttcctgacagagctgattgaccgctacaagcgctggaagtctgagggccatggagaggagagcagcagcgaggacagcgacattgatggagaggctgaagatggagagcagggccccatctggaccttcccccccaccatccggcccagcccccacagcaagctgcacaagggcacagccctgcacagcagccagaagccagctgagcctgtgaagaggcagcccaggagccagtgcctgagcaccctggtgcggcctgtgtttggagagctgaaggagaagcacaagcagagcggcggctctgtgggcgccctggaggagctggagaatgccttcagcctggccgaggagagctgccccggcatcagtgacaagctgatggtgcacctggtggagcgggtgcagcgcttcagccacaacagaaaccacctgaccagcaccaggtag

SEQ ID NO: 22219 - DNA, 279 bp, synthetic construct
  source 1..279: mol_type = other DNA; note = Synthetic coding sequence
atgaacttcacccccacccacacccctgtgtgcaggaagaggacagtggtgtccaagaggggcgtggccgtgtctggccccaccaagaggcggggcatggctgacagcctggagagcacccccctgcccagccctgaggaccggctggccaagctgcaccccagcaaggagctgctggagtactaccagaagaagatggccgagtgtgaggccgagaatgaagacctgctgaagaagctggagctgtacaaggaggcctgtgagggccagcacaagtag

SEQ ID NO: 22220 - DNA, 429 bp, synthetic construct
  source 1..429: mol_type = other DNA; note = Synthetic coding sequence
atggcccagaaggaaaattcctacccctggccctacggccggcagacagcccccagcggcctgagcaccctgccccagagggtgctgaggaaggagcctgtgaccccatctgccctggtgctgatgagccgcagcaatgtgcagcccacagctgcccctggccagaaggtgatggagaacagcagcggcaccccagacatcctgacccggcggcacttcaccattgatgactttgagatcggccggcccctgggcaagggcaagtttggaaatgtgtacctggcccgggagaagaagagccacttcatcgtggccctgaaggtgctcttcaagagccagatcgagaaggagggcgtggagcaccagctgcggcgggagattgagatccaggcccacctgcagagctggaggtcctggcagatgctgtag

SEQ ID NO: 22221 - DNA, 501 bp, synthetic construct
  source 1..501: mol_type = other DNA; note = Synthetic coding sequence
atggaccaggaggacagcgagagcaagacagtgtctgagcacggggagcgggactggatgacagccaagaagttctggaagccaggggacagcctggcccctcctgaggtggactttgaccggctgctggccagcctgcaggacctgtctgagctggtggtggagggggacacccaggtgacccctgtgcctgggggcgcccggctgcggaccctggagcccatccccctgaagctgtacagaaatggcatcatgatgtttgatggccccttccagcccttctatgaccccagcacccagcgctgcctgcgggacatcctggatggcttcttccccagcgagctgcagaggctgtacccaaatggagtgcccttcaaggtgatcagctgcagcagcaaccacaccttcggggactttgagggcagcggggacacccagcccccccagaccccacccatcctgcggggcagccgctgcaccccctggggcacccctgtgtag

SEQ ID NO: 22222 - DNA, 1473 bp, synthetic construct
  source 1..1473: mol_type = other DNA; note = Synthetic coding sequence
atgcagagcctggatgatgccaccaagcagctggacttcaccaggaagaccctggccgagaagaagcaggagctggacaagctgagaaatgagtgggccagccacacagctgccctgaccaacaagcacagccaggagctgaccaatgagaaggagaaggccctgcaggcccaggtgcagtaccagcagcagcacgagcagcagaagaaggacctggagatcctgcaccagcagaacatccaccagctgcagaaccggctgtctgagctggaggccgccaacaaggacctgacagagaggaagtacaagggggacagcaccatccgggagctgaaggccaagctgagcggcgtggaggaggagctgcagaggaccaagcaggaggtgctgagcctgcggcgggagaacagcaccctggatgtggagtgccacgagaaggagaagcacgtgaaccagctgcagaccaaggtggccgtgctggagcaggagatcaaggacaaggaccagctggtgctgcggaccaaggaggcctttgacaccatccaggagcagaaggtggtgctggaggagaatggagagaagaaccaggtgcagctgggcaagctggaggccaccatcaagagcctgtctgctgagctgctgaaggccaatgagatcatcaagaagctgcagggcgacctgaagaccctgatgggcaagctgaagctgaagaacacagtgaccatccagcaggagaagctgctggccgagaaggaggagaagctgcagaaggagcagaaggagctgcaggatgtgggccagagcctgcgcatcaaggagcaggaggtgtgcaagctgcaggagcagctggaggccaccgtgaagaagctggaggagagcaagcagctgctgaagaacaatgagaagctgatcacctggctgaacaaggagctgaatgaaaaccagctggtgaggaagcaggatgtgctgggccccagcaccaccccaccagcccacagcagcagcaacaccatccgcagcggcatcagccccaacctgaatgtggtggatggccgcctgacctaccccacctgtggcatcggctaccctgtgagcagcgcctttgccttccagaacaccttcccccacagcatcagcgccaagaacaccagccaccctggcagcggcaccaaggtgcagttcaacctgcagttcaccaagcccaatgccagcctgggagatgtgcagagcggggccaccatctccatgccctgcagcacagacaaggaaaatggagaaaatgtgggcctggagagcaagtacctgaagaagagagaagattccatccccctgcggggcctgagccagaacctcttcagcaacagcgaccaccagagagatggcaccctgggcgccctgcacaccagcagcaagcccacagccctgcccagcgccagcagcgcctacttccctggccagctgcccaacagctag

SEQ ID NO: 22223 - DNA, 3015 bp, synthetic construct
  source 1..3015: mol_type = other DNA; note = Synthetic coding sequence
atgctgaggacagctggaagagatggcctgtgccgcctgagcacctacctggaggagctggaggccgtggagctgaagaagttcaagctgtacctgggcacagccacagagctgggggagggcaagatcccctggggctccatggagaaggccggccccctggagatggcccagctgctgatcacccacttcggccctgaggaggcctggaggctggccctgagcacctttgagcgcatcaacaggaaggacctgtgggagcggggccagcgggaggacctggtgcgggacaccccacctgggggccccagcagcctgggcaaccagagcacctgcctgctggaggtgtccctggtgacccccaggaaggacccccaggagacctacagagattatgtgcggaggaagttccggctgatggaggacagaaatgcccggctgggagaatgtgtgaacctgagccaccgctacacccggctgctgctggtgaaggagcacagcaaccccatgcaggtgcagcagcagctgctggacaccggccggggccacgccaggacagtgggccaccaggccagccccatcaagattgagaccctgtttgagccagatgaggagaggcctgagccccccaggacagtggtgatgcagggcgctgctggcatcggcaagtccatgctggcccacaaggtgatgctggactgggcagatggcaagctgttccagggccgctttgactacctgttctacatcaactgccgggagatgaaccagagcgccacagaatgttccatgcaggacctgatcttcagctgctggccagagcccagcgcccccctgcaggagctgatccgggtgcctgagcggctgctcttcatcattgatggctttgatgagctgaagcccagcttccatgacccccagggcccctggtgcctgtgctgggaggagaagaggcccacagagctgctgctgaacagcctcatcaggaagaagctgctgcctgagctgagcctgctgatcaccacccggcccacagccctggagaagctgcaccggctgctggagcaccccaggcatgtggagatcctgggcttcagcgaggccgagaggaaggagtacttctacaagtacttccacaatgctgagcaggccggccaggtgttcaactacgtgcgggacaatgagcccctcttcaccatgtgctttgtgcccctggtgtgctgggtggtgtgcacctgcctgcagcagcagctggagggcggcggcctgctgcggcagaccagcaggaccaccacagctgtgtacatgctgtacctgctgagcctgatgcagcccaagccaggggccccccggctgcagcccccacccaaccagaggggcctgtgcagcctggccgcagatggcctgtggaaccagaagatcctgtttgaggagcaggacctgaggaagcacggcctggatggagaagatgtgtctgccttcctgaacatgaacatcttccagaaggacatcaactgtgagcgctactacagcttcatccacctgtccttccaggagttctttgctgccatgtactacatcctggatgaaggagagggcggggccggccctgaccaggatgtgacccggctgctgacagaatatgccttcagcgagaggagcttcctggccctgaccagccgcttcctgtttggcctgctgaatgaggagaccaggagccacctggagaagagcctgtgctggaaggtgagcccccacatcaagatggacctgctgcagtggatccagagcaaggcccagagtgatggcagcaccctgcagcagggcagcctggagttcttcagctgcctgtatgagatccaggaggaggagttcatccagcaggccctgagccacttccaggtgattgtggtgagcaacatcgccagcaagatggagcacatggtgtcctccttctgcctgaagcgctgccgcagcgcccaggtgctgcacctgtatggagccacctacagcgcagatggagaagatcgggcccgctgcagcgctggggcccacaccctgctggtgcagctgcctgagaggacagtgctgctggatgcctacagcgagcacctggccgccgccctgtgcaccaaccccaacctgattgagctgagcctgtacagaaatgccctgggcagcagaggagtgaagctgctgtgccagggcctgcggcaccccaactgcaagctgcagaacctgcggctgaagcgctgccgcatcagcagcagcgcctgtgaggacctgtctgctgccctgattgccaacaagaacctgaccaggatggacctgtctggaaatggagtgggcttccctggcatgatgctgctgtgtgagggcctgcggcacccccagtgccgcctgcagatgatccagctgaggaagtgccagctggagagcggggcctgccaggagatggcctctgtgctgggcaccaacccccacctggtggagctggacctgactggaaatgccctggaggacctgggcctgcggctgctgtgccagggcctgcggcaccctgtgtgccgcctgcggaccctgtggctgaagatctgccgcctgacagctgctgcctgtgatgagctggccagcaccctgtctgtgaaccagagcctgcgggagctggacctgagcctgaatgagctgggggacctgggcgtgctgctgctgtgtgagggcctgcggcaccccacctgcaagctgcagaccctgcggctgggcatctgccgcctgggcagcgctgcctgtgagggcctgtctgtggtgctgcaggccaaccacaacctgcgggagctggacctgtccttcaatgacctgggggactggggcctgtggctgctggccgagggcctgcagcacccagcctgccgcctgcagaagctgtggctgtttggcatggacctgaacaagatgacccacagccggctggccgccctgcgggtgaccaagccctacctggacatcggctgctag

SEQ ID NO: 22224 - DNA, 2517 bp, synthetic construct; identical to SEQ ID NO: 19107
  source 1..2517: mol_type = other DNA; note = Synthetic coding sequence

SEQ ID NO: 22225 - DNA, 165 bp, synthetic construct
  source 1..165: mol_type = other DNA; note = Synthetic coding sequence
atgggcaacagcgacagccagtacaccctgcagggcagcaagaaccacagcaacaccatcactggagccaagcagatcccctgcagcctgaagatccggggcatccacgccaaggaggagaagagcctgcacggctggggccacggcagcaatggagctggatag

SEQ ID NO: 22226 - DNA, 1269 bp, synthetic construct
  source 1..1269: mol_type = other DNA; note = Synthetic coding sequence
atggccagcctgagccgggccctgcgggtggccgccgcccacccccggcagagccccacccggggcatgggcccctgcaacctgagcagcgctgctggccccacagctgagaagtctgtgccctaccagaggaccctgaaggagggccagggcacctctgtggtggcccagggccccagccggcccctgcccagcacagccaacgtggtggtgattggaggcggcagcctgggctgccagaccctgtaccacctggccaagctgggcatgtctggagctgtgctgctggagcgggagcggctgaccagcggcaccacctggcacacagctggcctgctgtggcagctgcggcccagtgatgtggaggtggagctgctggcccacacccggcgggtggtgtcccgggagctggaggaggagaccggcctgcacacaggctggatccagaatggaggcctcttcatcgccagcaaccggcagaggctggatgagtacaagaggctgatgagcctgggcaaggcctatggagtggagagccacgtgctgagccctgctgagaccaagaccctgtaccccctgatgaatgtggatgacctgtatggcaccctgtatgtgccccatgatggcaccatggaccctgctggcacctgcaccaccctggcccgggccgccagcgcccggggggcccaggtgattgagaactgccctgtgacaggcatccgggtgtggacagatgactttggagtgcggcgggtggccggcgtggagacccagcacggcagcatccagaccccctgtgtggtgaactgtgccggcgtgtgggccagcgctgtgggccgcatggccggcgtgaaggtgcccctggtggccatgcaccacgcctacgtggtgacagaaagaattgagggcatccagaacatgcccaacgtgcgggaccatgatgcctctgtgtacctgcggctgcagggagatgccctgtctgtgggcggctatgaggccaaccccatcttctgggaggaggtgtctgacaagtttgccttcggcctgtttgacctggactgggaggtgttcacccagcacattgaaggagccatcaacagagtgcctgtgctggagaagacaggcatcaagagcacagtgtgtggccctgagagcttcaccccagaccacaagcccctgatgggagaggcccctgagctgcggggcttcttcctgggctgcggcttcaacagcgctggggagagcggccaggccctgctggccccctag

SEQ ID NO: 22227 - DNA, 327 bp, synthetic construct
  source 1..327: mol_type = other DNA; note = Synthetic coding sequence
atgtccatgctgaagcccagcggcctgaaggcccccaccaagatcctgaagccaggcagcacagccctgaagacccccacagctgtggtggcccctgtggagaagaccatcagcagcgagaaggccagcagcacccccagcagcgagacccaggaggagtttgtggatgacttccgggtgggggagcgggtgtgggtgaatggaaacaagccaggcttcatccagttcctgggggagacccagtttgcccctggccagtgggccggcatcgtgctggatgagcccatcggcaagaatgatggctctgtggccggcgtgcgctactag

SEQ ID NO: 22228 - DNA, 2148 bp, synthetic construct
  source 1..2148: mol_type = other DNA; note = Synthetic coding sequence
atgaagaggggccgcctgcccagcagcagtgaagattctgatgacaatggcagcctgagcaccacctggagccagaacagccgcagccagcaccggcgcagcagctgcagcagacatgaggacaggaagcccagcgaggtgttcagaacagacctgatcacagccatgaagctgcatgacagctaccagctgaacccagatgagtactacgtgctggccgacccctggaggcaggagtgggagaagggcgtgcaggtgcctgtgtccccaggcaccatcccccagcctgtggcccgggtggtgtctgaggagaagagcctgatgttcatccggcccaagaagtacatcgtgagcagcggcagcgagcccccagagctgggctacgtggacatccgcaccctggccgacagcgtgtgccgctatgacctgaatgacatggatgctgcctggctggagctgaccaatgaggagttcaaggagatgggcatgcctgagctggatgagtacaccatggagcgggtgctggaggagtttgagcagcgctgctatgacaacatgaaccacgccatcgagacagaggagggcctgggcatcgagtatgatgaagatgtggtgtgtgatgtgtgccagagcccagatggagaagatggaaatgagatggtgttctgtgacaagtgcaacatctgtgtgcaccaggcctgctacggcatcctgaaggtgcctgagggctcctggctgtgcaggacctgtgccctgggcgtgcagcccaagtgcctgctgtgccccaagaagggcggggccatgaagcccaccaggagcggcaccaagtgggtgcacgtgtcctgtgccctgtggatccctgaggtgtccatcggcagccctgagaagatggagcccatcaccaaggtgagccacatccccagcagccgctgggccctggtgtgcagcctgtgcaatgagaagtttggagccagcatccagtgcagcgtgaagaactgcaggacagccttccacgtgacctgtgcctttgaccggggcctggagatgaagaccatcctggctgaaaatgatgaggtgaagttcaagagctactgccccaagcacagcagccacaggaagccagaggagagcctgggcaagggggccgcccaggagaatggagcccctgagtgcagccccaggaaccccctggagccctttgccagcctggagcagaaccgggaggaggcccaccgggtgtctgtgaggaagcagaagctgcagcagctggaggatgagttctacacctttgtgaacctgctggatgtggcccgggccctgcggctgcctgaggaggtggtggacttcctgtaccagtactggaagctgaagaggaaggtgaacttcaacaagcccctcatcacccccaagaaggatgaggaggacaacctggccaagcgggagcaggatgtgctcttccggcggctgcagctgttcacccacctgcggcaggacctggagcgggtgaggaacctgacctacatggtgacccggcgggagaagatcaagaggtctgtgtgcaaggtgcaggagcagatcttcaacctgtacaccaagctgctggagcaggagcgggtgtctggagtgcccagcagctgcagcagcagcagcctggagaacatgctgctcttcaacagccccagcgtgggcccagatgcccccaagattgaggacctgaagtggcacagcgccttcttcaggaagcagatgggcaccagcctggtgcacagcctgaagaagccccacaagagggaccccctgcagaacagccctggcagcgagggcaagaccctgctgaagcagcctgacctgtgtggccggcgggagggcatggtggtgcctgagagcttcctgggcctggagaagacctttgctgaggcccggctcatcagcgcccagcagaagaatggagtggtgatgccagaccacggcaagagaagagacaaccgcttccactgtgacctgatcaagggggacctgaaggacaagagcttcaagcagagccacaagcccctgcggagcacagatgtgtcccagaggcacctggacaacaccagggctgctgccatctggaggttccgggtcatctggcagggccctgctgcctag

SEQ ID NO: 22229 - DNA, 162 bp, synthetic construct
  source 1..162: mol_type = other DNA; note = Synthetic coding sequence
atgggcagaagaagcaccagcagcaccaagagcggcaagttcatgaaccccacagaccaggccaggaaggaggccaggaagcgggagctgaagaagaacaagaagcagaggatgatggtgcgggctgctgtgctgaagatgaaggaccccaagcagatctag

SEQ ID NO: 22230 - DNA, 1035 bp, synthetic construct
  source 1..1035: mol_type = other DNA; note = Synthetic coding sequence
atgaccaccaggtctgtgctggatgtggagacctttgtggccgacatcctgaagggggagaacctgagcaagaaggccaaggagaagcgggagagcctcatcaagaagatcaaggatgtgaagagcatctacctgcaggagttccaggacaagggagatgctgaagatggagaggagtatgatgacccctttgctggccccccagacaccatcagcctggccagcgagagatatgacaaggatgatgaggcccccagtgatggagcccagttcccccccatcgccgcccaggacctgccctttgtgctgaaggccggctacctggagaagaggaggaaggaccacagcttcctgggctttgagtggcagaagcgctggtgtgccctgagcaagacagtgttctactactacggcagtgacaaggacaagcagcagaagggggagtttgccattgatggctacagcgtgaggatgaacaacaccctgaggaaggatggcaagaaggactgctgctttgagatcagcgccccagacaagaggatctaccagttcaccgctgccagccccaaggatgctgaggagtgggtgcagcagctgaagtttgtgctgcaggacatggagagtgacatcatcccagaagattatgatgagcggggggagctgtatgatgatgtggaccaccccctgcccatcagcaaccccctgaccagcagccagcccattgatgatgagatctatgaggagctgcctgaggaggaggaggacagcgcccctgtgaaggtggaggagcagaggaagatgagccaggacagcgtgcaccacaccagcggggacaagagcacagattatgccaacttctaccagggcctgtgggactgcaccggggccttcagtgatgagctgtccttcaagagaggagatgtgatctacatcctgagcaaggagtacaacagatatggctggtgggtgggggagatgaagggggccatcggcctggtgcccaaggcctacatcatggagatgtatgacatctag

SEQ ID NO: 22231 - DNA, 2868 bp, synthetic construct; identical to SEQ ID NO: 20349
  source 1..2868: mol_type = other DNA; note = Synthetic coding sequence

SEQ ID NO: 22232 - DNA, 834 bp, synthetic construct
  source 1..834: mol_type = other DNA; note = Synthetic coding sequence
atgctgagccagaaggaggtggccgtggctgatgccaagaagagcctggagctgaaccccaacaacagcacagccatgctgaggaagggcatctgtgagtaccacgagaagaactatgctgctgccctggagaccttcacagagggccagaagctggacagcgcagatgccaacttctctgtgtggatcaagcgctgccaggaggcccagaatggaagtgaaagtgaggtgtggacccaccagagcaagatcaagtatgactggtaccagacagagagccaggtggtgatcaccctgatgatcaagaatgtgcagaagaatgatgtgaatgtggagttcagcgagaaggagctgagcgccctggtgaagctgcccagcggggaggactacaacctgaagctggagctgctgcaccccatcatccctgagcagagcaccttcaaggtgctgagcaccaagattgagatcaagctgaagaagccagaggccgtgcgctgggagaagctggagggccagggagatgtgcccacccccaagcagtttgtggctgatgtgaagaacctgtaccccagcagcagcccctacaccaggaactgggacaagctggtgggggagatcaaggaggaggagaagaatgagaagctggagggagatgctgccctgaacagactcttccagcagatctacagtgatggcagtgatgaggtgaagagggccatgaacaagagcttcatggagagcggcggcaccgtgctgagcaccaactggagcgatgtgggcaagaggaaggtggagatcaaccccccagatgacatggagtggaagaagtactag

SEQ ID NO: 22233 - DNA, 807 bp, synthetic construct
  source 1..807: mol_type = other DNA; note = Synthetic coding sequence
atgggcagcgccaagtctgtgcctgtgaccccagcccggcccccaccccacaacaagcacctggcccgggtggccgaccccaggagccccagcgctggcatcctgcggacccccatccaggtggagagcagcccccagcccggcctgcctgctggggagcagctggagggcctgaagcacgcccaggacagcgaccccaggagccccaccctgggcatcgcccggacccccatgaagaccagcagcggggacccccccagccccctggtgaagcagctgtctgaggtgtttgaaacagaggacagcaagagcaacctgcccccagagcctgtgctgcccccagaggcccccctgagcagcgagctggacctgcccctgggcacccagctgtctgtggaggagcagatgccaccctggaaccagacagagttccccagcaagcaggtgttcagcaaggaggaggcccggcagcccacagagacccctgtggccagccagagcagtgacaagcccagccgggaccctgagacccccaggagcagcggctccatgaggaaccgctggaagcccaacagcagcaaggtgctgggccgcagccccctgaccatcctgcaggatgacaacagccctggcaccctgaccctgcggcagggcaagaggcccagccccctgtctgaaaatgtgtctgagctgaaggagggcgccatcctgggcaccggccgcctgctgaagacaggaggccgggcctgggagcagggccaggaccatgacaaggagaaccagcacttccccctggtggagagctag

SEQ ID NO: 22234 - DNA, 1140 bp, synthetic construct
  source 1..1140: mol_type = other DNA; note = Synthetic coding sequence
atggtgttcaagctgaagaccaaggaggagcagcacagcatgctgggcagcggcttcaaggccgagcggctgcgggtgaacctgcggctggtgatcaaccggctgaagctgctggagaagaagaagacagagctggcccagaaggccaggaaggagattgctgactacctggccgccggcaaggatgagcgggcccgcatccgggtggagcacatcatccgggaggactacctggtggaggccatggagatcctggagctgtactgtgacctgctgctggcccgcttcggcctcatccagagcatgaaggagctggacagcggcctggccgagagcgtgtccaccctcatctgggccgccccccggctgcagagcgaggtggccgagctgaagatcgtggccgaccagctgtgtgccaagtacagcaaggagtatggcaagctgtgcaggaccaaccagatcggcaccgtgaatgaccggctgatgcacaagctgtctgtggaggccccacccaagatcctggtggagcgctacctgattgagatcgccaagaactacaacgtgccctatgagccagacagcgtggtgatggccgaggcccctcctggggtggagacagacctgattgatgtgggcttcacagatgatgtgaagaagggcggccctggccggggcggcagcggcggcttcaccgcccctgtgggcggcccagatggcaccgtgcccatgcccatgcccatgcccatgcccatgcccagcgccaacacccccttctcctaccccctgcccaagggccccagcgacttcaacggcctgcccatgggcacctaccaggccttccccaacatccaccccccccagatcccagccaccccacccagctatgaatctgtggatgacatcaatgctgacaagaacatcagcagcgcccagatcgtgggccctggccccaagccagaggccagcgccaagctgcccagcaggcctgctgacaactatgacaactttgtgctgcctgagctgcccagcgtgcctgacaccctgcccacagccagcgctggggccagcaccagcgcctctgaagatattgactttgatgacctgagccgccgctttgaggagctgaagaagaagacctag

SEQ ID NO: 22235 - DNA, 903 bp, synthetic construct
  source 1..903: mol_type = other DNA; note = Synthetic coding sequence
atggcccggcccctgagcacccccagcagcagccagatgcaggccaggaagaagcaccggggcatcatcgagaagagaagaagagaccgcatcaacagcagcctgtctgagctgcggcggctggtgcccacagcctttgagaagcagggcagcagcaagctggagaaggccgaggtgctgcagatgacagtggaccacctgaagatgctgcacgccactggaggcaccggcttctttgatgcccgggccctggccgtggacttccgcagcatcggcttcagagaatgtctgacagaggtgatccgctacctgggcgtgctggagggccccagcagcagagctgaccctgtgcgcatccggctgctgagccacctgaacagctatgctgctgagatggagcccagccccacccccaccggccccctggccttccctgcctggccctggagcttcttccacagctgccccggcctgcctgccctgagcaaccagctggccatcctgggccgggtgcccagccctgtgctgcccggggtgagcagccctgcctaccccatcccagccctgaggacagcccccctgcggcgggccaccggcatcatcctgcctgccaggagaaatgtgctgcccagcagaggagccagcagcacccggcgggcccggcccctggagaggcctgccacccctgtgcctgtggcccccagcagccgggccgcccggagcagccacatcgcccccctgctgcagagcagcagccccaccccacctggccccactggatctgctgcctacgtggccgtgcccacccccaacagcagcagccctggccctgctggccggcctgctggggccatgctgtaccacagctgggtgtctgagatcacagaaattggagccttctag

SEQ ID NO: 22236 - DNA, 318 bp, synthetic construct
  source 1..318: mol_type = other DNA; note = Synthetic coding sequence
atgtctgtggtgccccccaacagaagccagacaggctggccccggggcgtgacccagtttggaaacaagtacatccagcagaccaagcccctgaccctggagaggaccatcaacctgtaccccctgaccaactacaccttcggcaccaaggagcccctgtatgagaaggacagctctgtggccgcccgcttccagaggatgagggaggagtttgacaagattggcatgagaagaacagtggagggcgtgctgattgtgcatgagcaccggctgccccacgtgctgctgctgagccgcttcaacttcatctacaactag

SEQ ID NO: 22237 - DNA, 588 bp, synthetic construct
  source 1..588: mol_type = other DNA; note = Synthetic coding sequence
atgggcaacagcgacagccagtacaccctgcagggcagcaagaaccacagcaacaccatcactggagccaagcagatcccctgcagcctgaagatccggggcatccacgccaaggaggagaagagcctgcacggctggggccacggcagcaatggagctggctacaagagccgcagcctggcccggagctgcctgagccacttcaagagcaaccagccctatgccagccggctgggcggccccacctgcaaggtgtcccggggcgtggcctacagcacccacaggaccaatgcccctgggaaggacttccagggcatctctgctgccttcagcacagaaaatggcttccacagcgtgggccacgagctggccgacaaccacatcaccagccgggactgcaatggccacctgctgaactgctatggaagaaatgaaagcatcgccagcaccccacctggagaggacaggaagagcccccgggtgctgatcaagaccctgggcaagctggatggctgcctgcgggtggagttccacaatggaggcaaccccagcaaggtgcctgctgaggactgcagcgagcctgtgtag

SEQ ID NO: 22238 - DNA, 1581 bp, synthetic construct
  source 1..1581: mol_type = other DNA; note = Synthetic coding sequence
atggtgcctggagaggagaaccagctggtgcccaaggaggatgtgttctggcgctgccggcagaacatctttgatgagatgaagaagaagttcctgcagattgaaaatgctgctgaggagccccgggtgctgtgcatcatccaggacaccaccaacagcaagacagtgaatgaaagaatcaccctgaacctgcctgccagcacccctgtgaggaagctgtttgaagatgtggccaacaaggtgggctacatcaatggcacctttgacctggtgtggggcaatggcatcaacacagctgacatggcccccctggaccacaccagtgacaagagcctgctggatgccaactttgagcccgggaagaagaacttcctgcacctgacagacaaggatggagagcagccccagatcctgctggaggacagcagcgctggggaggacagcgtgcatgaccgcttcatcggccccctgccccgggagggcagcggcggcagcaccagtgactatgtgtcccagagctacagctacagcagcatcctgaacaagtcagaaacaggctacgtgggcctggtgaaccaggccatgacctgctacctgaacagcctgctgcagaccctcttcatgaccccagagttcagaaatgccctgtacaagtgggagtttgaggagagcgaggaggaccctgtgaccagcatcccctaccagctgcagaggctgtttgtgctgctgcagaccagcaagaagagggccatcgagaccacagatgtgaccaggagctttggctgggacagcagcgaggcctggcagcagcatgatgtgcaggagctgtgccgggtgatgtttgatgccctggagcagaagtggaagcagacagagcaggccgacctgatcaatgagctgtaccagggcaagctgaaggactatgtgcgctgcctggagtgtggctatgagggctggagaattgacacctacctggacatccccctggtgatccggccctacggcagcagccaggcctttgcctctgtggaggaggccctgcacgccttcatccagcctgagatcctggatggccccaaccagtacttctgtgagcgctgcaagaagaagtgtgatgccaggaagggcctgcgcttcctgcacttcccctacctgctgaccctgcagctgaagagatttgattttgactacaccaccatgcaccgcatcaagctgaatgacaggatgaccttccctgaggagctggacatgagcaccttcattgatgtggaggatgagaagagcccccagacagagagctgcacagattctggagcagaaaatgaaggcagctgccacagcgaccagatgagcaatgacttcagcaatgatgatggagtggatgagggcatctgcctggagaccaacagcggcacagagaagatcagcaagagcggcctggagaagaacagcctcatctatgagctgttctctgtgatggtgcacagcggcagcgctgctgggggccactactatgcctgcatcaagagctctgtgatgagcagcggcacagcctccatgatcaacatgtctgctggatag

SEQ ID NO: 22239 - DNA, 963 bp, synthetic construct
  source 1..963: mol_type = other DNA; note = Synthetic coding sequence
atgggcaaggagcaggagctgctggaggccgccaggacaggccacctgcctgctgtggagaagctgctgagcggcaagaggctgagcagcggctttggaggcggcggcggcggcggcagcggcggcggcggcggcggcagcggcggcggcggcggcggcctgggcagcagcagccaccccctgagcagcctgctgtccatgtggaggggccccaacgtgaactgtgtggacagcacaggctacacccccctgcaccacgccgccctgaatggccacaaggatgtggtggaggtgctgctgagaaatgatgccctgaccaacgtggccgacagcaagggctgctaccccctgcacctggccgcctggaagggagatgcccagatcgtgcggctgctgatccaccagggccccagccacaccagggtgaatgagcagaacaatgacaatgaaacagccctgcactgtgccgcccagtatggccacacagaggtggtgaaggtgctgctggaggagctgacagaccccaccatgaggaacaacaagtttgagacccccctggacctggccgccctgtatggccgcctggaggtggtgaagatgctgctgaatgcccaccccaacctgctgagctgcaacaccaagaagcacacccccctgcacctggccgccagaaatggccacaaggctgtggtgcaggtgctgctggatgctggcatggacagcaactaccagacagagatgggcagcgccctgcacgaggccgccctgtttgggaagacagatgtggtgcagatcctgctggccgccggcacagatgtgaacatcaaggacaaccacggcctgacagccctggacacagtgcgggagctgcccagccagaagagccagcagattgctgccctgattgaggacctggacaccctgcagttctacttcatcagctgccccttccagggcctgtag

SEQ ID NO: 22240 - DNA, 660 bp, synthetic construct
  source 1..660: mol_type = other DNA; note = Synthetic coding sequence
atggtgatccacaagaaccccccagacacccccacagagagccagttcacccgcttcctgtgcagcagccccctggaggccgagaccccacccaacggccctgactgtggctacggcagcttccaccagcagtactggctggatggcaagatcatcgctgtgggcgtgattgacatcctgcccaactgtgtgtcctctgtgtacctgtactatgaccctgactacagcttcctgagcctgggcgtgtacagcgccctgcgggagatcgccttcacccggcagctgcacgagaagaccagccagctgagctactactacatgggcttctacatccacagctgccccaagatgaagtacaagggccagtaccggcccagcgacctgctgtgcccagagacctacgtgtgggtgcccatcgagcagtgcctgcccagcctggagaacagcaagtactgccgcttcaaccaggaccctgaggccgtggatgaagatagaagcacagagccagaccggctgcaggtgttccacaagagggccatcatgccctatggagtgtacaagaagcagcagaaggaccccagcgaggaggccgctgtgctgcagtatgccagcctggtgggccagaagtgcagcgagaggatgctgctcttcaggaactag

SEQ ID NO: 22241 - DNA, 1791 bp, synthetic construct
  source 1..1791: mol_type = other DNA; note = Synthetic coding sequence
atgcagcagaaggagctgggcacctttgcccagagcagcatcgccctgcaccaccagtacaaccccaagttccagaccctcttccagccctgcaacctgatgggcgccatgcagctgattgaggacttcagcacccacgtgtccattgactgcagcccccacaagacagtgaagaagacagccaatgagttcccctgcctgcccaagcaggtggcctggatcctggccaccagcaaggtgttcatgtacccagagctgctgcctgtgtgcagcctgaaggccaagaacccccaggacaagatcctcttcaccaaggccgaggacaacaagtacctgctgacctgcaagacagcccggcagctgactgtgcgcatcaagaacctgaacatgaacagagccccagacaacatcatcaagttctacaagaagaccaagcagctgcctgtgctgggcaagtgctgtgaggagatccagccccaccagtggaagccacccatcgagcgggaggagcaccggctgcccttctggctgaaggccagcctgcccagcatccaggaggagctgcggcacatggctgatggagcccgggaggtgggcaacatgacaggcaccacagagatcaacagcgaccagggcctggagaaggacaacagcgagctgggcagcgagacccgctaccccctgctgctgcccaagggcgtggtgctgaagctgaagcctgtggccgaccgcttccccaagaaggcctggaggcagaagaggagctctgtgctgaagcccctgctgatccagcccagccccagcctgcagcccagcttcaaccctgggaagaccccagcccagagcacccacagcgaggccccacccagcaagatggtgctgcgcatcccccaccccatccagcctgccaccgtgctgcagacagtgcctggggtgccccccctgggcgtgtctggaggagagagctttgagagccctgctgccctgcctgccatgcctcctgaggcccggaccagcttccccctgtctgagagccagaccctgctgagcagcgcccctgtgcccaaggtgatgatgcccagccctgccagctccatgttcaggaagccctacgtgagaagaagacccagcaagagaagaggagcccgggccttccgctgcatcaagccagcccctgtgatccacccagccagcgtcatcttcaccgtgcctgccaccaccgtgaagatcgtgtccctgggcggcggctgcaacatgatccagcctgtgaatgctgctgtggcccagagcccccagaccatccccatcgccaccctgctggtgaaccccaccagcttcccctgccccctgaaccagcccctggtggccagctctgtgagccccctgattgtgtctggcaacagcgtgaacctgcccatccccagcaccccagaggacaaggcccacatgaatgtggacatcgcctgtgctgtggctgatggagaaaatgccttccagggcctggagcccaagctggagccccaggagctgagccccctgagcgccaccgtcttccccaaggtggagcacagccctggccccccacctgtggacaagcagtgccaggagggcctgtctgagaacagcgcctaccgctggacagtggtgaagacagaggagggccggcaggccctggagcccctgccccagggcatccaggagagcctgaacaacagcagccctggggacctggaggaggtggtgaagatggagccagaagatgccacagaggagatcagcggcttcctgtag

SEQ ID NO: 22242 - DNA, 912 bp, synthetic construct
  source 1..912: mol_type = other DNA; note = Synthetic coding sequence
atggctgacaagagcaagttcatcgagtacattgatgaggccctggagaagagcaaggagacagccctgagccacctgttcttcacctaccagggcatcccctaccccatcaccatgtgcaccagcgagaccttccaggccctggacacctttgaggcccggcatgatgacatcgtgctggccagctaccccaagtgtggcagcaactggatcctgcacatcgtgtctgagctgatctatgctgtgtccaagaagaagtacaagtacccagagttccctgtgctggagtgtggggacagcgagaagtaccagaggatgaagggcttccccagcccccgcatcctggccacccacctgcactatgacaagctgcccggcagcatctttgagaacaaggccaagatcctggtgatcttcaggaaccccaaggacacagctgtgtccttcctgcacttccacaatgatgtgcctgacatccccagctatggctcctgggatgagttcttccggcagttcatgaagggccaggtgtcctggggccgctactttgattttgccatcaactggaacaagcacctggatggagacaacgtgaagttcatcctgtatgaggacctgaaggagaacctggccgccggcatcaagcagattgctgagttcctgggcttcttcctgaccggggagcagatccagaccatctctgtgcagagcaccttccaggccatgagggccaagagccaggacacccacggggctgtgggccccttcctgttcaggaagggggaggtgggggactggaagaacctcttcagcgagatccagaaccaggagatggatgagaagttcaaggagtgcctggccggcaccagcctgggcgccaagctgaagtatgagagctactgccagggctag

SEQ ID NO: 22243 - DNA, 366 bp, synthetic construct
  source 1..366: mol_type = other DNA; note = Synthetic coding sequence
atgggcgtgcctgagatccctggagagaagctggtgacagaaagaaacaagaagaggctggagaaggagaagcatgagaagggggcccagaagacagactgccagaagaacctgggcaccgtgggcgctgtggccctggactgcaagggaaatgtggcctatgccaccagcactggaggcatcgtgaacaagatggtgggccgggtgggggacagcccctgcctgggccgcaccaagggctgcctgctgcccctgcccctcttcagccggccccaggccttcctgaccctgtacagcctgcccctgtctgtgtcctgctgcgtgcccttcctgctgctggtgcagctgcaggatgtgtgggagtag

SEQ ID NO: 22244 - DNA, 579 bp, synthetic construct
  source 1..579: mol_type = other DNA; note = Synthetic coding sequence
atgaccctgggcagcaagagccagcagcccccagaggacatcaaggccctgtcctggaaccggcaggcccagcacatcctgagcagcgcccaccccagcggcaaggctgtggtgtgggacctgaggaagaatgagcccatcatcaaggtgtctgaccacagcaacaggatgcactgcagcggcctggcctggcacccagacatcgccacccagctggtgctgtgcagtgaagatgaccggctgcccgtcatccagctgtgggacctgcgctttgccagcagccccctgaaggtgctggagagccacagccggggcatcctgtctgtgtcctggagccaggctgatgctgagctgctgctgaccagcgccaaggacagccagatcctgtgcaggaacctgggcagcagcgaggtggtgtacaagctgcccacccagagctcctggtgctttgatgtgcagtggtgcccccgggaccccagcgtcttctctgctgccagcttcaacggctggatcagcctgtacagcgtgatgggccgctcctgggaggtgcagcacatgaggcaggccgacaaggtgtag

SEQ ID NO: 22245 - DNA, 621 bp, synthetic construct
  source 1..621: mol_type = other DNA; note = Synthetic coding sequence
atgaaggatgtggacaacctgaagagcatcaaggaggagtgggtgtgtgagaccggcagtgacaaccagcccctgggcaacaaccagcagagcaactgtgagtactttgtggacagcctgtttgaggaggcccagaaggtgagcagcaaatgtgtgtccccagctgagcagaagaagcaggtggatgtgaacatcaagctgtggaagaatggcttcaccgtgaatgatgacttccgcagctacagtgatggagccagccagcagttcctgaacagcatcaagaagggggagctgcccagcgagctgcagggcatctttgacaaggaggaggtggatgtgaaggtggaggacaagaagaatgagatctgcctgagcaccaagcctgtgttccagcccttcagcggccagggccaccggctgggccgggtgagccacatcaaggacttcatcgagaagtaccagggcagccagaggagcccccccttcagcctggccacagccctgcctgtgctgcggctgctggatgagaccctgaccctggaggaggccgacctgcagaatgctgtgatcatccagaggctgcagaagacagccagcttccgggagctgtctgagcactag

SEQ ID NO: 22246 - DNA, 1359 bp, synthetic construct
  source 1..1359: mol_type = other DNA; note = Synthetic coding sequence
atgaggggctgcagctatggcctgtgccggcggggcctgctcttctgtgtgatcctggatgaccagagcggcaagaagtctgtgaatgacaagaacctgaagaagacagtggaggatgaggaccaggacagcgaggaggagaaggacaatgacagctacatcaaggagaggagtgacatccccagcggcaccagcaagcacctgcagaagaaggccaagaagcaggccaagaagcaggccaagaaccagaggcggcagcagaagatccagggcaaggtgctgcacctgaatgacatctgcaccatcgaccaccctgaggacagtgaatatgaggccgagatgagcctgcagggcgaggtgaacatcaagagcaaccacatcagccaggagggcgtgatgcacaaggagtactgtgtgaaccagaaggacctgaatggccaggccaagatgattgaatctgtgacagacaaccagaagagcacagaggaggtggacatgaagaacatcaacatggacaatgacctggaggtgctgaccagcagccccaccaggaacctgaatggagcctacctgacagagggcagcaatggagaggtggacatcagcaatggcttcaagaacctgaacctgaatgctgccctgcacccagatgagatcaacatcgagatcctgaatgacagccacaccccaggcaccaaggtgtatgaggtggtgaatgaagatcctgagacagccttctgcaccctggccaaccgggaggtgttcaacacagatgaatgttccatccagcactgcctgtaccagttcaccagaaatgagaagctgagagatgccaacaagctgctgtgtgaggtgtgcacccggcggcagtgcaatggccccaaggccaacatcaagggggagaggaagcacgtgtacaccaatgccaagaagcagatgctgatcagcctggcccctcctgtgctgaccctgcacctgaagcgcttccagcaggccggcttcaacctgaggaaggtgaacaagcacatcaagtttcctgagatcctggacctggcccccttctgcaccctgaagtgcaagaatgtggccgaggagaacaccagggtgctgtacagcctgtatggagtggtggagcacagcggcaccatgaggagcggccactacacagcctatgccaaggccaggacagccaacagccacctgagcaacctggtgctgcatggagacatcccccaggactttgagatggagagcaagggccagtggttccacatcagtgacacccacgtgcaggccgtgcccaccaccaaggtgctgaacagccaggcctacctgctcttctatgaaagaatcctgtag

SEQ ID NO: 22247 - DNA, 450 bp, synthetic construct
  source 1..450: mol_type = other DNA; note = Synthetic coding sequence
atggagcgcatcgagggcgcctctgtgggccgctgtgccgccagcccctacctgcggcccctgaccctgcactaccggcagaatggagcccagaagtcctgggacttcatgaagacccatgacagcgtgacagtgctgctcttcaacagcagccgccgcagcctggtgctggtgaagcagttccggcctgctgtgtatgctggggaggtggagcggcgcttccctggcagcctggccgctgtggaccaggacggcccccgggagctgcagcctgccctgcccggcagcgctggggtgacagtggagctgtgtgccggcctggtggaccagcccggcctgagcctggaggaggtggcctgcaaggaggcctgggaggagtgtggctaccacctggcccccagcgacctgcggcgggtggccacctactgggatgccaccatgggcagctag

SEQ ID NO: 22248 - DNA, 489 bp, synthetic construct
  source 1..489: mol_type = other DNA; note = Synthetic coding sequence
atgaacagcaatgccagcgagcacacaggcatgctgcggacctgctggagccacagccactgggaccccttcagcagcggctctgtgacagccatgtgggccacccacagccccaccagcaaggcctgggccggcatccagggccggggccgctgggccctgggcttcccctggaggggccagggcgtgctgcacgtgattgccagccagaaggctgctgtgacagaagctgtggacctgaggactggagctgccagccaggccatgtctgaggcctttgtgcgcagcggcatgttctacctgcggcctgcctttgtgctgctgtgctacaagtggggcaagctgcggcacagcgaggtgagcaacctgctgggcgtggcctggcctgtgtctgaggaggcctgcatgggcacctggggcagcctggccgtggccgtgaccctgcctgcccagggcctgggcacctggggcagagatgaaggagagtag

SEQ ID NO: 22249 - DNA, 1320 bp, synthetic construct; identical to SEQ ID NO: 20037
  source 1..1320: mol_type = other DNA; note = Synthetic coding sequence

SEQ ID NO: 22250 - DNA, 867 bp, synthetic construct
  source 1..867: mol_type = other DNA; note = Synthetic coding sequence
atggccaagtggggcgagggggacccccgctggatcgtggaggagcgggcagatgccaccaacgtgaacaactggcactggacagaaagagatgccagcaactggagcacagacaagctgaagaccctcttcctggccgtgcaggtgcagaatgaggagggcaaatgtgaggtgacagaggtgtccaagctggatggagaggccagcatcaacaacaggaagggcaagctgatcttcttctatgagtggagcgtgaagctgaactggacaggcaccagcaagtctggagtgcagtacaagggccacgtggagatccccaacctgagtgatgaaaattctgtggatgaggtggagatctctgtgtccctggccaaggatgagccagacaccaacctggtggccctgatgaaggaggagggcgtgaagctgctgcgggaggccatgggcatctacatcagcaccctgaagacagagttcacccagggcatgatcctgcccaccatgaatggagagagcgtggaccctgtgggccagcctgccctgaagacagaggagaggaaggccaagccagcccccagcaagacccaggcccggcctgtgggcgtgaagatccccacctgcaagatcaccctgaaggagaccttcctgaccagccctgaggagctgtacagagtcttcaccacccaggagctggtgcaggccttcacccacgccccagccaccctggaggccgacagaggaggcaagttccacatggtggatggaaatgtgtctggagagttcacagacctggtgcctgagaagcacatcgtgatgaagtggaggttcaagtcctggccagagggcagccactgccacagcggctag

SEQ ID NO: 22251 - DNA, 1053 bp, synthetic construct
  source 1..1053: mol_type = other DNA; note = Synthetic coding sequence
atgcccagcttcatcagacatggccccaccatccccaggagaacagacatctgcctgcctgacagcagccccaatgccttcagcaccagcggagatgtggtgtccaggaaccagagcttcctgcggacccccatccagaggacccctcatgagatcatgaggcgggagagcaaccggctgagcgcccccagctacctggcccggagcctggctgatgtgccccgggagtatggcagcagccagagctttgtgacagaggtgtcctttgctgtggagaatggagacagcggcagccgctactactacagcgacaacttctttgatggccagaggaagaggcccctgggggaccgggcccacgaggactaccgctactatgagtacaaccacgacctcttccagaggatgccccagaaccagggcagacatgccagcggcatcggccgggtggccgccaccagcctgggcaacctgaccaaccacggcagcgaggacctgcccctgcccccaggctggagcgtggactggaccatgaggggcaggaagtactacatcgaccacaacaccaacaccacccactggagccaccccctggagcgggagggcctgcccccaggctgggagcgggtggagagcagcgagtttggcacctactacgtggaccacaccaacaagaaggcccagtaccgccacccctgtgcccccagcgtgcccaggtatgaccagcccccacctgtgacctaccagccccagcagacagaaagaaaccagagcctgctggtgcctgccaacccctaccacacagctgagatcccagactggctgcaggtgtatgcccgggcccctgtgaagtatgaccacatcctgaagtgggagctgttccagctggccgacctggacacctaccagggcatgctgaagctgctcttcatgaaggagctggagcagatcgtgaagatgtatgaggcctaccggcaggccctgctgacagagctggagaacaggaagcagaggcagcagtggtacgcccagcagcacggcaagaacttctag

SEQ ID NO: 22252 - DNA, 537 bp, synthetic construct
  source 1..537: mol_type = other DNA; note = Synthetic coding sequence
atgaccttccgggagggccaccagtgggagaagatccccctgagcggcagcaaccaggagatccggcggcagaaggagcgcatcacagagcagcccctgaaggaggaggaggatgaggacaggaagaacaagggccaccaggccgctgagattgagtggctgggcttcaggaagcccagccaggccgacatgctgcacagcaagcatgatgaggagcagaaggtgtgggatgaggagattgatgatgatgatgatgacaactgcaacaatgatgaagatgaggtgcgggtcatcgagttcaagaagaagcatgaggaggtgtcccagttcaaggaggagggagatgccagcgaggacagccccctgagcagcgccagcagccaggccgtgaccccagatgagcagcccaccctgggcaagaagagtgacatcagcagaaatgcctacagccgctacaacaccatctcctacaggaagatcaggaagggcaacaccaagcagagaattgatgaatttgagagcatgatgcacctgtag

SEQ ID NO: 22253 - DNA, 312 bp, synthetic construct
  source 1..312: mol_type = other DNA; note = Synthetic coding sequence
atggccgccttcaagctggacttcctgcctgagatgatggtggaccactgcagcctgaacagcagccctgtgtccaagaagatgaatggcaccctggaccacccagaccagcctgacctggatgccatcaagatgtttgtgggccaggtgcccaggacctggagcgagaaggacctgcgggagctgtttgagcagtacggggctgtgtatgagatcaacgtgctgcgggacaggagccagaaccccccccagagcaagggctgctgctttgtgaccttctacaccaggaaggccgccctggaggcccagtag

SEQ ID NO: 22254 - DNA, 1917 bp, synthetic construct
  source 1..1917: mol_type = other DNA; note = Synthetic coding sequence
atgccacccatcaacctgcaggagaagcaggtgatctgcctgtctggagatgacagcagcacctgcatcggcatcctggccaaggaggtggagatcgtggccagcagtgacagcagcatcagcagcaaggcccggggcagcaacaaggtgaagatccagcctgtggccaagtatgactgggagcagaagtactactacggcaacctgattgctgtgagcaacagcttcctggcctatgccatccgggccgccaacaacggcagcgccatggtgcgggtcatctctgtgtccaccagcgagaggaccctgctgaagggcttcaccggctctgtggccgacctggcctttgcccacctgaacagcccccagctggcctgcctggatgaggccggcaacctgtttgtgtggaggctggccctggtgaatggcaagatccaggaggagatcctggtgcacatccggcagcctgagggcacccccctgaaccacttccgccgcatcatctggtgccccttcatccctgaggagagcgaggactgctgtgaggagagcagccccaccgtggccctgctgcatgaagatagagctgaggtgtgggacctggacatgctgcggagcagccacagcacctggcctgtggatgtgtcccagatcaagcagggcttcatcgtggtgaagggccacagcacctgcctgtctgagggcgccctgagcccagatggcaccgtgctggccacagccagccatgatggctacgtgaagttctggcagatctacatcgagggccaggatgagccccgctgcctgcacgagtggaagccccatgatggccggcccctgagctgcctgctcttctgtgacaaccacaagaagcaggaccctgatgtgcccttctggaggttcctgatcaccggggctgaccagaaccgggagctgaagatgtggtgcaccgtgtcctggacctgcctgcagaccatccgcttctccccagacatcttcagctctgtgtctgtgccccccagcctgaaggtgtgcctggacctgtctgctgagtacctgatcctgagtgatgtgcagaggaaggtgctgtatgtgatggagctgctgcagaaccaggaggagggccacgcctgcttcagcagcatcagcgagttcctgctgacccaccctgtgctgagctttggcatccaggtggtgagccgctgccgcctgcggcacacagaggtgctgcctgctgaggaggagaatgacagcctgggcgcagatggcacccatggagctggggccatggagagcgctgctggggtgctgatcaagctgttctgtgtgcacaccaaggccctgcaggatgtgcagatccgcttccagccccagctgaacccagatgtggtggcccccctgcccacccacacagcccacgaggacttcaccttcggggagagcaggcctgagctgggcagcgagggcctgggcagcgctgcccacggcagccagcctgacctgcggcgcatcgtggagctgcctgccccagctgacttcctgagcctgagcagcgagaccaagcccaagctgatgaccccagatgccttcatgacccccagcgccagcctgcagcagatcacagccagccccagcagcagcagcagcggcagcagcagcagcagcagcagcagcagcagcagcctgacagctgtgtctgccatgagcagcaccagcgctgtggaccccagcctgaccaggcctcctgaggagctgaccctgagccccaagctgcagctggatggcagcctgaccatgagcagcagcggcagcctgcaggccagcccccggggcctgctgcccggcctgctgcctgccccagctgacaagctgacccccaagggccctggccaggtgtgtgactgggtgtgtgtgtag

SEQ ID NO: 22255 - DNA, 495 bp, synthetic construct
  source 1..495: mol_type = other DNA; note = Synthetic coding sequence
atgaggatcctgatcctgggcctggatggagctgggaagaccaccatcctgtaccgcctgcaggtgggggaggtggtgaccaccatccccaccatcggcttcaacgtggagaccgtgacctacaagaacctgaagttccaggtgtgggacctgggcggccagaccagcatccggccctactggcgctgctactacagcaacacagatgctgtgatctacgtggtggacagctgtgaccgggacagaattggcatcagcaagtctgagctggtggccatgctggaggaggaggagctgaggaaggccatcctggtggtgtttgccaacaagcaggacatggagcaggccatgaccagcagcgagatggccaacagcctgggcctgcctgccctgaaggacaggaagtggcagatcttcaagaccagcgccaccaagggcaccggcctggatgaggccatggagtggctggtggagaccctgaagagccggcagtag

SEQ ID NO: 22256 - DNA, 1944 bp, synthetic construct
  source 1..1944: mol_type = other DNA; note = Synthetic coding sequence
atggcccagggctctgtgtccttcaatgatgtgacagtggacttcacccaggaggagtggcagcacctggaccacgcccagaagaccctgtacatggatgtgatgctggagaactactgccacctgatctctgtgggctgccacatgaccaagccagatgtgatcctgaagctggagcggggggaggagccctggaccagctttgctggccacacctgcctggaggagaactggaaggccgaggacttcctggtgaagttcaaggagcaccaggagaagtacagccgctctgtggtgtccatcaaccacaagaagctggtgaaggagaagagcaagatctatgagaagaccttcaccctgggcaagaaccctgtgaacagcaagaacctgcccccagaatatgacacccacggccgcatcctgaagaatgtgtctgagctgatcatcagcaacctgaacccagccaggaagaggctgtctgagtacaacggctacggcaagagcctgctgagcaccaagcaggagaccacccaccctgaggtgaagagccacaaccagagcgcccgggccttcagccacaatgaggtgctgatgcagtaccagaagacagagaccccagcccagagctttggctacaatgactgtgagaagagcttcctgcagagaggaggcctcatcacccacagccggccctacaagggggagaaccccagcgtgtacaacaagaagaggcgggccaccaacatcgagaagaagcacacctgcaatgaatgtgggaagagcttctgcaggaagtctgtgctgatcctgcaccagggcatccacagcgaggagaagccctaccagtgccaccagtgtggaaatgccttccggaggaagagctacctgattgaccaccagaggacccacactggagagaagccctttgtgtgcaatgaatgtgggaagagcttccggctgaagacagccctgacagaccaccagaggacccacactggagagaagagctatgagtgcctgcagtgcagaaatgccttccggctgaagagccacctgatccgccaccagaggacccacactggagagaagccctatgagtgcaatgactgtgggaagagcttccggcagaagaccaccctgagcctgcaccagaggatccacactggagagaagccctacatctgcaaggaatgtgggaagagcttccaccagaaggccaacctgactgtgcaccagaggacccacactggagagaagccctacatctgcaatgaatgtgggaagagcttcagccagaagaccaccctggccctgcacgagaagacccacaatgaggagaagccctacatctgcagtgaatgtgggaagagcttccggcagaagaccaccctggtggcccaccagaggacccacactggagagaagagctatgagtgcccccactgtgggaaggccttcaggatgaagagctacctgattgaccaccacaggacccacactggagagaagccctatgagtgcaatgaatgtgggaagagcttcagccagaagaccaacctgaacctgcaccagaggatccacactggagagaagccctacgtgtgcaatgaatgtgggaagagcttccggcagaaggccaccctgactgtgcaccagaagatccacacaggccagaagagctatgagtgcccccagtgtgggaaggccttcagcaggaagagctacctgatccaccaccagaggacccacactggagagaagccctacaagtgcagtgaatgtgggaagtgcttccggcagaagaccaacctgattgtgcaccagaggacccacactggagagaagccctacgtgtgcaatgaatgtgggaagagcttctcctacaagaggaacctgattgtgcaccagaggacccacaagggggagaacatcgagatgcagtag

SEQ ID NO: 22257 - DNA, 3570 bp, synthetic construct
  source 1..3570: mol_type = other DNA; note = Synthetic coding sequence
atgaagctggagtgcatcccagcccccatcacccccagcacagtgcccagcttcccccccaccccacccaccccaccagccagccccccccacacccctgtgattgtgcctgctgctgccaccaccgtgagcagccccagcgctgccatcaccgtgcagagggtgctggaggaggatgagagcatccgcacctgcctgtctgaagatgccaaggagatccagaacaagattgaggtggaggctgatggccagacagaggagatcctggacagccagaacctgaacagcagaagaagccctgtgcctgcccagatcgccatcaccgtgcccaagacctggaagaagcccaaggacaggaccaggaccacagaggagatgctggaggccgagctggagctgaaggccgaggaggagctgagcattgacaaggtgctggagagcgagcaggacaagatgagccagggcttccaccctgagcgggaccccagcgacctgaagaaggtgaaggctgtggaggagaatggagaggaggccgagcctgtgagaaatggagctgagagcgtgtctgagggggagggcattgatgccaacagcggcagcacagacagcagtggagatggagtgaccttccccttcaagccagagagctggaagcccacagacacagagggcaagaagcagtatgaccgggagttcctgctggacttccagttcatgcctgcctgcatccagaagccagagggcctgccccccatcagtgatgtggtgctggacaagatcaaccagcccaagctgcccatgaggaccctggacccccgcatcctgccccggggccctgacttcaccccagcctttgctgactttggccggcagaccccaggcggccggggcgtgcccctgctgaatgtgggcagccgccgcagccagcccggccagaggcgggagcccaggaagatcatcaccgtgtctgtgaaggaggatgtgcacctgaagaaggccgagaatgcctggaagcccagccagaagagggacagccaggctgatgatcctgagaacatcaagacccaggagctgttcaggaaggtgcgcagcatcctgaacaagctgaccccccagatgttcaaccagctgatgaagcaggtgtctggcctgactgtggacacagaggagcggctgaagggcgtcatcgacctggtgtttgagaaggccattgatgagcccagcttctctgtggcctatgccaacatgtgccgctgcctggtgaccctgaaggtgcccatggctgacaagccaggcaacacagtgaacttcaggaagctgctgctgaaccgctgccagaaggagtttgagaaggacaaggcagatgatgatgtgtttgagaagaagcagaaggagctggaggccgccagcgcccctgaggagaggacccggctgcatgatgagctggaggaggccaaggacaaggccaggagaagaagcatcggcaacatcaagttcatcggggagctgttcaagctgaagatgctgacagaggccatcatgcatgactgtgtggtgaagctgctgaagaaccatgatgaggagagcctggagtgcctgtgccgcctgctgaccaccatcggcaaggacctggactttgagaaggccaagcccaggatggaccagtacttcaaccagatggagaagatcgtgaaggagaggaagaccagcagccgcatccgcttcatgctgcaggatgtgattgacctgcggctgtgcaactgggtgtccagaagagctgaccagggccccaagaccatcgagcagatccacaaggaggccaagattgaggagcaggaggagcagaggaaggtgcagcagctgatgaccaaggagaagagaagacctggggtgcagagggtggatgaaggaggctggaacacagtgcagggcgccaagaacagccgggtgctggaccccagcaagttcctgaagatcaccaagcccaccattgatgagaagatccagctggtgcccaaggcccagctgggctcctggggcaagggcagcagcggcggggccaaggccagcgagacagatgccctgcggagcagcgccagcagcctgaaccgcttcagcgccctgcagcccccagcccccagcggcagcacccccagcacccctgtggagtttgacagcaggaggaccctgaccagccggggctccatgggccgggagaagaatgacaagcccctgcccagcgccacagcccggcccaacaccttcatgaggggcggcagcagcaaggacctgctggacaaccagagccaggaggagcagaggcgggagatgctggagaccgtgaagcagctgactggaggagtggatgtggagaggaacagcacagaagctgagaggaacaagacccgggagagcgccaagccagagatcagcgccatgtctgcccatgacaaggccgccctgtctgaggaggagctggagaggaagagcaagagcatcattgatgagttcctgcacatcaatgacttcaaggaggccatgcagtgtgtggaggagctgaatgcccagggcctgctgcacgtgtttgtgcgggtgggcgtggagagcaccctggagaggagccagatcacccgggaccacatgggccagctgctgtaccagctggtgcagagcgagaagctgagcaagcaggacttcttcaagggcttcagcgagaccctggagctggctgatgacatggccatcgacatcccccacatctggctgtacctggccgagctggtgacccccatgctgaaggagggcggcatctccatgagggagctgaccatcgagttcagcaagcccctgctgcctgtgggccgggccggcgtgctgctgtctgagatcctgcacctgctgtgcaagcagatgagccacaagaaggtgggcgccctgtggagggaggccgacctgtcctggaaggacttcctgcctgaaggagaagatgtgcacaacttcctgctggagcagaagctggacttcattgaaagtgacagcccctgcagcagcgaggccctgagcaagaaggagctgtctgctgaggagctgtacaagaggctggagaagctgatcatcgaggacaaggccaatgatgagcagatctttgactgggtggaggccaacctggatgagatccagatgagcagccccaccttcctgcgggccctgatgacagctgtgtgcaaggccgccatcatcgctgacagcagcaccttccgggtggacacagctgtgatcaagcagagggtgcccatcctgctgaagtacctggacagcgacacagagaaggagctgcaggccctgtatgccctgcaggccagcatcgtgaagctggaccagcctgccaacctgctgaggatgttctttgactgcctgtatgatgaggaggtgatcagtgaagatgccttctacaagtgggagagcagcaaggaccctgctgagcagaatggaaaaggagtggccctgaagtctgtgacagccttcttcacctggctgcgggaggccgaggaggagagcgaggacaactag

SEQ ID NO: 22258 - DNA, 591 bp, synthetic construct
  source 1..591: mol_type = other DNA; note = Synthetic coding sequence
atgtggagcgtgctgcaggacggccccatcagcagggtcatcgtgttcagcctgtctgctgccaaggagaccaaggaccggcccctgcaggatgagtacagcgtgctggtggcctccatgctggagcctgctgtggtgtacagagacctgctgaacagaggcctggaggaccagctgctgctgcccggcagtgaccagtttgattctgtgctgtgcagcctggtgacagatgtggacctggatggccggcctgaggtgctggtggccacctacggccaggagctgctgtgctacaagtaccggggccctgagagcggcctgcctgaggcccagcacggcttccacctgctgtggcagaggagcttcagcagccccctgctggccatggcccacgtggacctgactggagatggcctgcaggagctggccgtggtgtccctgaagggcgtgcacatcctgcagcacagcctcatccaggccagcgagctggtgctgacccggctgcggcaccaggtggagcagaggagaagaaggctgcagggcctggaggatggagctggggccggccctgcagaaaatgctgccagctag

SEQ ID NO: 22259 - DNA, 1056 bp, synthetic construct
  source 1..1056: mol_type = other DNA; note = Synthetic coding sequence
atggtgagccacaccttccacatgaggacagaggagagtgatgccagccaggagggagatgacctgcccaagagcagcgccaacaccagccaccccaagcaggatgacagccccaagagcagcgaggagaccatccagcccaaggagggggacatccccaaggcccctgaggagaccatccagagcaagaaggaggacctgcccaagagcagcgagaaggccatccagcccaaggagagcaacatccccaagagcagcgccaagcccatccagcccaagctgggcaacatccccaagacctctgtgaagcccagccagcccaaggagagtgacatccccaagagccctgaggaggccatccagcccaaggagggggacatccccaagagcctggaggaggccatccagcccaaggagggggacatccccaagagccctgaggagaccatccagcccaagaagggggacatccccaagagccctgaggaggccatccagcccaaggagggggacatccccaagagccccaagcaggccatccagcccaaggagggggacatccccaagagcctggaggaggccatcccccccaaggagattgacatccccaagagccctgaggagaccatccagcccaaggaggatgacagccccaagagcctggaggaggccacccccagcaaggagggggacatcctgaagccagaggaggagaccatggagttccctgagggggacaaggtgaaggtgatcctgagcaaagaagattttgaggccagcctgaaggaggccggggagcggctggtggccgtggacttcagcgccacctggtgtggcccctgcaggaccatccggcccttcttccacgccctgtctgtgaagcatgaagatgtggtgttcctggaggtggatgctgacaactgtgaggaggtggtgcgggagtgtgccatcatgtgtgtgcccaccttccagttctacaagaaggaggagaaggtggatgagctgtgtggggccctgaaggagaagctggaggccgtgattgctgagctgaagtag

SEQ ID NO: 22260 - DNA, 1473 bp, synthetic construct
  source 1..1473: mol_type = other DNA; note = Synthetic coding sequence
atgccagatggcaagatccagaagctgatcatcacagaggagacagccaagatccggccctttgctgtggccgctgtgctgaggaacatcaagttcaccaaggacagatatgacagcttcatcgagctgcaggagaagctgcaccagaacatctgcaggaagagggccctggtggccatcggcacccatgacctggacaccctgagcggccccttcacctacacagccaagaggcccagcgacatcaagttcaagcccctgaacaagaccaaggagtacacagcctgtgagctgatgaacatctacaagacagacaaccacctgaagcactacctgcacatcatcgagaacaagcccctgtaccctgtgatctatgacagcaatggagtggtgctgtccatgccacccatcatcaatggagaccacagccgcatcaccgtgaacaccaggaacatcttcattgaatgtactggaacagacttcaccaaggccaagatcgtgctggacatcatcgtgaccatgttcagcgagtactgtgagaaccagttcaccgtggaggccgctgaggtggtgttccccaacgggaagagccacaccttccctgagctggcctacaggaaggagatggtgcgggctgacctgatcaacaagaaggtgggcatccgggagaccccagagaacctggccaagctgctgaccaggatgtacctgaagtctgaggtgattggagatggcaaccagatcgagattgagatcccccccaccagggctgacatcatccacgcctgtgacatcgtggaggatgctgccatcgcctacggctacaacaacatccagatgaccctgcccaagacctacaccatcgccaaccagttccccctgaacaagctgacagagctgctgcggcatgacatggctgctgctggcttcacagaggccctgacctttgccctgtgcagccaggaggacattgctgacaagctgggcgtggacatcagcgccaccaaggctgtgcacatcagcaaccccaagacagctgagttccaggtggcccggaccaccctgctgcccggcctgctgaagaccatcgccgccaacaggaagatgcccctgcccctgaagctgtttgagatcagtgacatcgtcatcaaggacagcaacacagatgtgggcgccaagaactaccgccacctgtgtgctgtgtactacaacaagaaccctggctttgagatcatccacggcctgctggaccgcatcatgcagctgctggatgtgcccccaggagaagataaaggaggctacgtgatcaaggccagcgagggccctgccttcttccctggccgctgtgccgagatctttgcccggggccagagcgtgggcaagctgggcgtgctgcacccagatgtgatcaccaagtttgagctgaccatgccctgcagcagcctggagatcaacgtgggccccttcctgtag

SEQ ID NO: 22261 - DNA, 1458 bp, synthetic construct; identical to SEQ ID NO: 20337
  source 1..1458: mol_type = other DNA; note = Synthetic coding sequence

SEQ ID NO: 22262 - DNA, 204 bp, synthetic construct
  source 1..204: mol_type = other DNA; note = Synthetic coding sequence
atggccctgctggccgagcacctgctgaagcccctgcctgctgacaagcagatcgagaccggccccttcctggaggccgtgagccacctgccccccttctttgactgcctgggcagccctgtgttcacccccatcaaggctgacatcagcggcaacatcaccatgaggaagctgcggctgcggggcgtggagggcctggcctag

SEQ ID NO: 22263 - DNA, 816 bp, synthetic construct
  source 1..816: mol_type = other DNA; note = Synthetic coding sequence
atctgtgagcgcatccgcagcacagtggatgagaaggagcagaagcagctgctgatggacctggatgtggtgatgaggagcagtgactgcccctacatcgtgcagttctatggagccctcttccgggagggggactgctggatctgcatggagctgatgagcaccagctttgacaagttctacaagtatgtgtacagcgtgctggatgatgtgattcctgaggagatcctgggcaagatcaccctggccaccgtgaaggccctgaaccacctgaaggagaacctgaagatcatccaccgggacatcaagcccagcaacatcctgctggacaggagcggcaacatcaagctgtgtgactttggcatcagcggccagctggtggacagcatcgccaagaccagagatgctggctgccggccctacatggcccctgagagaattgaccccagcgccagccggcagggctatgatgtgcggagtgatgtgtggagcctgggcatcaccctgtatgagctggccaccggccgcttcccctaccccaagtggaacagcgtgtttgaccagctgacccaggtggtgaagggggaccccccccagctgagcaacagcgaggagcgggagttcagccccagcttcatcaactttgtgaacctgtgcctgaccaaggatgagagcaagaggcccaagtacaaggagctgctgaagcaccccttcatcctgatgtatgaggagagagctgtggaggtggcctgctacgtgtgcaagatcctggaccagatgcctgccacccccagcagccccatgtatgtggactag

SEQ ID NO: 22264 - DNA, 291 bp, synthetic construct
  source 1..291: mol_type = other DNA; note = Synthetic coding sequence
atgtctgagaaggtggactggctgcagagccagaatggagtgtgcaaggtggatgtgtacagccctggggacaaccaggcccaggactggaagatggacaccagcacagatcctgtgcgggtgctgtcctggctgcggcgggacctggagaagagcacagctgagttccaggatgtgcgcttcaagccaggagagagctttggaggagagaccagcaacagcggggacccccacaagggcttctctgtggactactacaacaccaccaccaagggcaccccagagaggtag

SEQ ID NO: 22265 - DNA, 792 bp, synthetic construct; identical to SEQ ID NO: 18943
  source 1..792: mol_type = other DNA; note = Synthetic coding sequence

SEQ ID NO: 22266 - DNA, 867 bp, synthetic construct; identical to SEQ ID NO: 18941
  source 1..867: mol_type = other DNA; note = Synthetic coding sequence

SEQ ID NO: 22267 - DNA, 549 bp, synthetic construct; identical to SEQ ID NO: 20398
  source 1..549: mol_type = other DNA; note = Synthetic coding sequence

SEQ ID NO: 22268 - DNA, 999 bp, synthetic construct
  source 1..999: mol_type = other DNA; note = Synthetic coding sequence
atggaccagcctgctggcctgcaggtggactatgtgttccggggcgtggagcacgctgtgcgggtgatggtgtctggccaggtgctggagctggaggtggaggacaggatgacagctgaccagtggagaggagaatttgatgctggcttcatcgaggacctgacccacaagacaggcaacttcaagcagttcaacatcttctgccacatgctggagagcgccctgacccagagcagcgagagcgtgaccctggacctgctgacctacacagacctggagagcctgaggaacaggaagatgggcggccggcccggcagcctggcccccaggtctgcccagctgaacagcaagcgctacctgatcctgatctacagcgtggagtttgaccgcatccactaccccctgcccctgccctaccagggcaagccagaccctgtggtgctgcagggcatcatccgcagcctgaaggaggagctgggccgcctgcagggcctggatggccagaacacccgggacaccagagaaaatgagatctggcacctgcgggagcagcagcagcagaggaaccggctgggcagcggcggcagcggagatggccccagcgtgtcctggagccggcagacccagcccccagctgccctgaccggcagaggagatgcccccaacagaagcaggaacagaagcagctctgtggacagcttccgcagccgctgcagcagcgccagcagctgcagcgacctggaggacttcagcgagagcctgagcagaggaggccacagaagaagaggcaagccacccagccccaccccctggagcggcagcaacatgaagagcccccctgtggagaggagccaccaccagaagagcctggccaacagcggcggctgggtgcccatcaaggagtacagcagcgagcaccaggccgctgacatggccgagattgatgcccggctgaaggccctgcaggagtacatgaaccggctggacatgaggagctag

SEQ ID NO: 22269 - DNA, 516 bp, synthetic construct
  source 1..516: mol_type = other DNA; note = Synthetic coding sequence
atgagcagcaagaggaccaagaccaagaccaagaagaggccccagagggccaccagcaatgtgtttgccatgtttgaccagagccagatccaggagttcaaggaggccttcaacatgattgaccagaacagagatggcttcatcgacaaggaggacctgcatgacatgctggccagcctgggcaagaaccccacagatgagtacctggatgccatgatgaatgaggcccctggccccatcaacttcaccatgttcctgaccatgtttggagagaagctgaatggaacagatcctgaagatgtgatcagaaatgcctttgcctgctttgatgaggaggccaccggcaccatccaggaggactacctgcgggagctgctgaccaccatgggagaccgcttcacagatgaggaggtggatgagctgtaccgggaggcccccatcgacaagaagggcaacttcaactacatcgagttcacccgcatcctgaagcacggggccaaggacaaggatgactag

SEQ ID NO: 22270 - DNA, 2391 bp, synthetic construct
  source 1..2391: mol_type = other DNA; note = Synthetic coding sequence
atgagcctggatgacaacctgagcggcaccagcggcatggaggtggatgacagagtgtctgccctggagcagaggctgcagctgcaggaggatgagctggccgtgctgaaggccgccctggctgatgccctgcggcggctgcgggcctgtgaggagcagggcgccgccctgcgggcccggggcacccccaagggccgggccccaccccggctgggcaccacagcctctgtgtgccagctgctgaagggcctgcccaccaggacccccctgaatggaagtggccccccaagaagagtgggcggctacgccaccagccccagcagccccaagaaggaggccaccagcggccgcagctctgtgcggcgctacctgagccctgagcggctggcctctgtgagaagagaggaccccaggagcaggaccaccagcagcagcagcaactgcagcgccaagaaggagggcaagaccaaggaggtgatcttctctgtggaggatggctctgtgaagatgttcctgcggggccggcctgtgcccatgatgatcccagatgagctggcccccacctacagcctggacaccaggtctgagctgcccagctgccgcctgaagctggagtgggtgtatggctaccggggccgggactgccgggccaacctgtacctgctgcccaccggggagatcgtgtactttgtggcctctgtggccgtgctgtacagcgtggaggagcagaggcagaggcactacctgggccacaatgatgacatcaagtgcctggccatccacccagacatggtgaccatcgccaccggccaggtggccggcaccaccaaggagggcaagcccctgccccctcatgtgcgcatctgggacagcgtgtccctgagcaccctgcacgtgctgggcctgggcgtgtttgacagagctgtgtgctgcgtgggcttcagcaagagcaatggaggcaacctgctgtgtgctgtggatgagagcaatgaccacatgctgtctgtgtgggactgggccaaggagaccaaggtggtggatgtgaagtgcagcaatgaggccgtgctggtggccaccttccaccccacagaccccaccgtgctgatcacctgtgggaagagccacatctacttctggaccctggagggcggcagcctgagcaagaggcagggcctgtttgagaagcatgagaagcccaagtatgtgctgtgtgtgaccttcctggagggcggagatgtggtgactggagacagcggcggcaacctgtatgtgtggggcaaaggaggcaaccgcatcacccaggccgtgctgggcgcccatgatggaggagtgtttggcctgtgtgccctgagagatggcaccctggtgtctgggggcggccgggacagaagagtggtgctgtggggcagtgactacagcaagctgcaggaggtggaggtgcctgaggactttggacctgtgaggacagtggccgagggccacggggacaccctgtatgtgggcaccaccaggaacagcatcctgcagggctctgtgcacacaggcttcagcctgctggtgcagggccacgtggaggagctgtggggcctggccacccaccccagccgggcccagtttgtgacctgtggccaggacaagctggtgcacctgtggagcagtgacagccaccagcccctgtggagccgcatcattgaagatcctgcccggtctgctggcttccaccccagcggctctgtgctggccgtgggcaccgtgacaggccgctggctgctgctggacacagagacccatgacctggtggccatccacacagatggaaatgagcagatctctgtggtgtccttctccccagatggagcctacctggccgtgggcagccatgacaacctggtgtatgtgtacacagtggaccagggcggcaggaaggtgtcccggctgggcaagtgcagcggccacagcagcttcatcacccacctggactgggcccaggacagcagctgctttgtgaccaacagcggggactatgagatcctgtactgggaccctgccacctgcaagcagatcaccagcgcagatgctgtgaggaacatggagtgggccacagccacctgtgtgctgggcttcggcgtgtttggcatctggagcgagggcgcagatggaacagacatcaatgctgtggcccggagccatgatggcaagctgctggccagcgcagatgactttgggaaggtgcacctgttctcctacccctgctgccagccccgggccctgagccacaagtatggaggccacagcagccacgtgaccaacgtggccttcctgtgggatgacagcatggccctgaccactggaggcaaggacacctctgtgctgcagtggagggtggtgtag

SEQ ID NO: 22271 - DNA, 1059 bp, synthetic construct
  source 1..1059: mol_type = other DNA; note = Synthetic coding sequence
atggccctgctgggccaggccctgaagtggcagcagcaccagggcctgctgcccccaggcatgaccatcgacctcttccggggcaaggctgctgtgaaggatgtggaggaggagaagttccccacccagctgagccgccacatcaagtttggccagaagagccacgtggagtgtgcccgcttctccccagatggccagtacctggtgacaggctctgtggatggcttcatcgaggtgtggaacttcaccaccgggaagatcaggaaggacctgaagtaccaggcccaggacaacttcatgatgatggatgatgctgtgctgtgcatgtgcttcagccgggacacagagatgctggccaccggggcccaggacggcaagatcaaggtgtggaagatccagagcggccagtgcctgcggagatttgagcgggcccacagcaaaggagtgacctgcctgtccttcagcaaggacagcagccagatcctgagcgccagctttgaccagaccatccgcatccacggcctgaagagcggcaagaccctgaaggagttccggggccacagcagctttgtgaatgaggccaccttcacccaggacggccactacatcatcagcgccagcagtgatggcaccgtgaagatctggaacatgaagaccacagaatgtagcaacaccttcaagagcctgggcagcacagctggaacagacatcaccgtgaacagcgtcatcctgctgcccaagaaccctgagcactttgtggtgtgcaacagaagcaacacagtggtgatcatgaacatgcagggccagatcgtgcgctccttcagcagcggcaagcgggagggcggggactttgtgtgctgtgccctgagccccagaggagagtggatctactgtgtgggagaagattttgtgctgtactgcttcagcacagtgacaggcaagctggagaggaccctgactgtgcatgagaaggatgtgattggaattgcccaccacccccaccagaacctgattgccacctacagtgaagatggcctgctgaagctgtggaagccctag

SEQ ID NO: 22272 - DNA, 951 bp, synthetic construct
  source 1..951: mol_type = other DNA; note = Synthetic coding sequence
atgcagagctgggtgctgatcagcaaggagctgatcagcctgctgcacctgagcctgctgcacctggaggaggacaagaccaccgtgtcccaggagagccggcgggcagagaccctggtgtgctgctgctttgacctgctgaagaagctgcgggccaagctgcagagcctgaaggccgagcgggaggaggcccggcaccgggaggagatggccctgcggggcaaggatgctgctgagatcgtgctggaggccttctgtgcccacgccagccagaggatcagccagctggagcaggacctggcctccatgagggagttccggggcctgctgaaggatgcccagacccagctggtgggcctgcacgccaagcaggaggagctggtgcagcagacagtgtccctgaccagcaccctgcagcaggactggaggtccatgcagctggactacaccacctggacagccctgctgagccgcagccggcagctgacagagaagctgactgtgaagagccagcaggccctgcaggagagagatgtggccatcgaggagaagcaggaggtgtcccgggtgctggagcaggtgtctgcccagctggaggagtgcaagggccagacagagcagctggagctggagaacagccggctggccacagacctgcgggcccagctgcagatcctggccaacatggacagccagctgaaggagctgcagagccagcacacccactgtgcccaggacctggccatgaaggatgagctgctgtgccagctgacccagagcaatgaggagcaggccgcccagtggcagaaggaggagatggccctgaagcacatgcaggccgagctgcagcagcagcaggccgtgctggccaaggaggtgcgggacctgaaggagaccctggagtttgctgaccaggagaaccaggtggcccacctggagctggcctggtag

SEQ ID NO: 22273 - DNA, 597 bp, synthetic construct; identical to SEQ ID NO: 19257
  source 1..597: mol_type = other DNA; note = Synthetic coding sequence

SEQ ID NO: 22274 - DNA, 591 bp, synthetic construct
  source 1..591: mol_type = other DNA; note = Synthetic coding sequence
atggtgccccggccctggagcggcagccctggccctggagagtgcctgcacagcctgctgtctgagcggctgtggatctgccgggacatcagcgcccagaggagaagtgcccctggcagcccccggcccagcgactgccagcagctgtccttcctgcccggcaaccagcccaccttcctgtgcctgcaggccctggccgccctggtgcctggggtgacccaggtggacaacaagagcggcttcctgcagaagaggccccaccggcagcaccctggcatcctgaagctgccccacgtgcggctgccccaggccctggccaatggagcccagctgctgctgctgggcagcgctggccccaccatggagaaccaggtgcagaccctgaccagctacctgtggagccgccacctgcctgtggagcctgaggagctgcagaggcgggcccggcacctggagaagaagttcctggagaaccctggccctgacttccagagcctcttcagcccccagacctacctgcggcagaggaggaactttgtggagcagtgctacacccactacgtgaagctgcccaccatcggcaagaactag

SEQ ID NO: 22275 - DNA, 1131 bp, synthetic construct
  source 1..1131: mol_type = other DNA; note = Synthetic coding sequence
atgccagatgtggtgcagacccggcagcaggcctacagagacaagctggcccagcagcaggccgctgctgctgctgctgctgctgctgctgccagccagcagggcagcgccaagaatggagaaaatacagccaatggagaggagaatggagcccacaccatcgcccgcatctggaacctgtctgagaacagcaccagcggcagcacccagctggtgctgcggcactgcatccgggagggcggccaggatgtgcccagcaacaaggatgtgaccagcctggactggaacagcgagggcaccctgctggccaccggcagctatgatggctttgcccgcatctggaccaaggatggcaacctggccagcaccctgggccagcacaagggccccatctttgccctgaagtggaacaagaagggcaacttcatcctgtctgctggggtggacaagaccaccatcatctgggatgcccacactggagaggccaagcagcagttccccttccacagcgccccagccctggatgtggactggcagagcaacaacacctttgccagctgcagcacagacatgtgcatccacgtgtgcaagctgggccaggaccggcccatcaagaccttccagggccacaccaatgaggtgaatgccatcaagtgggaccccaccggcaacctgctggccagctgcagtgatgacatgaccctgaagatctggagcatgaagcaggacaactgtgtgcatgacctgcaggcccacaacaaggagatctacaccatcaagtggagccccaccggccctggcaccaacaaccccaatgccaacctgatgctggccagcgccagctttgacagcacagtgcggctgtgggatgtggaccggggcatctgcatccacaccctgaccaagcaccaggagcctgtgtacagcgtggccttctccccagatggccgctacctggccagcggcagctttgacaagtgtgtgcacatctggaacacccagacaggagccctggtgcacagctaccggggcactggaggcatctttgaggtgtgctggaatgctgctggggacaaggtgggcgccagcgccagtgatggctctgtgtgtgtgctggacctgaggaagtag

SEQ ID NO: 22276 - DNA, 1116 bp, synthetic construct
  source 1..1116: mol_type = other DNA; note = Synthetic coding sequence
atgcacatcaagagcatcatcctggagggcttcaagagctatgcccagaggacagaggtgaatggatttgaccccctcttcaatgccatcaccggcctgaatggcagcggcaagagcaacatcctggacagcatctgcttcctgctgggcatcagcaacctgagccaggtgcgggccagcaacctgcaggacctggtgtacaagaatggccaggccggcatcaccaaggcctctgtgtccatcacctttgacaacagcgacaagaagcagagccccctgggctttgaggtgcatgatgagatcaccgtgacccggcaggtggtgattggaggcaggaacaagtacctgatcaacggggtgaatgccaacaacaccagggtgcaggacctcttctgcagcgtgggcctgaatgtgaacaacccccacttcctgatcatgcagggccgcatcaccaaggtgctgaacatgaagcccccagagatcctgtccatgattgaggaggccgccggcaccaggatgtatgagtacaagaagattgctgcccagaagaccatcgagaagaaggaggccaagctgaaggagatcaagaccatcctggaggaggagatcacccccaccatccagaagctgaaggaggagaggagcagctacctggagtaccagaaggtgatgagagaaattgagcacctgagccggctgtacatcgcctaccagttcctgctggccgaggacaccaaggtgcgctctgctgaggagctgaaggagatgcaggacaaggtgatcaagctgcaggaggagctgtctgaaaatgacaagaagatcaaggccctgaaccatgaaattgaggagctggagaagaggaaggacaaggagaccggcggcatcctgcggagcctggaggatgccctggccgaggcccagagggtgaacaccaagagccagagcgcctttgacctgaagaagaagaacctggcctgtgaggagagcaagaggaaggagctggagaagaacatggtggaggacagcaagaccctggccgccaaggagaaggagaagatcaagaggaaggccttctggaagtctgctggcagctgcctggtgatcctggtggactag

SEQ ID NO: 22277 - DNA, 507 bp, synthetic construct
  source 1..507: mol_type = other DNA; note = Synthetic coding sequence
cacaagctgcagagcggcatcggccgcctcatcctgaaggaggagatgaaggcccggagcagcagctatgctgacccctggaccccacccaggagcagcaccagcagccgggaggccctgcacacagctggctatgagatgagcctgaatggcagccccaggagccactacctggccgacagcgaccccctcatcagcaagagcgccagcctgcctgcctacagaagaaatggcctgcacaggacccccagcgctgacctcttccactatgacagcatgaatgctgtgaactggggcatgagggagtacaagatctacccctatgagctgctgctggtgaccacccggggcaggaaccggctgcccaaggatgtggacaggacccggctggagcggcacctgagccaggaggagttctaccaggtgtttggcatgaccatcagcgagtttgaccggctggccctgtggaagagaaatgagctgaagaagcaggcccggctcttctag

SEQ ID NO: 22278 - DNA, 1770 bp, synthetic construct; identical to SEQ ID NO: 19217
  source 1..1770: mol_type = other DNA; note = Synthetic coding sequence

SEQ ID NO: 22279 - DNA, 1287 bp, synthetic construct
  source 1..1287: mol_type = other DNA; note = Synthetic coding sequence
atgtccatgctgaagcccagcggcctgaaggcccccaccaagatcctgaagccaggcagcacagccctgaagacccccacagctgtggtggcccctgtggagaagaccatcagcagcgagaaggccagcagcacccccagcagcgagacccaggaggagtttgtggatgacttccgggtgggggagcgggtgtgggtgaatggaaacaagccaggcttcatccagttcctgggggagacccagtttgcccctggccagtgggccggcatcgtgctggatgagcccatcggcaagaatgatggctctgtggccggcgtgcgctacttccagtgtgagcccctgaagggcatcttcacccggcccagcaagctgaccaggaaggtgcaggctgaagatgaggccaacggcctgcagaccaccccagccagccgggccaccagccccctgtgcaccagcacagcctccatggtgagcagcagccccagcacccccagcaacatcccccagaagcccagccagcctgctgccaaggagcccagcgccaccccacccatcagcaacctgaccaagacagccagcgagagcatcagcaacctgtctgaggccggcagcatcaagaagggggagcgggagctgaagatcggggacagagtgctggtgggcggcaccaaggccggcgtggtgcgcttcctgggggagacagactttgccaagggggagtggtgtggggtggagctggatgagcccctgggcaagaatgatggagctgtggccggcacccgctacttccagtgccagcccaagtatggcctgtttgcccctgtgcacaaggtgaccaagattggcttccccagcaccaccccagccaaggccaaggccaatgctgtgagaagagtgatggccaccaccagcgccagcctgaagaggagccccagcgccagcagcctgagctccatgagctctgtggccagctctgtgagcagccggcccagcaggacaggcctgcacgtgctggagctggaggccaagatggaccagctgcggaccatggtggaggccgctgaccgggagaaggtggagctgctgaaccagctggaggaggagaagaggaaggtggaggacctgcagttccgggtggaggaggagagcatcaccaagggggacctggagcagaagagccagatcagtgaagatcctgaaaatgtgcggggccacctgactgtgtggatcttccccctgctgaccaagattgaccaccggctgaagtgcctgctgatctacagctag

SEQ ID NO: 22280 - DNA, 3483 bp, synthetic construct
  source 1..3483: mol_type = other DNA; note = Synthetic coding sequence
atggtggtgaccctgggccctggccctgactgcctgatcctggaggccagccggcagccccagctggtgcccaagccagagaggatggccagtgatggagccagcgccctgcccggccctgacatgtccatgaagcccagcgctgcccccagccccagccctgccctgcccttcctgccccccaccagtgaccccccagaccaccccccccgggagcccccaccccagcccatcatgcccagcgtcttctccccagacaaccccctgatgctgagcgccttccccagcagcctgctggtgactggagatggcggcccctgcctgtctggagctggagctgggaaggtgattgtgaaggtgaagacagagggcggcagcgctgagcccagccagacccagaacttcatcctgacccagacagccctgaacagcacagcccctggcaccccctgtggcggcctggagggccctgcccccccatttgtgacagccagcaatgtgaagaccatcctgcccagcaaggctgtgggcgtgtcccaggagggccccccaggcctgcccccccagcccccacctcctgtggcccagctggtgcccatcgtgcccctggagaaggcctggccaggcccccacggcaccaccggggagggcggccctgtggccaccctgagcaagcccagcctgggggacaggagcaagatcagcaaggatgtgtatgagaacttccggcagtggcagcgctacaaggccctggcccggcggcacctgagccagagcccagacacagaggccctgagctgcttcctgatccctgtgctgcggagcctggcccggctgaagcccaccatgaccctggaggagggcctgcccctggccgtgcaggagtgggagcacaccagcaactttgacaggatgatcttctatgagatggccgagcgcttcatggagtttgaagctgaggagatgcagatccagaacacccagctgatgaatggcagccagggcctgagccctgccacccccctgaagctggaccccctgggccccctggccagcgaggtgtgccagcagcctgtgtacatccccaagaaggccgccagcaagacccgggccccccggcggcggcagaggaaggcccagaggcccccagcccctgaggcccccaaggagatccccccagaggccgtgaaggagtatgtggacatcatggagtggctggtgggcacccacctggccactggagagagtgatggcaagcaggaggaggagggccagcagcaggaggaggagggcatgtacccagaccccggcctgctgagctacatcaatgagctgtgcagccagaaggtgtttgtgtccaaggtggaggccgtcatccacccccagttcctggccgacctgctgagccctgagaagcagagggaccccctggccctgattgaggagctggagcaggaggagggcctgaccctggcccagctggtgcagaagaggctgatggccctggaggaggaggaggatgctgaggcccctccttccttcagcggggcccagctggacagcagccccagcggctctgtggaggatgaagatggagatggccgcctgcggcccagccctggcctgcagggcgccggcggggccgcctgcctgggcaaggtgagcagcagcggcaagagggcccgggaggtgcatggaggccaggagcaggccctggacagcccccggggcatgcacagagatggcaacaccctgcccagccccagctcctgggacctgcagcctgagctggccgccccccagggcaccccaggccccctgggcgtggagcggcggggcagcggcaaggtgatcaaccaggtgtccctgcaccaggacggccacctgggcggggccggccccccaggccactgcctggtggccgacaggaccagcgaggccctgcccctgtgctggcagggcggcttccagcctgagagcacccccagcctggatgctggcctggccgagctggcccccctgcagggccagggcctggagaagcaggtgctgggcctgcagaagggccagcagacaggaggccggggcgtgctgccccagggcaaggagcccctggccgtgccctgggagggcagcagcggggccatgtggggagatgaccggggcacccccatggcccagagctatgaccagaaccccagccccagggctgctggggagagagatgatgtgtgcctgagccctggggtgtggctgagcagcgagatggatgctgtgggcctggagctgcctgtgcagatcgaggaggtgattgagagcttccaggtggagaagtgtgtgacagagtaccaggagggctgccagggcctgggcagccggggcaacatcagcctgggccctggagagaccctggtgcctggggacacagagagcagcgtcatcccctgtggcggcaccgtggccgctgctgccctggagaagaggaactactgcagcctgcccggccccctgcgggccaacagcccccccctgcggagcaaggagaaccaggagcagagctgtgagaccgtgggccaccccagcgacctgtgggccgagggctgcttccccctgctggagagcggggacagcaccctgggcagcagcaaggagaccctgccccccacctgccagggcaacctgctgatcatgggcacagaagatgccagcagcctgcctgaggccagccaggaggccggcagccggggcaacagcttcagccccctgctggagaccatcgagcctgtgaacatcctggatgtgaaggatgactgtggcctgcagctgcgggtgtctgaggacacctgccccctgaatgtgcacagctatgacccccagggcgagggccgggtggaccctgacctgagcaagcccaagaacctggcccccctgcaggagagccaggagagctacaccaccggcacccccaaggccaccagcagccaccagggcctgggcagcaccctgccccggcggggcaccagaaatgccatcgtgccccgggagacctctgtgtccaagacccacaggtctgctgaccgggccaagggcaaggagaagaagaagaaggaggccgaggaggaggatgaggagctgagcaactttgcctacctgctggccagcaagctgagcctgagcccccgggagcaccccctgagcccccaccacgccagcggcggccagggcagccagagggccagccacctgctgcctgctggggccaagggccccagcaagctgccctaccctgtggccaagagcggcaagagggccctggccggcggccctgcccccacagagaagaccccccacagcggggcccagctgggcgtgccccgggagaagcccctggccctgggcgtggtgcggcccagccagcccaggaagagaagatgtgacagctttgtgacaggccgcaggaagaagagaagaagaagccagtag

SEQ ID NO: 22281 - DNA, 1548 bp, synthetic construct
  source 1..1548: mol_type = other DNA; note = Synthetic coding sequence
ctcaacagccagtgcaggaacaagaacccctttgctgctggccccaggcctccccaccaccagttcttccagaggccccagatccagcccccccgggccaccatccccaacagcagccccagcatccggcctggggcccagacccccacagctgtgtaccaggccaaccagcacatcatgatggtgaaccacctgcccatgccctaccctgtgccccagggcccccagtactgcatcccccagtaccgccacagcggccccccctacgtgggccccccccagcagtaccctgtgcagcccccaggccctggccccttctacccaggccctggccctggggacttccccaatgcctacggcacccccttctaccccagccagcctgtgtaccagagcgcccccatcatcgtgcccacccagcagcagcccccaccagccaagcgggagaagaagaccatccgcatccgggaccccaaccagggcggcaaggacatcacagaggagatcatgtctgggggcggcagcaggaaccccaccccacccatcggccggcccaccagcacccccaccccaccccagcagctgcccagccaggtgcctgagcacagccctgtggtgtatggaacagtggagagcgcccacctggccgccagcacccctgtgacagctgccagtgaccagaagcaggaggagaagcccaagccagaccctgtgctgaagagccccagccctgtgctgcggctggtgctgtctggagagaagaaggagcaggagggccagaccagcgagaccacagccatcgtgtccattgctgagctgcccctgccccccagccccaccaccgtgtcctctgtggcccggagcaccatcgccgcccccaccagcagcgccctgagcagccagcccatcttcaccacagccattgatgacagatgtgagctgagcagcccccgggaggacaccatccccatccccagcctgaccagctgcacagagaccagtgaccccctgcccaccaatgaaaatgatgatgacatctgcaagaagccctgcagcgtggccccaaatgacatccccctggtgagcagcaccaacctgatcaatgagatcaatggagtgtctgagaagctgagcgccacagagagcatcgtggagatcgtgaagcaggaggtgctgcccctgaccctggagctggagatcctggagaaccccccagaggagatgaagctggagtgcatcccagcccccatcacccccagcacagtgcccagcttcccccccaccccacccaccccaccagccagccccccccacacccctgtgattgtgcctgctgctgccaccaccgtgagcagccccagcgctgccatcaccgtgcagagggtgctggaggaggatgagagcatccgcacctgcctgtctgaagatgccaaggagatccagaacaagattgaggtggaggctgatggccagacagaggagatcctggacagccagaacctgaacagccgccgcagccctgtgcctgagaccagcaatgaatgttag

SEQ ID NO: 22282 - DNA, 204 bp, synthetic construct; identical to SEQ ID NO: 22262
  source 1..204: mol_type = other DNA; note = Synthetic coding sequence

SEQ ID NO: 22283 - DNA, 2418 bp, synthetic construct
  source 1..2418: mol_type = other DNA; note = Synthetic coding sequence
atgatgcagaatgtgcacctggcccctgagacagatgaagatgacctgtacagcggctacaatgactacaaccccatctatgacatcgaggagctggagaatgatgctgccttccagcaggccgtgaggaccagccacggccggcggccccccagcaagaccagcctggccagcagcatcggccggcccatgactggagccatccaggatggagtgacccggcccatgacagctgtgcgggccgccggcttcaccaaggccgccctgcggggcagcgcctttgaccccctgagccagagccggggccctgccagccccctggaggccaagaagaaggacagccctgaggagaagatcaagcagctggagaaggaggtgaatgagctggtggaggagagctgcatcgccaacagctgtggggacctgaagctggccctggagaaggccaaggatgctggcaggaaggagcgggtgctggtgcggcagcgggagcaggtgaccaccccagagaacatcaacctggacctgacctacagcgtgctcttcaacctggccagccagtacagcgtgaatgagatgtatgcagaggccctgaacacctaccaggtgattgtgaagaacaagatgttcagcaatgccggcatcctgaagatgaacatgggcaacatctacctgaagcagaggaactacagcaaggccatcaagttctacaggatggccctggaccaggtgcccagcgtgaacaagcagatgaggatcaagatcatgcagaacattggagtgaccttcatccaggccggccagtacagtgatgccatcaacagctatgagcacatcatgtccatggcccccaacctgaaggccggctacaacctgaccatctgctactttgccatcggggaccgggagaagatgaagaaggccttccagaagctgatcaccgtgcccctggagattgatgaggacaagtacatcagccccagtgatgacccccacaccaacctggtgacagaggccatcaagaatgaccacctgcggcagatggagcgggagaggaaggccatggccgagaagtacatcatgaccagcgccaagctgattgcccctgtgattgagaccagctttgctgctggctatgactggtgtgtggaggtggtgaaggccagccagtatgtggagctggccaatgacctggagatcaacaaggctgtgacctacctgcggcagaaggactacaaccaggccgtggagatcctgaaggtgctggagaagaaggacagccgggtgaagtctgctgctgccaccaacctgagcgccctgtactacatgggcaaggactttgcccaggccagcagctatgctgacattgctgtgaacagcgaccgctacaacccagctgccctgaccaacaagggcaacacagtgtttgccaacggggactatgagaaggctgctgagttctacaaggaggccctgagaaatgacagcagctgcacagaggccctgtacaacatcggcctgacctatgagaagctgaaccggctggatgaggccctggactgcttcctgaagctgcacgccatcctgaggaacagcgctgaggtgctgtaccagatcgccaacatctatgagctgatggagaaccccagccaggccatcgagtggctgatgcaggtggtgtctgtcatccccacagacccccaggtgctgagcaagctgggggagctgtatgaccgggagggggacaagagccaggccttccagtactactatgagagctaccgctacttcccctgcaacattgaagtcatcgagtggctgggcgcctactacatcgacacccagttctgggagaaggccatccagtactttgagcgggccagcctcatccagcccacccaggtgaagtggcagctgatggtggccagctgcttccgccgcagcggcaactaccagaaggccctggacacctacaaggacacccacaggaagttcccagaaaatgtggagtgcctgcgcttcctggtgcggctgtgcacagacctgggcctgaaggatgcccaggagtatgccaggaagctgaagaggctggagaagatgaaggagatccgggagcagaggatcaagagcggcagagatggcagcggcggcagccggggcaagcgggagggcagcgccagcggggacagcggccagaactacagcgccagcagcaaaggagagcggctgagcgcccggctgcgggccctgcccggcaccaatgagccctatgagagcagcagcaacaaggagattgatgccagctatgtggaccccctgggcccccagatcgagcggcccaagacagctgccaagaagagaattgatgaagatgactttgctgatgaggagctgggagatgacctgctgcctgagtag

SEQ ID NO: 22284 - DNA, 765 bp, synthetic construct
  source 1..765: mol_type = other DNA; note = Synthetic coding sequence
atggcccctggcagctttgctgagtacacagtggtgcctgccagcatcgccacccctgtgcccagcgtgaagccagagtacctgaccctgctggtgtctggcaccacagcctacatcagcctgaaggagctgggcggcctgtctgagggcaagaaggtgctggtgacagctgctgctgggggcaccggccagtttgccatgcagctgagcaagaaggccaagtgccacgtgattggcacctgcagcagtgatgagaagagcgccttcctgaagagcctgggctgtgaccggcccatcaactacaagacagagcctgtgggcaccgtgctgaagcaggagtacccagagggcgtggatgtggtgtatgagagcgtgggcggggccatgtttgacctggccgtggatgccctggccaccaagggccgcctcatcgtcatcggcttcatcagcggctaccagacccccaccggcctgagccctgtgaaggccggcaccctgcctgccaagctgctgaagaagagcgcctctgtgcagggcttcttcctgaaccactacctgagcaagtaccaggccgccatgagccacctgctggagatgtgtgtgtctggggacctggtgtgtgaggtggacctgggggacctgagccctgagggccgcttcaccggcctggagagcatcttccgggctgtgaactacatgtacatgggcaagaacacaggcaagatcgtggtggagctgccccacagcgtgaacagcaagctgtag

SEQ ID NO: 22285 - DNA, 1212 bp, synthetic construct
  source 1..1212: mol_type = other DNA; note = Synthetic coding sequence
atgcaccaccccatccagatgaagccagctgacagcgagaagagcaatgctgtggaggacaggaagctgttcatcggcatggtgtccaagaagtgcaatgaaaatgacatccgggtgatgttcagccccttcggccagattgaagaatgtcgcatcctgcggggcccagatggcctgagccggggctgtgcctttgtgaccttcagcacccgggccatggcccagaatgccatcaaggccatgcaccagagccagaccatggagggctgcagcagccccatcgtggtgaagtttgctgacacccagaaggacaaggagcagaggcggctgcagcagcagctggcccagcagatgcagcagctgaacacagccacctggggcaacctgaccggcctgggcggcctgaccccccagtacctggccctgctgcagcaggccaccagcagcagcaacctgggcgccttcagcggcatccagcagatggccggcatgaatgccctgcagctgcagaacctggccaccctggccgctgctgctgctgctgcccagaccagcgccaccagcaccaatgccaaccccctgagcaccaccagcagcgccctgggcgccctgaccagccctgtggccgccagcacccccaacagcacagctggagctgccatgaacagcctgaccagcctgggcaccctgcagggcctggccggggccaccgtgggcctgaacaacatcaatgccctggccgtggcccagatgctgagcggcatggccgccctgaatggaggcctgggcgccaccggcctgaccaatggaacagctggcaccatggatgccctgacccaggcctacagcggcatccagcagtatgctgctgctgccctgcccaccctgtacagccagagcctgctgcagcagcagagcgctgctggcagccagaaggagggccctgagggcgccaacctcttcatctaccacctgccccaggagtttggagaccaggacatcctgcagatgttcatgccctttggaaatgtcatcagcgccaaggtgttcatcgacaagcagaccaacctgagcaaatgttttggatttgtgtcctatgacaaccctgtgtctgcccaggccgccatccaggccatgaatggcttccagatcggcatgaagaggctgaaggtgcagctgaagaggagcaagaatgacagcaagccctactag

SEQ ID NO: 22286 - DNA, 1332 bp, synthetic construct
  source 1..1332: mol_type = other DNA; note = Synthetic coding sequence
atggccgagttcctgaagcaggtgaagccctacgtggaggagggcctgcacccccagatcatcatccgggccttcagaacagccacccagctggccgtgaacaagatcaaggagattgctgtgacagtgaagaaggctgacaaggtggagcagaggaagctgctggagaagtgtgccatgacagccctgagcagcaagctgatcagccagcagaaggccttctttgccaagatggtggtggatgctgtgatgatgctggatgacctgctgcagctgaagatgattggcatcaagaaggtgcagggcggggccctggaggacagccagctggtggccggcgtggccttcaagaagaccttctcctatgccggctttgagatgcagcccaagaagtaccacaaccccaagatcgccctgctgaatgtggagctggagctgaaggccgagaaggacaatgctgagatccgggtgcacacagtggaggactaccaggccatcgtggatgctgagtggaacatcctgtatgacaagctggagaagatccaccacagcggggccaaggtggtgctgagcaagctgcccatcggagatgtggccacccagtactttgctgaccgggacatgttctgtgccggccgggtgcctgaggaggacctgaagaggaccatgatggcctgtggcggcagcatccagacctctgtgaatgccctgtctgcagatgtgctgggccgctgccaggtgtttgaggagacccagattggaggagagcgctacaacttcttcaccggctgccccaaggccaagacctgcaccttcatcctgcggggcggcgctgagcagttcatggaggagacagagaggagcctgcatgatgccatcatgattgtgagaagagccatcaagaatgacagcgtggtggccggcggcggggccatcgagatggagctgagcaagtacctgcgggactacagcaggaccatccctgggaagcagcagctgctgattggagcctatgccaaggccctggagatcatcccccggcagctgtgtgacaatgccggctttgatgccaccaacatcctgaacaagctgcgggcccggcatgcccagggcggcacctggtatggagtggacatcaacaatgaagatattgctgacaactttgaggcctttgtgtgggagcccgccatggtgcgcatcaatgccctgacagctgccagcgaggccgcctgcctgattgtgtctgtggatgagaccatcaagaaccccaggagcacagtggatgcccccacagctgctggccggggccggggccggggccggccccactag

SEQ ID NO: 22287 - DNA, 2193 bp, synthetic construct
  source 1..2193: mol_type = other DNA; note = Synthetic coding sequence
atgcagctgtttgagcagccctgccctggagaggaccccaggcctgggggccagattggagaggtggagctgagcagctacaccccacctgctggggtgcctgggaagccagctgccccccacttcctgcctgtgctgtgcagcgtgagccccagcggcagccgggtgccccatgacctgctgggcggcagcggcggcttcaccctggaggatgccctgtttggcctgctgtttggagcagatgccaccctgctgcagagccctgtggtgctgtgtggcctgcctgatggccagctgtgctgcgtcatcctgaaggccctggtgaccagccgcagcgcccctggggaccccaatgccctggtgaagatcctgcaccacctggaggagcccgtcatcttcatcggggccctgaagacagagccccaggccgctgaggccgctgagaacttcctgcctgatgaagatgtgcactgtgactgcctggtggccttcggccaccacggccgcatgctggccatcaaggcctcctgggatgagagcggcaagctggtgcctgagctgcgggagtactgcctgcccggccctgtgctgtgtgccgcctgtggcggcggcggccgggtgtaccacagcacccccagcgacctgtgtgtggtggacctgagccggggcagcacccccctgggccctgagcagcctgaggagggccctgggggcctgccccccatgctgtgcccagccagcctgaacatctgcagcgtggtgtccctgagcgccagccccaggacccatgaaggaggcaccaagctgctggccctgagcgccaagggccgcctgatgacctgcagcctggacctggacagcgagatgcctggccctgccaggatgaccacagaatctgctggccagaagatcaaggagctgctgtctggaattggcaacatcagcgagcgggtgtccttcctgaagaaggctgtggaccagaggaacaaggccctgaccagcctgaatgaggccatgaatgtgtcctgtgccctgctgagcagcggcaccggcccccggcccatcagctgcaccaccagcaccacctggagccggctgcagacccaggatgtgctgatggccacctgtgtgctggagaacagcagcagcttcagcctggaccagggctggaccctgtgcatccaggtgctgaccagcagctgtgccctggacctggacagcgcctgcagcgccatcacctacaccatccctgtggaccagctgggccctggggcccggcgggaggtgaccctgcccctgggccctggagaaaatggaggcctggacctgcctgtgacagtgtcctgcaccctcttctacagcctgcgggaggtggtgggcggggccctggcccccagcgacagcgaggaccccttcctggatgaatgtcccagtgatgtgctgcctgagcaggagggcgtgtgcctgcccctgagccgccacacagtggacatgctgcagtgcctgcgcttccctggcctggccccaccccacacccgggcccccagccccctgggccccacccgggaccctgtggccaccttcctggagacctgccgggagcccggcagccagcctgctggccctgccagcctgcgggcagagtacctgcccccatctgtggccagcatcaaggtgtctgctgagctgctgcgggccgccctgaaggatggccacagcggcgtgcccctgtgctgtgccaccctgcagtggctgctggccgagaatgctgctgtggatgtggtgcgggcccgggccctgagcagcatccagggcgtggccccagatggagccaacgtgcacctgattgtgcgggaggtggccatgacagacctgtgcccagctggccccatccaggccgtggagatccaggtggagagcagcagcctggccgacatctgccgggcccaccacgctgtggtgggccgcatgcagaccatggtgacagagcaggccacccagggcagcagcgccccagacctgcgggtgcagtacctgcggcagatccacgccaaccacgagaccctgctgcgggaggtgcagaccctgcgggaccggctgtgcacagaagatgaggccagcagctgtgccacagcccagaggctgctgcaggtgtaccggcagctgcggcaccccagcctcatcctgctgtag

SEQ ID NO: 22288 - DNA, 4179 bp, synthetic construct
  source 1..4179: mol_type = other DNA; note = Synthetic coding sequence
atgtccatgctgaagcccagcggcctgaaggcccccaccaagatcctgaagccaggcagcacagccctgaagacccccacagctgtggtggcccctgtggagaagaccatcagcagcgagaaggccagcagcacccccagcagcgagacccaggaggagtttgtggatgacttccgggtgggggagcgggtgtgggtgaatggaaacaagccaggcttcatccagttcctgggggagacccagtttgcccctggccagtgggccggcatcgtgctggatgagcccatcggcaagaatgatggctctgtggccggcgtgcgctacttccagtgtgagcccctgaagggcatcttcacccggcccagcaagctgaccaggaaggtgcaggctgaagatgaggccaacggcctgcagaccaccccagccagccgggccaccagccccctgtgcaccagcacagcctccatggtgagcagcagccccagcacccccagcaacatcccccagaagcccagccagcctgctgccaaggagcccagcgccaccccacccatcagcaacctgaccaagacagccagcgagagcatcagcaacctgtctgaggccggcagcatcaagaagggggagcgggagctgaagatcggggacagagtgctggtgggcggcaccaaggccggcgtggtgcgcttcctgggggagacagactttgccaagggggagtggtgtggggtggagctggatgagcccctgggcaagaatgatggagctgtggccggcacccgctacttccagtgccagcccaagtatggcctgtttgcccctgtgcacaaggtgaccaagattggcttccccagcaccaccccagccaaggccaaggccaatgctgtgagaagagtgatggccaccaccagcgccagcctgaagaggagccccagcgccagcagcctgagctccatgagctctgtggccagctctgtgagcagccggcccagcaggacaggcctgctgacagagaccagcagccgctatgccaggaagatcagcggcaccacagccctgcaggaggccctgaaggagaagcagcagcacatcgagcagctgctggccgagcgggacctggagcgggcagaggtggccaaggccaccagccacgtgggggagattgagcaggagctggccctggccagagatggccatgaccagcacgtgctggagctggaggccaagatggaccagctgcggaccatggtggaggccgctgaccgggagaaggtggagctgctgaaccagctggaggaggagaagaggaaggtggaggacctgcagttccgggtggaggaggagagcatcaccaagggggacctggaggtggccaccgtgtctgagaagagccgcatcatggagctggagaaggacctggccctgcgggtgcaggaggtggccgagctgcggcggcggctggagagcaacaagccagctggagatgtggacatgagcctgagcctgctgcaggagatcagcagcctgcaggagaagctggaggtgaccaggacagaccaccagcgggagatcaccagcctgaaggagcactttggagcccgggaggagacccaccagaaggagatcaaggccctgtacacagccacagagaagctgagcaaagaaaatgaaagcctgaagagcaagctggagcacgccaacaaggaaaattctgatgtgattgccctgtggaagagcaagctggagacagccatcgccagccaccagcaggccatggaggagctgaaggtgtccttcagcaagggcctgggcacagaaacagctgagtttgctgagctgaagacccagatcgagaagatgaggctggactaccagcacgagattgagaacctgcagaaccagcaggacagcgagcgggccgcccacgccaaggagatggaggccctgcgggccaagctgatgaaggtgatcaaggagaaggagaacagcctggaggccatccgcagcaagctggacaaggccgaggaccagcacctggtggagatggaggacaccctgaacaagctgcaggaggccgagatcaaggtgaaggagctggaggtgctgcaggccaagtgcaatgagcagaccaaggtgattgacaacttcaccagccagctgaaggccacagaggagaagctgctggacctggatgccctgaggaaggccagcagcgagggcaagtctgagatgaagaagctgcggcagcagctggaggccgctgagaagcagatcaagcacctggagattgagaagaatgctgagagcagcaaggccagcagcatcacccgggagctgcagggccgggagctgaagctgaccaacctgcaggagaacctgtctgaggtgtcccaggtgaaggagaccctggagaaggagctgcagatcctgaaggagaagtttgctgaggccagcgaggaggccgtgtctgtgcagaggtccatgcaggagaccgtgaacaagctgcaccagaaggaggagcagttcaacatgctgagcagtgacctggagaagctgcgggagaacctggccgacatggaggccaagttccgggagaaggatgagcgggaggagcagctgatcaaggccaaggagaagctggagaatgacattgctgagatcatgaagatgtctggggacaacagcagccagctgaccaagatgaatgatgagctgcggctgaaggagagagatgtggaggagctgcagctgaagctgaccaaggccaatgaaaatgccagcttcctgcagaagagcattgaggacatgacagtgaaggccgagcagagccagcaggaggccgccaagaagcatgaggaggagaagaaggagctggagaggaagctgagtgacctggagaagaagatggagaccagccacaaccagtgccaggagctgaaggcccgctatgagcgggccaccagcgagaccaagaccaagcatgaggagatcctgcagaacctgcagaagaccctgctggacacagaggacaagctgaagggggcccgggaggagaacagcggcctgctgcaggagctggaggagctgaggaagcaggccgacaaggccaaggccgcccagacagcagaagatgccatgcagatcatggagcagatgaccaaggagaagacagagaccctggccagcctggaggacaccaagcagaccaatgccaagctgcagaatgagctggacaccctgaaggagaacaacctgaagaatgtggaggagctgaacaagagcaaggagctgctgactgtggagaaccagaagatggaggagttcaggaaggagattgagaccctgaagcaggccgccgcccagaagagccagcagctgagcgccctgcaggaggagaatgtgaagctggccgaggagctgggccgcagcagagatgaggtgaccagccaccagaagctggaggaggagaggtctgtgctgaacaaccagctgctggagatgaagaagcgggagagcaagttcatcaaggatgctgatgaggagaaggccagcctgcagaagagcatcagcatcaccagcgccctgctgacagagaaggatgctgagctggagaagctgagaaatgaggtgacagtgctgcggggggagaatgccagcgccaagagcctgcacagcgtggtgcagaccctggagagtgacaaggtgaagctggagctgaaggtgaagaacctggagctgcagctgaaggagaacaagaggcagctgagcagcagcagcggcaacacagacacccaggctgatgaagatgagcgggcccaggagagccagattgacttcctgaacagcgtcatcgtggacctgcagaggaagaaccaggacctgaagatgaaggtggagatgatgtctgaggccgccctgaatggaaatggagatgacctgaacaactatgacagtgatgaccaggagaagcagagcaagaagaagcccaggctcttctgtgacatctgtgactgctttgacctgcatgacacagaggactgccccacccaggcccagatgtctgaagatcctccccacagcacccaccacggcagcagaggagaggagcggccctactgtgagatctgtgagatgtttggccactgggccaccaactgcaatgatgatgagaccttctag

SEQ ID NO: 22289 - DNA, 492 bp, synthetic construct
  source 1..492: mol_type = other DNA; note = Synthetic coding sequence
atgttcaggaagattggaattgaggccctgaagcaggtgaccaagagatatgccaggaagcagaaccgctgggtgaagaaccgcttcctgagcaggcctggccccatcgtgccccctgtgtatggcctggaggtgtctgatgtgtccaagtgggaggagagcgtgctggagcccgccctggagatcgtgcagagcttcatccagggccacaagcccacagccacccccatcaagatgccctacaatgaagctgagaacaagaggagctaccacctgtgtgacctgtgtgaccgcatcatcattggagaccgggagtgggccgcccacatcaagagcaagagccacctgaaccagctgaagaagagaagaaggctggacagtgatgctgtgaacaccatcgagagccagagcgtgtccccagaccacaacaaggagcccaaggagaagggcagccctggccagaatgaccaggagctgaagtgcagcgtgtag

SEQ ID NO: 22290 - DNA, 1602 bp, synthetic construct
  source 1..1602: mol_type = other DNA; note = Synthetic coding sequence
atggccagccctgggaaggacaactacaggatgaagagctacaagaacaatgccctgaaccctgaggagatgagaagaagaagagaggaggagggcatccagctgaggaagcagaagcgggagcagcagctgttcaagagaagaaatgtggagctgatcaatgaggaggccgccatgtttgacagcctgctgatggacagctatgtgagcagcaccactggagagagcgtcatcacccgggagatggtggagatgctgttcagtgatgacagcgacctgcagctggccaccacccagaagttcaggaagctgctgagcaaggagcccagcccccccattgatgaggtgatcaacaccccccgggtggtggacagatttgtggagttcctgaagagaaatgaaaactgcaccctgcagtttgaggccgcctgggccctgaccaacatcgccagcggcaccagccagcagaccaagatcgtgattgaagctggagctgtgcccatcttcatcgagctgctgaacagcgactttgaagatgtgcaggagcaggccgtgtgggccctgggcaacattgctggggacagctctgtgtgccgggactatgtgctgaactgcagcatcctgaaccccctgctgaccctgctgaccaagagcacccggctgaccatgaccagaaatgctgtgtgggccctgagcaacctgtgccggggcaagaaccccccacctgagtttgccaaggtgagcccctgcctgcctgtgctgagccggctgctcttcagcagtgacagcgacctgctggctgatgcctgctgggccctgagctacctgagtgatggccccaatgagaagatccaggccgtcatcgacagcggcgtgtgccggcggctggtggagctgctgatgcacaatgactacaaggtggccagccctgccctgcgggctgtgggcaacatcgtgactggagatgacatccagacccaggtgatcctgaactgcagcgccctgccctgcctgctgcacctgctgagcagccccaaggagagcatcaggaaggaggcctgctggaccatcagcaacatcacagctggcaacagagcccagatccaggccgtgattgatgccaacatcttccctgtgctgattgagatcctgcagaaggccgagttccgcaccaggaaggaggccgcctgggccatcaccaatgccaccagcggcggcaccccagagcagatccgctacctggtgtccctgggctgcatcaagcccctgtgtgacctgctgactgtgatggacagcaagatcgtgcaggtggccctgaatggcctggagaacatcctgcggctgggggagcaggagggcaagaggagcggcagcggcgtgaacccctactgcggcctgattgaggaggcctacggcctggacaagattgagttcctgcagagccatgagaaccaggagatctaccagaaggcctttgacctgattgagcactactttggagtggaggatgatgacagcagcctggccccccaggtggatgagacccagcagcagttcatcttccagcagcctgaggcccccatggagggcttccagctgtag

SEQ ID NO: 22291 - DNA, 993 bp, synthetic construct; identical to SEQ ID NO: 20531
  source 1..993: mol_type = other DNA; note = Synthetic coding sequence

SEQ ID NO: 22292 - DNA, 576 bp, synthetic construct
  source 1..576: mol_type = other DNA; note = Synthetic coding sequence
atgagccgggagcggggcagccgctctgaggagcccggggccggcaaccgggagagcggcagccgggagcccggcctggccgctgctgccatgagcacagtggacctggcccgggtgggcgcctgcatcctgaagcatgctgtgactggagaggccgtggagctgcggagcctgtggagggagcacgcctgtgtggtggccggcctgcggcgcttcggctgtgtggtgtgccgctggatcgcccaggacctgagcagcctggccggcctgctggaccagcacggcgtgcggctggtgggcgtgggccctgaggccctgggcctgcaggagttcctggatggagactactttgctggggagctgtacctggatgagagcaagcagctgtacaaggagctgggcttcaagcgctacaacagcctgagcatcctgcctgctgccctgggcaagcctgtgagagatgtggccgccaagagccctggggactatgtgcccaaggagcacatcctgcaggtgctgggcatctctgctgaggtgtgtgccagtgaccccccccagtgtgaccgggaggtgtag

SEQ ID NO: 22293 - DNA, 1050 bp, synthetic construct
  source 1..1050: mol_type = other DNA; note = Synthetic coding sequence
aacaccatccatgatgtgctggatgtggaggccgctgtggtgaacctggacaacagcgtggtggacctggagaccctgcaggccctgtatgaaaatagagcccagagtgatgagctggagaagattgagaagcacggccgcagcagcaaggacaaggaaaatgccaagagcctggacaagccagagcagttcctgtatgagctgagcctcatccccaacttcagcgagagggtcttctgcatcctcttccagagcaccttcagcgagagcatctgcagcatccggaggaagctggagctgctgcagaagctgtgtgagaccctgaagaatggacctggggtgatgcaggtgctgggcctggtgctggccttcggcaactacatgaatggaggcaacaagacccggggccaggctgatggcttcggcctggacatcctgcccaagctgaaggatgtgaagagcagtgacaacagccgcagcctgctgagctacatcgtgtcctactacctgaggaactttgatgaagatgctgggaaggagcagtgcctcttccccctgcctgagccccaggacctcttccaggccagccagatgaagtttgaggacttccagaaggacctgaggaagctgaagaaggacctgaaggcctgtgaggtggaggccggcaaggtgtaccaggtgagcagcaaggagcacatgcagcccttcaaggagaacatggagcagttcatcatccaggccaagattgaccaggaggccgaggagaacagcctgacagagacccacaagtgcttcctggagaccacagcctacttcttcatgaagcccaagctgggggagaaggaggtgagccccaatgccttcttcagcatctggcatgagttcagcagtgacttcaaggacttctggaagaaggagaacaagctgctgctgcaggagcgggtgaaggaggccgaggaggtgtgccggcagaagaagggcaagagcctgtacaagatcaagcccaggcatgattctggcatcaagaacaacaacagcatgcacacctag

SEQ ID NO: 22294 - DNA, 570 bp, synthetic construct
  source 1..570: mol_type = other DNA; note = Synthetic coding sequence
atgacagccagcgccagcagcttcagcagcagccagggcgtgcagcagcccagcatctacagcttcagccagatcaccaggagcctcttcctgagcaatggagtggccgccaatgacaagctgctgctgagcagcaaccgcatcacagccatcgtgaatgcctctgtggagggccagaggatcctgcggggcatccagtacatcaaggtgcctgtgacagatgcccgggacagccggctgtatgacttctttgaccccatcgctgacctgatccacaccatcgacatgaggcagggccgcaccctgctgcactgcatggccggcgtgagccgcagcgccagcctgtgcctggcctacctgatgaagtaccacagcatgagcctgctggatgcccacacctggaccaagagccggcggcccatcatccggcccaacaacggcttctgggagcagctgatcaactatgagttcaagctgttcaacaacaacacagtgaggatgatcaacagccctgtgggcaacatcccagacatctatgagaaggacctgaggatgatgatctccatgtag

SEQ ID NO: 22295 - DNA, 549 bp, synthetic construct; identical to SEQ ID NO: 18787
  source 1..549: mol_type = other DNA; note = Synthetic coding sequence

SEQ ID NO: 22296 - DNA, 387 bp, synthetic construct
  source 1..387: mol_type = other DNA; note = Synthetic coding sequence
atggtgttccgccgctttgtggaggtgggccgggtggcctacgtgtcctttggcccccatgctgggaagctggtggccatcgtggatgtgattgaccagaacagagccctggtggatggcccctgcacccaggtgcggcggcaggccatgcccttcaagtgcatgcagctgacagacttcatcctgaagttcccccacagcgcccaccagaagtatgtgcggcaggcctggcagaaggctgacatcaacaccaagtgggccgccacccgctgggccaagaagattgaggcccgggagaggaaggccaagatgacagactttgaccgcttcaaggtgatgaaggccaagaagatgaggaaccgcatcatcaagaatgacaccaggtag

SEQ ID NO: 22297 - DNA, 492 bp, synthetic construct; identical to SEQ ID NO: 22289
  source 1..492: mol_type = other DNA; note = Synthetic coding sequence

SEQ ID NO: 22298 - DNA, 1224 bp, synthetic construct
  source 1..1224: mol_type = other DNA; note = Synthetic coding sequence
atggctgctgagctgtatgccccagccagcgctgctgctgctgacctggccaacagcaatgctggagctgctgtgggcaggaaggccggccccaggagcccccccagcgccccagccccagcccctcctcctccagccccagccccacccaccctgggcaacaaccaccaggagagccctggctggcgctgctgccggcccaccctgcgggagagaaatgccctgatgttcaacaatgagctgatggctgatgtgcactttgtggtgggccccccaggggccaccaggacagtgcctgcccacaagtatgtgctggccgtgggcagcagcgtcttctacgccatgttttatggagacctggccgaggtgaagtctgagatccacatcccagatgtggagcctgctgccttcctgatcctgctgaagtacatgtacagtgatgaaattgacctggaggccgacacagtgctggccaccctgtatgctgccaagaagtacatcgtgcctgccctggccaaggcctgtgtgaacttcctggagaccagcctggaggccaagaatgcctgtgtgctgctgagccagagccggctgtttgaggagcctgagctgacccagcgctgctgggaggtgattgatgcccaggccgagatggccctgcggtctgagggcttctgtgaaattgaccggcagaccctggagatcatcgtgacccgggaggccctgaacaccaaggaggccgtggtgtttgaagctgtgctgaactgggccgaggccgagtgcaagaggcagggcctgcccatcacccccaggaacaagagacatgtgctgggccgggccctgtacctggtgcgcatccccaccatgaccctggaggagtttgccaatggagctgcccagagcgacatcctgaccctggaggagacccacagcatcttcctgtggtacacagccaccaacaagccccggctggacttccccctgaccaagaggaagggcctggccccccagcgctgccaccgcttccagagcagcgcctaccgcagcaaccagtggagataccggggccgctgtgacagcatccagtttgctgtggaccggcgggtcttcatcgccggcctgggcctgtatggcagcagcagcggcaaggccgagtacagcgtgaagattgagctgaagaggctgggcgtggtgctggcccagaacctgaccaagttcatgtcctag

SEQ ID NO: 22299 - DNA, 603 bp, synthetic construct
  source 1..603: mol_type = other DNA; note = Synthetic coding sequence
atgctggagctggtggcccagaagcagcgggagcgggaggagcgggaggagcgggaggccctggagcgggagcggcagaggcggcggcagggccaggagctgtctgctgcccggcagaggctgcaggaggatgagatgagaagagctgctgaggagcggcggcgggagaaggccgaggagctggccgcccggcagagggtgcgggagaagattgagcgggacaaggccgagcgggccaagaagtatggaggctctgtgggcagccagcccccacctgtggcccctgagcccggccctgtgcccagcagccccagccaggagccccccaccaagcgggagtatgaccagtgccgcatccaggtgcggctgcctgatggcaccagcctgacccagaccttccgggcccgggagcagctggccgctgtgcggctgtatgtggagctgcacagaggagaggagctgggcggcggccaggaccctgtgcagctgctgagcggcttcccccggcgggccttcagcgaggccgacatggagcggcccctgcaggagctgggcctggtgcccagcgctgtgctgattgtggccaagaagtgccccagctag

SEQ ID NO: 22300 - DNA, 885 bp, synthetic construct
  source 1..885: mol_type = other DNA; note = Synthetic coding sequence
atgggcctggcctcctggagccagctggccagcaccccccgggcccctggcagcagagatgcccgctgggagcggcgggagcccgccctgcggggggccaaggaccggctgaccatcggcaagcacctggacatgggcagcccccagctgcggacccgggaccggggctggcccagccccaggcctgagcgggagaagaggaccagccagagcgcccggcggcccacctgcacagagagccgctggaagtctgaggaggaggtggagagtgatgatgagtacctggccctgcctgcccggctgacccaggtgagcagcctggtgtcctacctgggcagcatcagcaccctggtgaccctgcccaccggggacatcaagggccagagccccctggaggtgtctgacagtgatggccctgccagcttccccagcagcagcagccagagccagctgcccccaggagctgccctgcagggcagcggggaccctgagggccagaacccctgcttcctgcggagctttgtgcgggcccatgacagcgctggggagggcagcctgggcagcagccaggccctgggcgtgagcagcggcctgctgaagacccggcccagcctgcctgcccggctggaccgctggcccttcagtgaccctgatgtggagggccagctgcccaggaagggcggggagcagggcaaggagagcctggtgcagtgtgtgaaggtgatgaccctgaatgtgaggaagctgtgtgtgcaggtgtcctgcctcttcccccagagcaccaacatcatcatcaagcacgtgcacgtggaccaggccctcttcatgtgccaggccctgtgctgcaccctgagctacagcgtgctgaccaccttcaccaggtag

SEQ ID NO: 22301 - DNA, 354 bp, synthetic construct
  source 1..354: mol_type = other DNA; note = Synthetic coding sequence
atggtgaggaagatcaccctggtgtctgctgcccctgggaaggtgatctgtgagatgaaggtggaggaggagcacaccaatgccatcggcaccctgcatggaggcctgacagccaccctggtggacaacatcagcaccatggccctgctgtgcacagagcggggggcccctggggtgtctgtggacatgaacatcacctacatgagccctgccaagctgggagaagatattgtcatcacagcccacgtgctgaagcagggcaagaccctggccttcacctctgtggacctgaccaacaaggccaccgggaagctgattgcccagggccgccacaccaagcacctgggcaactag

SEQ ID NO: 22302 - DNA, 840 bp, synthetic construct
  source 1..840: mol_type = other DNA; note = Synthetic coding sequence
atgaccagcggcaagatcaagaagttcatccaggagaacatcttcggcatctgcccccacatgacagaggacaacaaggacctgatccagggcaaggacctgctgattgcctactatgatgtggactatgagaagaatgccaagggcagcaactactggaggaacagagtgatgatggtggccaagaagttcctggatgctggccacaagctgaactttgctgtggccagcaggaagaccttcagccatgagctgagtgactttggcctggagagcacagctggggagatccctgtggtggccatcagaacagccaagggggagaagtttgtgatgcaggaggagttcagcagagatggcaaggccctggagcgcttcctgcaggactactttgatggcaacctgaagcgctacctgaagtctgagcccatccctgagagcaatgatggccctgtgaaggtggtggtggccgagaactttgatgaaattgtgaacaatgaaaacaaggatgtgctgattgagttctacgccccctggtgtggccactgcaagaacctggagcccaagtacaaggagctgggggagaagctgagcaaggaccccaacatcgtgattgccaagatggatgccacagccaatgatgtgcccagcccctatgaggtgcggggcttccccaccatctacttctccccagccaacaagaagctgaaccccaagaagtatgaaggaggccgggagctgagtgacttcatctcctacctgcagcgggaggccaccaacccccctgtgatccaggaggagaagcccaagaagaagaagaaggcccaggaggacctgtag

SEQ ID NO: 22303 - DNA, 3228 bp, synthetic construct
  source 1..3228: mol_type = other DNA; note = Synthetic coding sequence
atgagccagggcttccaccctgagcgggaccccagcgacctgaagaaggtgaaggctgtggaggagaatggagaggaggccgagcctgtgagaaatggagctgagagcgtgtctgagggggagggcattgatgccaacagcggcagcacagacagcagtggagatggagtgaccttccccttcaagccagagagctggaagcccacagacacagagggcaagaagcagtatgaccgggagttcctgctggacttccagttcatgcctgcctgcatccagaagccagagggcctgccccccatcagtgatgtggtgctggacaagatcaaccagcccaagctgcccatgaggaccctggacccccgcatcctgccccggggccctgacttcaccccagcctttgctgactttggccggcagacccctgggggccggggcgtgcccatctgcaaggtgcagagccgccacggcctgcccatcctggagcagagcaaggcccccacctgcccccccctggtgatgagccacccccccatgaagagcctgcccctgggcctgctgaatgtgggcagccgccgcagccagcccggccagaggcgggagcccaggaagatcatcaccgtgtctgtgaaggaggatgtgcacctgaagaaggccgagaatgcctggaagcccagccagaagagggacagccaggctgatgatcctgagaacatcaagacccaggagctgttcaggaaggtgcgcagcatcctgaacaagctgaccccccagatgttcaaccagctgatgaagcaggtgtctggcctgactgtggacacagaggagcggctgaagggcgtcatcgacctggtgtttgagaaggccattgatgagcccagcttctctgtggcctatgccaacatgtgccgctgcctggtgaccctgaaggtgcccatggctgacaagccaggcaacacagtgaacttcaggaagctgctgctgaaccgctgccagaaggagtttgagaaggacaaggcagatgatgatgtgtttgagaagaagcagaaggagctggaggccgccagcgcccctgaggagaggacccggctgcatgatgagctggaggaggccaaggacaaggccaggagaagaagcatcggcaacatcaagttcatcggggagctgttcaagctgaagatgctgacagaggccatcatgcatgactgtgtggtgaagctgctgaagaaccatgatgaggagagcctggagtgcctgtgccgcctgctgaccaccatcggcaaggacctggactttgagaaggccaagcccaggatggaccagtacttcaaccagatggagaagatcgtgaaggagaggaagaccagcagccgcatccgcttcatgctgcaggatgtgattgacctgcggctgtgcaactgggtgtccagaagagctgaccagggccccaagaccatcgagcagatccacaaggaggccaagattgaggagcaggaggagcagaggaaggtgcagcagctgatgaccaaggagaagagaagacctggggtgcagagggtggatgaaggaggctggaacacagtgcagggcgccaagaacagccgggtgctggaccccagcaagttcctgaagatcaccaagcccaccattgatgagaagatccagctggtgcccaaggcccagctgggctcctggggcaagggcagcagcggcggggccaaggccagcgagacagatgccctgcggagcagcgccagcagcctgaaccgcttcagcgccctgcagcccccagcccccagcggcagcacccccagcacccctgtggagtttgacagcaggaggaccctgaccagccggggctccatgggccgggagaagaatgacaagcccctgcccagcgccacagcccggcccaacaccttcatgaggggcggcagcagcaaggacctgctggacaaccagagccaggaggagcagaggcgggagatgctggagaccgtgaagcagctgactggaggagtggatgtggagaggaacagcacagaagctgagaggaacaagacccgggagagcgccaagccagagatcagcgccatgtctgcccatgacaaggccgccctgtctgaggaggagctggagaggaagagcaagagcatcattgatgagttcctgcacatcaatgacttcaaggaggccatgcagtgtgtggaggagctgaatgcccagggcctgctgcacgtgtttgtgcgggtgggcgtggagagcaccctggagaggagccagatcacccgggaccacatgggccagctgctgtaccagctggtgcagagcgagaagctgagcaagcaggacttcttcaagggcttcagcgagaccctggagctggctgatgacatggccatcgacatcccccacatctggctgtacctggccgagctggtgacccccatgctgaaggagggcggcatctccatgagggagctgaccatcgagttcagcaagcccctgctgcctgtgggccgggccggcgtgctgctgtctgagatcctgcacctgctgtgcaagcagatgagccacaagaaggtgggcgccctgtggagggaggccgacctgtcctggaaggacttcctgcctgaaggagaagatgtgcacaacttcctgctggagcagaagctggacttcattgaaagtgacagcccctgcagcagcgaggccctgagcaagaaggagctgtctgctgaggagctgtacaagaggctggagaagctgatcatcgaggacaaggccaatgatgagcagatctttgactgggtggaggccaacctggatgagatccagatgagcagccccaccttcctgcgggccctgatgacagctgtgtgcaaggccgccatcatcgctgacagcagcaccttccgggtggacacagctgtgatcaagcagagggtgcccatcctgctgaagtacctggacagcgacacagagaaggagctgcaggccctgtatgccctgcaggccagcatcgtgaagctggaccagcctgccaacctgctgaggatgttctttgactgcctgtatgatgaggaggtgatcagtgaagatgccttctacaagtgggagagcagcaaggaccctgctgagcagaatggaaaaggagtggccctgaagtctgtgacagccttcttcacctggctgcgggaggccgaggaggagagcgaggacaactag

SEQ ID NO: 22304 - DNA, 474 bp, synthetic construct
  source 1..474: mol_type = other DNA; note = Synthetic coding sequence
atgaagtgcatcccctacagcgtgctgctgaaggacctggagatgaggaacctgcgggagctggaggacctgatcatcgaggccgtgtacacagacatcatccagggcaagctggaccagaggaaccagctgctggaggtggacttctgcatcggccgggacatcaggaagaaggacatcaacaacatcgtgaagaccctgcacgagtggtgtgatggctgtgaggccgtgctgctgggcatcgagcagcaggtgctgcgggccaaccagtacaaggagaaccacaacagaacccagcagcaggtggaggccgaggtgaccaacatcaagaagaccctgaaggccacagccagcagcagcgcccaggagatggagcagcagctggccgagcgggagtgcccccctcatgctgagcagaggcagcccaccaagaagatgagcaaggtgaagggcctggtgagcagccgccactag

SEQ ID NO: 22305 - DNA, 837 bp, synthetic construct
  source 1..837: mol_type = other DNA; note = Synthetic coding sequence
atggactgccgggagatggacctgtatgaggactaccagagcccctttgattttgatgctggggtgaacaagagctacctgtacctgagccccagcggcaacagcagccccccaggcagccccaccctgcagaagtttggcctgctgaggacagatcctgtgcctgaggagggagaagatgtggccgccaccatcagcgccacagagaccctgtctgaggaggagcaggaggagctgcggcgggagctggccaaggtggaggaggagatccagaccctgagccaggtgctggccgccaaggagaagcacctggccgagatcaagaggaagctgggcatcaacagcctgcaggagctgaagcagaacatcgccaagggctggcaggatgtgacagccaccagcgcctacaagaagaccagcgagaccctgagccaggccggccagaaggccagcgctgccttcagctctgtgggcagcgtcatcaccaagaagctggaggatgtgaagaacagccccaccttcaagagctttgaggagaaggtggagaacctgaagggcagccccaagaatgtggagagctttgcctccatgctgcggcacagccccctgacccagatgggccctgccaaggacaagctggtgattggccgcatcttccacatcgtggagaatgacctgtacatcgactttggaggcaagttccactgtgtgtgcagaagacctgaggtggatggagagagccccatctcctggtatgctgtgtggaggcgcttcagccaggtgatgatcacctgcttcagcagcaacagcgactttgggaagcacaggaagaggtag

SEQ ID NO: 22306 - DNA, 3123 bp, synthetic construct; identical to SEQ ID NO: 19245
  source 1..3123: mol_type = other DNA; note = Synthetic coding sequence

SEQ ID NO: 22307 - DNA, 1809 bp, synthetic construct
  source 1..1809: mol_type = other DNA; note = Synthetic coding sequence
atgtctgacaagagtgacctgaaggccgagctggagaggaagaagcagaggctggcccagatccgggaggagaagaagaggaaggaggaggagaggaagaagaaggaggccgacatgcagcagaagaaggagcctgtgcaggatgacagcgacctggacaggaagaggcgggagacagaggccctgctgcagagcatcggcatcagccctgagccccccctggtgcccacccccatgagccccagcagcaagtctgtgtccacccccagcgaggccggcagccaggacagcggggacctgggccccctgacccggcggcggctgcacaagctgggcgtgtccaaggtgacccaggtggacttcctgccccgggaggtggtgtcctacagcaaggagacccagacccccctggccacccaccagagcgaggaggatgaagaagatgaggagatggtggagagcaaggtgggccaggacagcgagctggagaaccaggacaagaagcaggaggtgaaggaggccccaccccgggagctgacagaggaggagaagcagcagatcctgcacagcgaggagttcctgatcttctttgacaggaccatccgggtcatcgagcgggccctggccgaggacagcgacatcttctttgactacagcggccgggagctggaggagaaggatggagatgtgcaggccggggccaacctgtccttcaaccggcagttctatgatgagcactggagcaagcaccgggtggtgacctgcatggactggagcctgcagtacccagagctgatggtggccagctacaacaacaatgaagatgcccctcatgagccagatggagtggccctggtgtggaacatgaagttcaagaagaccaccccagaatatgtgttccactgccagagctctgtgatgtctgtgtgctttgcccgcttccaccccaacctggtggtgggcggcacctacagcggccagatcgtgctgtgggacaacagaagccacaggaggacccctgtgcagaggacccccctgtctgctgctgcccacacccaccctgtgtactgtgtgaatgtggtgggcacccagaatgcccacaacctgatcaccgtgtccacagatggcaagatgtgctcctggagcctggacatgctgagcaccccccaggagagcatggagctggtgtacaacaagagcaagcctgtggccgtgacaggcatggccttccccactggagatgtgaacaactttgtggtgggcagcgaggagggcaccgtgtacacagcctgcagacatggcagcaaggccggcattggagaggtgtttgagggccaccagggccctgtgacaggcatcaactgccacatggctgtgggccccatcgacttcagccacctgtttgtgaccagcagctttgactggacagtgaagctgtggaccaccaagcacaacaagcccctgtacagctttgaggacaatgctgactatgtgtatgatgtgatgtggagccctgtgcacccagccctgtttgcctgtgtggatggcatgggccgcctggacctgtggaacctgaacaatgacacagaggtgcccacagcctctgtggccatcgagggcgccagcgccctgaacagagtgcgctgggcccaggccggcaaggaggtggccgtgggggacagcgagggccgcatctgggtgtatgatgtgggggagggcctggccatgctgcccggctggagccagaacagctggacccaggccatcctgctgtgctggccacccaaggtgctgggcctgcagacctag

SEQ ID NO: 22308 - DNA, 2847 bp, synthetic construct
  source 1..2847: mol_type = other DNA; note = Synthetic coding sequence
atgtatggcagcgcccggtctgtgggcaaggtggagcccagcagccagagccctggccgcagcccccggctgcccaggagcccccggctgggccacaggaggaccaacagcactggaggcagcagcggcagctctgtgggcggcggcagcggcaagaccctgtccatggagaacatccagagcctgaatgctgcctatgccaccagcggccccatgtacctgagtgaccatgaaaatgtgggcagcgagacccccaagagcaccatgaccctgggccgcagcggcggccgcctgccctacggcgtgaggatgacagccatgggcagcagccccaacatcgccagcagcggcgtggccagtgacaccatcgcctttggagagcaccacctgccccctgtgtccatggccagcacagtgccccacagcctgcggcaggcccgggacaacaccatcatggacctgcagacccagctgaaggaggtgctgcgggagaatgacctgctgaggaaggatgtggaggtgaaggagagcaagctgagcagctccatgaacagcatcaagaccttctggagccctgagctgaagaaggagcgggccctgaggaaggatgaggccagcaagatcaccatctggaaggagcagtacagagtggtgcaggaggagaaccagcacatgcagatgaccatccaggccctgcaggatgagctgcgcatccagagggacctgaaccagctgttccagcaggacagcagcagcaggactggagagccctgtgtggccgagctgacagaggagaacttccagaggctgcacgccgagcacgagcggcaggccaaggagctgttcctgctgaggaagaccctggaggagatggagctgagaattgagacccagaagcagaccctgaatgccagagatgagagcatcaagaagctgctggagatgctgcagagcaagggcctgagcgccaaggccacagaggaggaccacgagaggacccggcggctggccgaggccgagatgcacgtgcaccacctggagagcctgctggagcagaaggagaaggagaacagcatgctgcgggaggagatgcacagaagatttgaaaatgccccagacagcgccaagaccaaggccctgcagaccgtcatcgagatgaaggacagcaagatcagctccatggagcggggcctgcgggacctggaggaggagatccagatgctgaagagcaatggagccctgagcacagaggagcgggaggaggagatgaagcagatggaggtgtaccgcagccacagcaagttcatgaagaacaagattggccaggtgaagcaggagctgagcaggaaggacacagagctgctggccctgcagaccaagctggagaccctgaccaaccagttcagtgacagcaagcagcacatcgaggtgctgaaggagagcctgacagccaaggagcagagagctgccatcctgcagacagaggtggatgccctgcggctgcggctggaggagaaggagaccatgctgaacaagaagaccaagcagatccaggacatggccgaggagaagggcacccaggccggggagatccatgacctgaaggacatgctggatgtgaaggagaggaaggtgaatgtgctgcagaagaagattgagaacctgcaggagcagctgcgggacaaggagaagcagatgagcagcctgaaggagcgggtgaagagcctgcaggccgacaccaccaacacagacacagccctgaccaccctggaggaggccctggccgagaaggagaggaccatcgagcggctgaaggagcagagggacagagatgagcgggagaagcaggaggagattgacaactacaagaaggacctgaaggacctgaaggagaaggtgtccctgctgcagggcgacctgtctgagaaggaggccagcctgctggacctgaaggagcacgccagcagcctggccagcagcggcctgaagaaggacagccggctgaagaccctggagatcgccctggagcagaagaaggaggagtgcctgaagatggagagccagctgaagaaggcccatgaagctgccctggaggcccgggccagccctgagatgtctgaccgcatccagcacctggagcgggagatcacccgctacaaggatgagagcagcaaggcccaggccgaggtggaccggctgctggagatcctgaaggaggtggagaatgagaagaatgacaaggacaagaagattgctgagctggagagcctcttcagccggcaggtgaaggaccagaacaagaaggtggccaacctgaagcacaaggagcaggtggagaagaagaagagcgcccagatgctggaggaggcccggcggcgggaggacaacctgaatgacagcagccagcagctgcaggtggaggagctgctgatggccatggagaaggtgaagcaggagctggagagcatgaaggccaagctgagcagcacccagcagagcctggccgagaaggagacccacctgaccaacctgcgggcagagaggaggaagcacctggaggaggtgctggagatgaagcaggaggccctgctggccgccatcagcgagaaggatgccaacatcgccctgctggagctgagcagcagcaagaagaagacccaggaggaggtggccgccctgaagcgggagaaggaccggctggtgcagcagctgaagcagcagacccagaacaggatgaagctgatggctgacaactatgaagatgaccacttcaagagcagccacagcaaccagaccaaccacaagcccagcccagaccaggatgaggaggagggcatctgggcctag

SEQ ID NO: 22309 - DNA, 2742 bp, synthetic construct
  source 1..2742: mol_type = other DNA; note = Synthetic coding sequence
atggaggtgggcagcgaggaggagaagtgggagaagctggatgctgagtttgaccactttgtggtggacatgaagccctttgtgctgaagctgccccacaggacagagcggcagagatgtgccctgtggatcaggaagctgtgtgagcccagcggcactggagctggcatcatgggcaggaagaacagaaacctgtatgccaagctgctgctgcacatgctgaagagaggagccctggagggccccttcacccacaggcctgagcccggcaccctgaagatcctgcccagctacatgagcatctactttgatgagcccaacccagcccgggccaagggcagcagccctgagggcctgcctgcctgggtgctgggggagctggagaccagcgagcacaagctgaatgaatcctggaagctgagcagcggggaggacaacaccctggtgcagagccccacagatgtgtacagccgggagcagtacaccgggaagctgcgggtgcgcagccacagcctgagccccacccaccgggaggatggccagaacatcacccccaagatctgtgaggtgtacagcaagaagagccctgtgtccctggatgacagcgacatcgaggcccggctgaacagctggaacctgggcctggacatgaagaccaagatgatggaggccaagttccacgaggagaagctgaagctgcagcagaagcatgatgctgatgtgcagaagatcctggagaggaagaacaatgaaattgaggagctgaagaccctgtaccgcagcaagcagcacgagacagaggagaccatcaggaagctggagaagaaggtgcagaccctcatccgggactgccaggtgatccgggagaccaaggaggaccagattgctgagctgaagaagatctgtgagcagagcacagagagcctgaacaatgactgggagaagaagctgcacaatgctgtggccgagatggagcaggagaagtttgacctgcagaagcagcacacagagaacatccaggagctgctggaggacaccaacgtgcggctgaacaagatggagagcgagtacatggcccagacccagagcaccaaccacatgatcaaggagctggaggcccgggtgcagcagctgactggagaggccgagaacagcaacctgcagaggcagaagctgatccaggagaaggccgagctggagcgctgctaccagatcacctgcagcgagctgcaggaggtgaaggcccggaggaacaccctgcacaaggagaaggaccacctggtgaatgactatgagcagaacatgaagctgctgcagaccaagtatgatgctgacatcaacctgctgaagcaggagcacgccctgagcgccagcaaggccagctccatgattgaggagctggagcagaatgtgtgccagctgaagcagcagctgcaggagagcgagctgcagaggaagcagcagctgcgggaccaggagaacaagttccagatggagaagagccacctgaagcacatctatgagaagaaggcccatgacctgcagagcgagctggacaagggcaaggaggacacccagaagaagatccacaagtttgaggaggccctgaaggagaaggaggagcagctgaccagggtgacagaggtgcagaggctgcaggcccagcaggctgatgctgccctggaggagttcaagaggcaggtggagctgaacagcgagaaggtgtatgcagagatgaaggagcagatggagaaggtggaggccgacctgaccaggagcaagagcctgcgggagaagcagagcaaggagttcctgtggcagctggaggacatccggcagagatatgagcagcagatcgtggagctgaagctggagcacgagcaggagaagacccacctgctgcagcagcacaatgctgagaaggacagcctggtgcgggaccacgagcgggagattgagaacctggagaagcagctgcgggccgccaacatggagcacgagaaccagatccaggagttcaagaagagagatgcccaggtgattgctgacatggaggcccaggtgcacaagctgcgggaggagctgatcaacgtgaacagccagaggaagcagcagctggtggagctgggcctgctgcgggaggaggagaagcagagggccacccgggagcacgagatcgtggtgaacaagctgaaggccgagagcgagaagatgaagattgagctgaagaagacccatgctgctgagacagagatgaccctggagaaggccaacagcaagctgaagcagatcgagaaggagtacacccagaagctggccaagagcagccagatcatcgccgagctgcagaccaccatcagcagcctgaaggaggagaacagccagcagcagctggccgctgagcggcggctgcaggatgtgcggcagaagtttgaagatgagaagaagcagctgatccgggacaatgaccaggccatcaaggtgctgcaggatgagctggagaacagaagcaaccaggtgcgctgtgccgagaagaagctgcagcacaaggagctggagagccaggagcagatcacctacatccggcaggagtatgagaccaagctgaagggcctgatgcctgccagcctgcggcaggagctggaggacaccatcagcagcctgaagagccaggtgaacttcctgcagaagagggccagcatcctgcaggaggagctgaccacctaccagggcagaagatag

SEQ ID NO: 22310 - DNA, 825 bp, synthetic construct
  source 1..825: mol_type = other DNA; note = Synthetic coding sequence
atgcaggatgagaagctgagagatgaaacagagcagcctgtgtccaaggtgattgaaagaaaccggctgaggacagtgctgaagaacctgagcctgctgaagctgctgaagagcagcaacagacgcatccaggagctgcacaagctggccaagcgctgctggcacagcctgctgtctgtgcccaagatcctgcgcatcagcagcggggagaacagcgcctgcaacaagaccaagcagaacaatgaggagttccaggagatcggctgcagcgagaaggagctgaagagcaagaagctggagagcactggagaccccaagaagaaggagtacaaggagtggaagagccaggtgcagagcggcatgaggaacaaggagaagaccagcctggccgccatgcccaggaaggagaagcacatcgagcctgaggtgcccaggaccagcagagatgacagcctgaaccctggggtgcagggccggcagcccctgacagagggccccagggtcatcttcatcaagccctacagaaacagaacacccatgggccacatgaagcagctggatgtggccgaccagtggatctggtttgagggcctgcccacccgcatccacctgcctgccccccgggtgatgtgccgcagcagcaccctgcgctgggtgaagaggcgctgcacccgcttctgcagcgccagcctggagatgcccatgtggcacccctacaaggtggatgtgacctggacccgggcccggggggccagccggggctggaggagccgccaccagctgaagggcagaaatggctggaggaacagccgggtgtacaagtag

SEQ ID NO: 22311 - DNA, 156 bp, synthetic construct
  source 1..156: mol_type = other DNA; note = Synthetic coding sequence
atgcagctgcggcacatcggggacaacatcgaccacaggatggtgcgggaggacctgcagcaggacggcagagatgccctggaccactttgtgttcttcttcttccggcgggtgcaggtgctgctgcacttcttctggaacaaccacctgctgtag

SEQ ID NO: 22312 - DNA, 444 bp, synthetic construct
  source 1..444: mol_type = other DNA; note = Synthetic coding sequence
atggccggcggggcccgggaggtgctgaccctgcagctgggccactttgctggctttgtgggcgcccactggtggaaccagcaggatgctgccctgggccgggccacagacagcaaggagcccccaggagagctgtgcccagatgtgctgtacagaactggaagaaccctgcacggccaggagacctacacccccaggctcatcctgatggacctgaagggcagcctgagcagcctgaaggaggagggcggcctgtacagagacaagcagctggatgctgccatcgcctggcagggcaagctgaccacccacaaggaggagctgtaccccaagaacccctacctgcaggacttcctgtctgctgaggtgcgggcctctgtgctgaacttcctgacccgctgccacaacctgcgggtgtccattggagctggcagcgctgagtag

SEQ ID NO: 22313 - DNA, 1677 bp, synthetic construct
  source 1..1677: mol_type = other DNA; note = Synthetic coding sequence
atgtctgtgtctgtgcatgagaccaggaagagccgcagcagcacaggctccatgaatgtgaccctcttccacaaggccagccacccagactgtgtgctggccgccagcagccgctactttgaggccatgttcagccacggcctgcgggagagcagagatgacacagtgaacttccaggacaacctgcaccctgaggtgctggagctgctgctggactttgcctacagcagcagaattgccatcaatgaggagaatgctgagagcctgctggaggccggggacatgctgcagttccatgatgtgagagatgctgctgctgagttcctggagaagaacctcttccccagcaactgcctgggcatgatgctgctgagtgatgcccaccagtgccggcggctgtatgagttctcctggaggatgtgcctggtgcactttgaaacagtgcggcagagcgaggacttcaacagcctgagcaaggacaccctgctggacctgatcagcagtgatgagctggagacagaagatgagcgggtggtgtttgaggccatcctgcagtgggtgaagcatgacctggagcccaggaaggtgcacctgcctgagctgctgcggtctgtgcggctggccctgctgcccagcgactgcctgcaggaggccgtgtcctctgaggccctgctgatggctgatgagaggaccaagctgatcatggatgaggccctgcgctgcaagacccgcatcctgcagaatgatggagtggtgaccagcccctgtgcccggcccaggaaggccggccacaccctgctgatcctgggcggccagaccttcatgtgtgacaagatctaccaggtggaccacaaggccaaggagatcatccccaaggctgacctgcccagccccaggaaggagttcagcgccagcgccatcggctgcaaggtgtatgtgactggaggccggggctctgaaaatggagtgtccaaggatgtgtgggtgtatgacacagtgcatgaggagtggagcaaggccgcccccatgctgattgcccgcttcggccacggcagcgctgagctggagaactgcctgtatgtggtgggcggccacaccagcctggccggggtcttccctgccagccccagcgtgtccctgaagcaggtggagaagtatgaccccggggccaacaagtggatgatggtggcccccctgagagatggagtgtccaatgctgctgtggtgtctgccaagctgaagctgtttgtgtttggaggcaccagcatccaccgggacatggtgtccaaggtgcagtgctatgaccccagcgagaaccgctggaccatcaaggccgagtgcccccagccctggagatacacagctgctgctgtgctgggcagccagatcttcatcatgggcggggacacagagttcaccgctgccagcgcctacagatttgactgtgagaccaaccagtggacccgcatcggggacatgacagccaagaggatgagctgccacgccctggccagcggcaacaagctgtatgtggtgggcggctacttcggcacccagcgctgcaagaccctggactgctatgaccccaccagtgacacctggaactgcatcaccaccgtgccctacagcctcatccccacagcctttgtgtccacctggaagcacctgcctgcctag

SEQ ID NO: 22314 - DNA, 2916 bp, synthetic construct
  source 1..2916: mol_type = other DNA; note = Synthetic coding sequence
atgaacttcctgcggggcgtgatgggcggccagagcgctggcccccagcacacagaggccgagaccgtgagaggagctgctggcctgggcctgggcaaaggaagtggccagggccggggccgcagcacccggcggcctgaggagtgtggcctgaagttccgccacagcttccggctggtgaagcacatcctgtaccacgtgaccatcaacgtgtctgacagcgagatcatcggctacgccctggacaccctgtacaacatcatcagcaatgaggaggaggaggaggtgggcggcagccaggaggagaacagcacccggcagagcgaggacctgggcagccagttcacagagatcttcatcaagcagcaggagaatgtgaccctgctgctgagcctgctggaggagtttgacttccacgtgcgctggccaggagtgaagctgctgaccagcctgctgaagcagctgggcccccaggtgcagcagatcatcctggtgagccccatgggcgtgtcccggctgatggacctgctggccgacagccgggaggtgatcagaaatgatggagtgctgctgctgcaggccctgaccaggagcaatggagccatccagaagatcgtggcctttgaaaatgcctttgagcggctgctggacatcatcagcgaggagggcaacagtgatggcggcatcgtggtggaggactgcctgatcctgctgcagaacctgctgaagaacaacaacagcaaccagaacttcttcaaggagggcagctacatccagaggatgaagccctggtttgaggtgggagatgagaacagcggctggagcgcccagaaggtgaccaacctgcacctgatgctgcagctggtgcgggtgctggtgagccccaccaaccccccaggggccaccagcagctgccagaaggccatgttccagtgtggcctgctgcagcagctgtgcaccatcctgatggccactggagtgcctgctgacatcctgacagagaccatcaacacagtgtctgaggtgatccggggctgccaggtgaaccaggactactttgcctctgtgaatgcccccagcaacccccccaggcctgccatcgtggtgctgctgatgtccatggtgaatgaaaggcagccctttgtgctgcgctgtgctgtgctgtactgcttccagtgcttcctgtacaagaaccagaagggccagggcgagatcgtgtccaccctgctgcccagcaccattgatgccactggaaacagcgtgtctgctggccagctgctgtgtggcggcctcttcagcacagacagcctgagcaactggtgtgccgctgtggccctggcccacgccctgcaggagaatgccacccagaaggagcagctgctgcgggtgcagctggccaccagcatcggcaacccccctgtgtccctgctgcagcagtgcaccaacatcctgagccagggcgacaagattgaccggcggggcagcaagatccagaccagggtgggcctgctgatgctgctgtgcacctggctgagcaactgccccatcgctgtgacccacttcctgcacaacagcgccaacgtgcccttcctgaccggccagattgctgagaacctgggggaggaggagcagctggtgcagggcctgtgtgccctgctgctgggcatcagcatctacttcaatgacaacagcctggagagctacatgaaggagaagctgaagcagctgattgagaagagaattggcaaggagaacttcatcgagaagctgggcttcatcagcaagcatgagctgtacagccgggccagccagaagccccagcccaacttccccagccctgagtacatgatctttgaccacgagttcaccaagctggtgaaggagctggagggcgtcatcaccaaggccatctacaagagcagcgaggaggacaagaaggaggaggaggtgaagaagaccctggagcagcacgacaacatcgtgacccactacaagaacatgatccgggagcaggacctgcagctggaggagctgcggcagcaggtgtccaccctgaagtgccagaatgagcagctgcagacagctgtgacccagcaggtgtcccagatccagcagcacaaggaccagtacaacctgctgaagatccagctgggcaaggacaaccagcaccagggcagctacagcgagggcgcccagatgaatggcatccagcctgaggagatcggccgcctgcgggaggagattgaggagctgaagaggaaccaggagctgctgcagagccagctgacagagaaggacagcatgattgagaacatgaagagcagccagaccagcggcaccaatgagcagagcagcgccatcgtgtctgcccgggacagcgagcaggtggccgagctgaagcaggagctggccaccctgaagagccagctgaacagccagagcgtggagatcaccaagctgcagacagagaagcaggagctgctgcagaagacagaggcctttgccaagtctgtggaggtgcagggcgagacagagaccatcatcgccaccaagaccacagatgtggagggccgcctgagcgccctgctgcaggagaccaaggagctgaagaatgagatcaaggccctgtctgaggagaggacagccatcaaggagcagctggacagcagcaacagcaccatcgccatcctgcagacagagaaggacaagctggagctggagatcacagacagcaagaaggagcaggatgacctgctggtgctgctggccgaccaggaccagaagatcctgagcctgaagaacaagctgaaggacctgggccaccctgtggaggaggaggatgagctggagagcggggaccaggaggatgaagatgatgaaagtgaggaccccgggaaggacctggaccacatctag

SEQ ID NO: 22315 - DNA, 258 bp, synthetic construct
  source 1..258: mol_type = other DNA; note = Synthetic coding sequence
atgggcaacagcgacagccagtacaccctgcagggcagcaagaaccacagcaacaccatcactggagccaagcagatcccctgcagcctgaagatccggggcatccacgccaaggaggagaagagcctgcacggctggggccacggcagcaatggagctggctacaagagccgcagcctggcccggagctgcctgagccacttcaagagcaaccagccctatgccagccggctgggcggccccacctgcaaggtgtag

SEQ ID NO: 22316 - DNA, 174 bp, synthetic construct
  source 1..174: mol_type = other DNA; note = Synthetic coding sequence
tgaggaagagcccctggccctgccatcggcggccggcgggccggggacagctgccccggctggaggagaagaagccgcagccggggccggggccagaggctgagccacggcccccggcggcggccccagctgctgacagagaccaggaggcctgtgctggtgcagtggctgtag

SEQ ID NO: 22317 - DNA, 936 bp, synthetic construct
  source 1..936: mol_type = other DNA; note = Synthetic coding sequence
atggtgtccctgcgggtgaaccccctgagcctggtggagatcatcctgcacgtggtgcggcagatgacagaccccaacgtggccctgaccttcctggagaagacccgggagaaggtgaagagcagtgatgaagctgtgatcctgtgcaagacagccatcggggccctgaagctgaacatcggggacctgcaggtgaccaaggagaccattgaagatgtggaggagatgctgaacaacctgcccggggtgacctctgtgcacagccgcttctatgacctgagcagcaagtactaccagaccatcggcaaccacgccagctactacaaggatgccctgcgcttcctgggctgtgtggacatcaaggacctgcctgtgtctgagcagcaggagcgggccttcaccctgggcctggccggcctgctgggggagggcgtcttcaactttggagagctgctgatgcaccctgtgctggagagcctgaggaacacagaccggcagtggctgattgacaccctgtatgccttcaacagcggaaatgtggagcgcttccagaccctgaagacagcctggggccagcagcctgacctggccgccaatgaggcccagctgctgaggaagatccagctgctgtgcctgatggagatgaccttcaccaggcctgccaaccaccggcagctgacctttgaggagatcgccaagagcgccaagatcaccgtgaatgaggtggagctgctggtgatgaaggccctgtctgtgggcctggtgaagggcagcattgatgaggtggacaagagggtgcacatgacctgggtgcagccccgggtgctggacctgcagcagatcaagggcatgaaggaccggctggagttctggtgcacagatgtgaagtccatggagatgctggtggagcaccaggcccatgacatcctgacctag

SEQ ID NO: 22318 - DNA, 1161 bp, synthetic construct
  source 1..1161: mol_type = other DNA; note = Synthetic coding sequence
atgaagagcctgaaggcctgcaagcgggagatcaagtctgtgatgaacacagctggcaacagcgcccccagcctcttcctgaagagcaactttgagtacctgcggggcaactacaggaaggctgtgaagctgctgaacagcagcaacattgctgagcaccctggcttcatgaagacaggagaatgtctgcgctgcatgttctggaacaacctgggctgcatccactttgccatgagcaagcacaacctgggcatcttctacttcaagaaggccctgcaggagaatgacaacgtgtgtgcccagctgtctgctggcagcacagatcctgggaagaagttcagcggccggcccatgtgcaccctgctgaccaacaagagatatgagctgctgtacaactgtggcatccagctgctgcacatcggccggcccctggccgcctttgagtgcctgattgaagctgtgcaggtgtaccacgccaacccccggctgtggctgcggctggccgagtgctgcatcgccgccaacaagggcaccagcgagcaggagaccaagggcctgcccagcaagaagggcatcgtgcagagcatcgtgggccagggctaccacaggaagatcgtgctggccagccagagcatccagaacacagtgtacaatgatggccagagcagcgccatccctgtggcctccatggagtttgctgccatctgcctgagaaatgccctgctgctgctgcctgaggagcagcaggaccccaagcaggagaatggagccaagaacagcaaccagctgggcggcaacacagagagcagcgagagcagcgagacctgcagcagcaagagccatgatggagacaagttcatcccagccccacccagcagccccctgaggaagcaggagctggagaacctgaagtgcagcatcctggcctgcagcgcctacgtggccctggccctgggggacaacctgatggccctgaaccacgccgacaagctgctgcagcagcccaagctgagcggcagcctgaagttcctgggccacctgtatgctgctgaggccctgatcagcctggaccgcatcagtgatgccatcacccacctgaacccagaaaatgtgacagatgtgtccctgggcatcagcagcaatgagcaggaccagggctag

SEQ ID NO: 22319 - DNA, 1596 bp, synthetic construct
  source 1..1596: mol_type = other DNA; note = Synthetic coding sequence
atgctgcaggagctgaactttggagcctacctgggcctgcctgccttcctgctgcccctgaaccaggaggacaacaccaacctggcccgggtgctgaccaaccacatccacacaggccaccacagctccatgttctggatgagggtgcccctggtggcccctgaggacctgagagatgacatcattgaaaatgcccccaccacccacacagaggagtacagcggggaggagaagacctggatgtggtggcacaacttccgcaccctgtgtgactacagcaagagaattgctgtggccctggagatcggggctgacctgcccagcaaccacgtgattgaccgctggctgggggagcccatcaaggccgccatcctgcccaccagcatcttcctgaccaacaagaagggcttccctgtgctgagcaagatgcaccagaggctcatcttccggctgctgaagctggaggtgcagttcatcatcaccggcaccaaccaccacagcgagaaggagttctgcagctacctgcagtacctggagtacctgagccagaaccggcccccaccaaatgcctatgagctgtttgccaagggctatgaggactacctgcagagccccctgcagcccctgatggacaacctggagagccagacctatgaggtgtttgagaaggaccccatcaagtacagccagtaccagcaggccatctacaagtgcctgctggacagagtgcctgaggaggagaaggacaccaacgtgcaggtgctgatggtgctgggcgccggccggggccccctggtgaatgccagcctgcgggccgccaagcaggccgaccggcgcatcaagctgtatgctgtggagaagaaccccaatgctgtggtgaccctggagaactggcagtttgaggagtggggcagccaggtgacagtggtgtccagtgacatgagggagtgggtggcccctgagaaggctgacatcatcgtgtctgagctgctgggcagctttgctgacaatgagctgagccctgagtgcctggatggagcccagcacttcctgaaggatgatggagtgtccatccctggagagtacaccagcttcctggcccccatcagcagcagcaagctgtacaatgaggtgcgggcctgccgggagaaggaccgggaccctgaggcccagtttgagatgccctacgtggtgcggctgcacaacttccaccagctgagcgccccccagccctgcttcaccttcagccaccccaacagagaccccatgattgacaacaaccgctactgcaccctggagttccctgtggaggtgaacacagtgctgcacggctttgctggctactttgaaacagtgctgtaccaggacatcaccctgagcatccggcctgagacccacagccctggcatgttctcctggttccccatcctcttccccatcaagcagcccatcaccgtgcgggagggccagaccatctgtgtgcgcttctggcgctgcagcaacagcaagaaggtgtggtatgagtgggccgtgacagcccctgtgtgcagcgccatccacaaccccaccggccgcagctacaccatcggcctgtag

SEQ ID NO: 22320 - DNA, 789 bp, synthetic construct; identical to SEQ ID NO: 19488
  source 1..789: mol_type = other DNA; note = Synthetic coding sequence

SEQ ID NO: 22321 - DNA, 1131 bp, synthetic construct
  source 1..1131: mol_type = other DNA; note = Synthetic coding sequence
atggccgcccccagccccagcggcacccctgtgtcctccatgcagggcaagaggaaggccctgaagctgaactttgccaacccccccttcaagagcacagcccgcttcaccctgaaccccaaccccactggagtgcagaacccccacatcgagcggctgcggacccacagcattgagagcagcggcaagctgaagatcagccctgagcagcactgggacttcaccgctgaggacctgaaggacctgggggagatcggccgcggggcctacggctctgtgaacaagatggtgcacaagcccagcggccagatcatggctgtgaagaggatccgcagcacagtggatgagaaggagcagaagcagctgctgatggacctggatgtggtgatgaggagcagtgactgcccctacatcgtgcagttctacggggccctcttccgggagggggactgctggatctgcatggagctgatgagcaccagctttgacaagttctacaagtatgtgtacagcgtgctggatgatgtgattcctgaggagatcctgggcaagatcaccctggccaccgtgaaggccctgaaccacctgaaggagaacctgaagatcatccaccgggacatcaagcccagcaacatcctgctggacagaagtggcaacatcaagctgtgtgactttggcatcagcggccagctggtggacagcatcgccaagaccagagatgctggctgccggccctacatggcccctgagagaattgaccccagcgccagccggcagggctatgatgtgcggagtgatgtgtggagcctgggcatcaccctgtatgagctggccaccggccgcttcccctaccccaagtggaacagcgtgtttgaccagctgacccaggtggtgaagggggaccccccccagctgagcaacagcgaggagcgggagttcagccccagcttcatcaactttgtgaacctgtgcctgaccaaggatgagagcaagaggcccaagtacaaggagctgctgaagcaccccttcatcctgatgtatgaggagagagctgtggaggtggcctgctacgtgtgcaagatcctggaccagatgcctgccacccccagcagccccatgtatgtggactag

SEQ ID NO: 22322 - DNA, 1035 bp, synthetic construct
  source 1..1035: mol_type = other DNA; note = Synthetic coding sequence
atggccggcagcggctgtgcctggggcgctgagcccccacgcttcctggaggccttcggccgcctgtggcaggtgcagagccggctgggcagcggcagcagcgcctctgtgtacagagtgcgctgctgcggcaaccctggcagccccccaggggccctgaagcagttcctgcccccaggcaccaccggggctgctgccagcgctgctgaatatggcttcaggaaggagcgggccgccctggagcagctgcagggccacagaaatattgtgaccctgtatggagtcttcaccatccacttcagccccaacgtgcccagccgctgcctgctgctggagctgctggatgtgtctgtgtctgagctgctgctgtacagcagccaccagggctgcagcatgtggatgatccagcactgtgccagagatgtgctggaggccctggccttcctgcaccacgagggctacgtgcatgctgacctgaagcccaggaacatcctgtggagcgcagaaaatgaatgcttcaagctgattgactttggcctgtccttcaaggagggcaaccaggatgtgaagtacatccagacagatggctaccgggcccctgaggccgagctgcagaactgcctggcccaggccggcctgcagagcgacacagagtgcaccagcgctgtggacctgtggagcctgggcatcatcctgctggagatgttttctggcatgaagctgaagcacacagtgcgcagccaggagtggaaggccaacagcagcgccatcatcgaccacatctttgccagcaaggctgtggtgaatgctgccatcccagcctaccacctgcgggacctgatcaagtccatgctgcatgatgaccccagccgccgcatcccagctgagatggccctgtgcagccccttcttcagcatcccctttgccccccacatcgaggacctggtgatgctgcccacccctgtgctgcggctgctgaatgtgctggatgatgactacctggagaatgaggaggagtatgagggcctgtgctag

SEQ ID NO: 22323 - DNA, 1467 bp, synthetic construct
  source 1..1467: mol_type = other DNA; note = Synthetic coding sequence
atggccctgaagatgaacaccctgagcagcaacagagccaacatgctgaaggaggtgcagctgatgaaccggctgagccaccccaacatcctgcgcttcatgggcgtgtgtgtgcaccagggccagctgcacgccctgacagagtacatcaacagcggcaacctggagcagctgctggacagcaacctgcacctgccctggacagtgcgggtgaagctggcctatgacattgctgtgggcctgagctacctgcacttcaagggcatcttccaccgggacctgaccagcaagaactgcctgatcaagagagatgaaaatggctacagcgctgtggtggccgactttggcctggccgagaagatcccagatgtgtccatgggcagcgagaagctggccgtggtgggcagccccttctggatggcccctgaggtgctgagagatgagccctacaatgagaaggcagatgtgttctcctatggcatcatcctgtgtgagatcatcgcccgcatccaggccgaccctgactacctgcccaggacagaaaattttggcctggactatgatgccttccagcacatggtgggggactgccccccagacttcctgcagctgaccttcaactgctgcaacatggaccccaagctgcggcccagctttgtggagatcggcaagaccctggaggagatcctgagccggctgcaggaggaggagcaggagcgggacaggaagctgcagcccacagcccggggcctgctggagaaggcccctggggtgaagaggctgagcagcctggatgacaagatcccccacaagagcccctgccccaggaggaccatctggctgagccgcagccagagcgacatcttcagcaggaagccacccaggacagtgtctgtgctggacccctactaccggcccagagatggagctgcccggacccccaaggtgaaccccttcagcgcccggcaggacctgatgggcggcaagatcaagttctttgacctgcccagcaagagcgtcatcagcctggtgtttgacctggatgcccctggccctggcaccatgcccctggccgactggcaggagcccctggccccacccatccgccgctggaggagcctgcccggcagccctgagttcctgcaccaggaggcctgcccctttgtgggccgggaggagagcctgagtgatggccccccaccccggctgagcagcctgaagtacagagtgaaggagatcccccccttccgggccagcgccctgcctgctgcccaggcccacgaggccatggactgcagcatcctgcaggaggagaatggatttggcagccggccccagggcaccagcccctgcccagctggggccagcgaggagatggaggtggaggagaggcctgctggcagcaccccagccaccttcagcaccagcggcatcggcctgcagacccagggcaagcaggatggatag

SEQ ID NO: 22324 - DNA, 1458 bp, synthetic construct
  source 1..1458: mol_type = other DNA; note = Synthetic coding sequence
atgaccctgtggatcctgcccaagttcaaggctgtggacttcagccccagcctggccgcctacacccacacctggctgctgccccgcttcctggagatcctgatccagtgtggccactgcaagaggctggccccagaatatgaagctgctgccacccggctgaagggcatcgtgcccctggccaaggtggactgcacagccaacaccaacacctgcaacaagtatggagtgtctggctaccccaccctgaagatcttcagagatggagaggaggccggggcctatgatggccccaggacagcagatggcatcgtgagccacctgaagaagcaggccggccctgcctctgtgcccctgaggacagaggaggagttcaagaagttcatcagtgacaaggatgccagcatcgtgggcttctttgatgacagcttcagcgaggcccacagcgagttcctgaaggccgccagcaacctgcgggacaactacagatttgcccacaccaacgtggagagcctggtgaatgaatatgatgacaatggagagggcatcatcctcttccggcccagccacctgaccaacaagtttgaggacaagacagtggcctacacagagcagaagatgaccagcggcaagatcaagaagttcatccaggagaacatcttcggcatctgcccccacatgacagaggacaacaaggacctgatccagggcaaggacctgctgattgcctactatgatgtggactatgagaagaatgccaagggcagcaactactggaggaacagagtgatgatggtggccaagaagttcctggatgctggccacaagctgaactttgctgtggccagcaggaagaccttcagccatgagctgagtgactttggcctggagagcacagctggggagatccctgtggtggccatcagaacagccaagggggagaagtttgtgatgcaggaggagttcagcagagatggcaaggccctggagcgcttcctgcaggactactttgatggcaacctgaagcgctacctgaagtctgagcccatccctgagagcaatgatggccctgtgaaggtggtggtggccgagaactttgatgaaattgtgaacaatgaaaacaaggatgtgctgattgagttctacgccccctggtgtggccactgcaagaacctggagcccaagtacaaggagctgggggagaagctgagcaaggaccccaacatcgtgattgccaagatggatgccacagccaatgatgtgcccagcccctatgaggtgcggggcttccccaccatctacttctccccagccaacaagaagctgaaccccaagaagtatgaaggaggccgggagctgagtgacttcatctcctacctgcagcgggaggccaccaacccccctgtgatccaggaggagaagcccaagaagaagaagaaggcccaggaggacctgtag

SEQ ID NO: 22325 - DNA, 885 bp, synthetic construct
  source 1..885: mol_type = other DNA; note = Synthetic coding sequence
atgtctgcccagcactttgtgtccacagagcaggtggagctgcccggccctggccagtgggtggtggccgagtgcccagcccgggtggacttcagcggcggctggagcgacaccccacccctggcctatgagctgggcggcgctgtgctgggcctggccgtgcgggtggatggaagaagacccatcggggcccgggcccggcgcatccctgagcctgagctgtggctggccgtgggcccccggcaggatgagatgacagtgaagatcgtgtgccgctgcctggccgacctgcgggactactgccagccccacgcccctggggccctgctgaaggccgccttcatctgtgccggcatcgtgcacgtgcacagcgagctgcagctgtctgagcagctgctgcggaccttcggcggcggctttgagctgcacacctggagcgagctgccccacggcagcggcctgggcaccagcagcatcctggccggcacagccctggccgccctgcagagagctgctggccgggtggtgggcacagaggccctgattcatgctgtgctgcacctggagcaggtgctgaccaccggcggcggctggcaggaccaggtgggcggcctgatgcctggcatcaaggtgggccgcagccgggcccagctgcccctgaaggtggaggtggaggaggtgacagtgcctgagggctttgtgcagaagctgaatgaccacctgctgctggtgtacaccgggaagacccggctggccaggaacctgctgcaggatgtgctgcgctcctggtacgcccggctgcctgctgtggtgcagaatgcccacagcctggtgcggcagacagaagaatgtgccgagggcttccggcagggcagccacatctag

SEQ ID NO: 22326 - DNA, 945 bp, synthetic construct
  source 1..945: mol_type = other DNA; note = Synthetic coding sequence
gtgggccgcatggagggctgcagcagccccatcgtggtgaagtttgctgacacccagaaggacaaggagcagaggcggctgcagcagcagctggcccagcagatgcagcagctgaacacagccacctggggcaacctgaccggcctgggcggcctgaccccccagtacctggccctgctgcagcaggccaccagcagcagcaacctgggcgccttcagcggcatccagcagatggccggcatgaatgccctgcagctgcagaacctggccaccctggccgctgctgctgctgctgcccagaccagcgccaccagcaccaatgccaaccccctgagcaccaccagcagcgccctgggcgccctgaccagccctgtggccgccagcacccccaacagcacagctggggccgccatgaacagcctgaccagcctgggcaccctgcagggcctggccggggccaccgtgggcctgaacaacatcaatgccctggccggcatggccgccctgaatggaggcctgggcgccaccggcctgaccaacggcacagctggcaccatggatgccctgacccaggcctacagcggcatccagcagtatgctgctgctgccctgcccaccctgtacagccagagcctgctgcagcagcagagcgctgctggcagccagaaggagggccctgagggcgccaacctcttcatctaccacctgccccaggagtttggagaccaggacatcctgcagatgttcatgccctttggaaatgtcatcagcgccaaggtgttcatcgacaagcagaccaacctgagcaagtgcttcggctttgtgtcctatgacaaccctgtgtctgcccaggccgccatccaggccatgaatggcttccagatcggcatgaagaggctgaaggtgcagctgaagaggagcaagaatgacagcaagccctactag

SEQ ID NO: 22327 - DNA, 1083 bp, synthetic construct
  source 1..1083: mol_type = other DNA; note = Synthetic coding sequence
tccatggagaagacctacaccagcaccagcaacaacagcatcagcggcagcctgaagaggctggaggacaccacagcccgcttcaccaatgccaacttccaggaggtgtctgcccacaccagcagcggcaaggatgtgtctgagacccggggcagcgagggcaagggcaagaagagcagcgcccacagcagcggccagaggggcaggaagccaggcggcggcagaaatcctggcaccaccgtgtctgctgccagccccttcccccaggccggctacaagagggcccagaccagcggcatcgaggaggagaccgtgaaggagaagaagaggaaaggaaacaagcagagcaagcacggccctggccggcccaagggcaacaagaaccaggagaatgtgagccacctgtctgtgtcctctgccagccccaccagctctgtggccagcgctgctggcagcatcaccagcagcagcctgcagaagagccccaccctgctgagaaatggcagcctgcagagcctgtctgtgggcagcagccctgtgggcagcgagatctccatgcagtacagacatgatggagcctgccccaccaccaccttcagcgagctgctgaatgccatccacaatgacagaggagacagcagcaccctgaccaagcaggagctgaagttcatcggcatctacaacagcaatgatgtggccgtgtccttccccaacgtggtgtctggcagcggcagcagcacccctgtgagcagcagccacctgccccagcagagcagcggccacctgcagcaggtgggcgccctgagccccagcgctgtgtcctctgctgccccagctgtggccaccacccaggccaacaccctgagcggcagcagcctgagccaggcccccagccacatgtatggcaacagaagcaacagctccatggccgccctgattgcccagagcgagaacaaccagacagaccaggacctgggggacaacagcaggaacctggtgggccggggcagcagcccccggggcagcctgagccccaggagccctgtgagcagcctgcagatccgctatgaccagcctggatag

SEQ ID NO: 22328 - DNA, 924 bp, synthetic construct
  source 1..924: mol_type = other DNA; note = Synthetic coding sequence
atgcagagcctgaccctggacctgctgggccccagcgagctgctgctggccctgaacatgggcaacaccagcttcaatgaggtgatggaggcccagctgcccagccacggcggccccaagcccagcgctgagagtgacatgggcacccggcgggactacatcatggccaagtatgtggagcacagatttgcccggcgctgcaccccagagccccagaggctgtggacagccatctgcaacagagacctgctgtctgtgctggaggcctttgccaacggccaggactttggccagcccctgcccggcccagatgcccaggcccctgaggagctggtgctgcacctggccgtgaaggtggccaaccaggccagcctgcccctggtggacttcatcatccagaatggaggccacctggatgccaaggctgctgatggcaacacagccctgcactacgccgccctgtacaaccagcctgactgcctgaagctgctgctgaagggccgggccctggtgggcaccgtgaatgaagctggggagacagccctggacatcgccaggaagaagcaccacaaggaatgtgaggagctgctggagcaggcccaggccggcacctttgccttccccctgcacgtggactacagctgggtgatcagcacagagcccggcagtgacagtgaagaagatgaggaggagaagcgctgcctgctgaagctgcctgcccaggcccactgggccagcggccgcctggacatcagcaacaagacctatgagaccgtggccagcctgggcgccgccaccccccagggcgagagcgaggactgccccccacccctgcctgtgaagaacagcagcaggaccctggtgcagggctgtgcccggcatgccagcggcggcagaagagaggagcgggcccggcgggagtag

SEQ ID NO: 22329 - DNA, 1497 bp, synthetic construct
  source 1..1497: mol_type = other DNA; note = Synthetic coding sequence
atgagcagctgtgtgagcagccagcccagcagcaacagagctgccccccaggatgagctgggcggccggggcagcagcagcagcgagagccagaagccctgtgaggccctgcggggcctgagcagcctgagcatccacctgggcatggagagcttcatcgtggtgacagaatgtgagcccggctgtgctgtggacctgggcctggcccgggaccggcccctggaggctgatggccaggaggtgcccctggacaccagcggcagccaggcccggccccacctgagcggcaggaagctgagcctgcaggagaggagccagggcggcctggccgccggcggcagcctggacatgaatggccgctgcatctgccccagcctgccctacagccctgtgagcagcccccagagcagcccccggctgccccggcggcccaccgtggagagccaccacgtgtccatcaccggcatgcaggactgtgtgcagctgaaccagtacaccctgaaggatgaaattggcaagggcagctatggagtggtgaagctggcctacaatgaaaatgacaacacctactatgccatgaaggtgctgagcaagaagaagctgatccggcaggccggcttcccccggcggcccccaccccggggcaccaggcctgcccctgggggctgcatccagccccggggccccatcgagcaggtgtaccaggagatcgccatcctgaagaagctggaccaccccaacgtggtgaagctggtggaggtgctggatgaccccaatgaagaccacctgtacatggtgtttgagctggtgaaccagggccctgtgatggaggtgcccaccctgaagcccctgtctgaggaccaggcccgcttctacttccaggacctgatcaagggcatcgagtacctgcactaccagaagatcatccaccgggacatcaagcccagcaacctgctggtgggggaggatggccacatcaagattgctgactttggagtgtccaatgagttcaagggcagtgatgccctgctgagcaacacagtgggcaccccagccttcatggcccctgagagcctgtctgagaccaggaagatcttcagcggcaaggccctggatgtgtgggccatgggcgtgaccctgtactgctttgtgtttggccagtgccccttcatggatgagcgcatcatgtgcctgcacagcaagatcaagagccaggccctggagttcccagaccagcctgacattgctgaggacctgaaggacctgatcaccaggatgctggacaagaaccctgagagcagaattgtggtgcctgagatcaagatcctggtgaagaccatgatcaggaagaggagctttggaaacccctttgagggcagcagaagagaggagaggagcctgagcgcccctggcaacctgctgaccaagcagggcagcgaggacaacctgcagggcacagaccccccacctgtgggggaggaggaggtgctgctgtag

SEQ ID NO: 22330 - DNA, 600 bp, synthetic construct; identical to SEQ ID NO: 19295
  source 1..600: mol_type = other DNA; note = Synthetic coding sequence

SEQ ID NO: 22331 - DNA, 1248 bp, synthetic construct
  source 1..1248: mol_type = other DNA; note = Synthetic coding sequence
atgtggaggaaggtgtacacccccaggagcagctttgagctgagcgcccagccccccagctgggagcagaggaagctgctggagaagtgtgccatgacagccctgagcagcaagctgatcagccagcagaaggccttctttgccaagatggtggtggatgctgtgatgatgctggatgacctgctgcagctgaagatgattggcatcaagaaggtgcagggcggggccctggaggacagccagctggtggccggcgtggccttcaagaagaccttctcctatgccggctttgagatgcagcccaagaagtaccacaaccccaagatcgccctgctgaatgtggagctggagctgaaggccgagaaggacaatgctgagatccgggtgcacacagtggaggactaccaggccatcgtggatgctgagtggaacatcctgtatgacaagctggagaagatccaccacagcggggccaaggtggtgctgagcaagctgcccatcggagatgtggccacccagtactttgctgaccgggacatgttctgtgccggccgggtgcctgaggaggacctgaagaggaccatgatggcctgtggcggcagcatccagacctctgtgaatgccctgtctgcagatgtgctgggccgctgccaggtgtttgaggagacccagattggaggagagcgctacaacttcttcaccggctgccccaaggccaagacctgcaccttcatcctgcggggcggcgctgagcagttcatggaggagacagagaggagcctgcatgatgccatcatgattgtgagaagagccatcaagaatgacagcgtggtggccggcggcggggccatcgagatggagctgagcaagtacctgcgggactacagcaggaccatccctgggaagcagcagctgctgattggagcctatgccaaggccctggagatcatcccccggcagctgtgtgacaatgccggctttgatgccaccaacatcctgaacaagctgcgggcccggcatgcccagggcggcacctggtatggagtggacatcaacaatgaagatattgctgacaactttgaggcctttgtgtgggagcccgccatggtgcgcatcaatgccctgacagctgccagcgaggccgcctgcctgattgtgtctgtggatgagaccatcaagaaccccaggagcacagtggatgcccccacagctgctggccggggccggggccggggccggccccactag

SEQ ID NO: 22332 - DNA, 3117 bp, synthetic construct; identical to SEQ ID NO: 20300
  source 1..3117: mol_type = other DNA; note = Synthetic coding sequence

SEQ ID NO: 22333 - DNA, 1443 bp, synthetic construct
  source 1..1443: mol_type = other DNA; note = Synthetic coding sequence
atgaggctgcggcggctggccctcttccctggggtggccctgctgctggccgccgcccggctggccgccgccagcgagttctttgccccctggtgtggccactgcaagaggctggccccagaatatgaggccgccgccacccggctgaagggcatcgtgcccctggccaaggtggactgcacagccaacaccaacacctgcaacaagtatggagtgtctggctaccccaccctgaagatcttcagagatggagaggaggccggggcctatgatggccccaggacagcagatggcatcgtgagccacctgaagaagcaggccggccctgcctctgtgcccctgaggacagaggaggagttcaagaagttcatcagtgacaaggatgccagcatcgtgggcttctttgatgacagcttcagcgaggcccacagcgagttcctgaaggccgccagcaacctgcgggacaactacagatttgcccacaccaacgtggagagcctggtgaatgaatatgatgacaacggggagggcatcatcctcttccggcccagccacctgaccaacaagtttgaggacaagacagtggcctacacagagcagaagatgaccagcggcaagatcaagaagttcatccaggagaacatcttcggcatctgcccccacatgacagaggacaacaaggacctgatccagggcaaggacctgctgattgcctactatgatgtggactatgagaagaatgccaagggcagcaactactggaggaacagagtgatgatggtggccaagaagttcctggatgctggccacaagctgaactttgctgtggccagcaggaagaccttcagccatgagctgagtgactttggcctggagagcacagctggggagatccctgtggtggccatcagaacagccaagggggagaagtttgtgatgcaggaggagttcagcagagatggcaaggccctggagcgcttcctgcaggactactttgatggcaacctgaagcgctacctgaagtctgagcccatccctgagagcaatgatggccctgtgaaggtggtggtggctgaaaattttgatgagatcgtgaacaatgaaaacaaggatgtgctgattgagttctacgccccctggtgtggccactgcaagaacctggagcccaagtacaaggagctgggggagaagctgagcaaggaccccaacatcgtcatcgccaagatggatgccacagccaatgatgtgcccagcccctatgaggtgcggggcttccccaccatctacttcagccctgccaacaagaagctgaaccccaagaagtatgagggcggccgggagctgagtgacttcatctcctacctgcagcgggaggccaccaacccccctgtgatccaggaggagaagcccaagaagaagaagaaggcccaggaggacctgtag

SEQ ID NO: 22334 - DNA, 228 bp, synthetic construct
  source 1..228: mol_type = other DNA; note = Synthetic coding sequence
atgggcgtgaagctggagatcttcaggatgatcatctacctgaccttccctgtggccatgttctgggtgagcaaccaggccgagtggtttgaagatgatgtgatccagaggaagcgggagctgtggcccccagagaagctgcaggagctggaggagttcaaggagcggctgaggaagaggaagaggcgggaggagaagctgctgagagatgcccagcagaacagctag

SEQ ID NO: 22335 - DNA, 807 bp, synthetic construct; identical to SEQ ID NO: 22233
  source 1..807: mol_type = other DNA; note = Synthetic coding sequence

SEQ ID NO: 22336 - DNA, 351 bp, synthetic construct
  source 1..351: mol_type = other DNA; note = Synthetic coding sequence
atgctgctggagtgtggcatgcaggaggagggcctcttccgggtggcccccagcgccagcaagctgaagaagctgaaggccgccctggactgctgcgtggtggatgtgcaggagtacagcgctgacccccacgccatcgccggggccctgaagagctacctgcgggagctgcctgagcccctgatgacctttgagctgtatgatgagtggatccaggccagcaatgtgcaggagcaggacaagaagctgcaggccctgtggaatgcctgtgagaagctgcccaaggccaaccacaacaacatccgctacctgatcaagttctaccccagctgccagaacatcaagatgtag

SEQ ID NO: 22337 - DNA, 906 bp, synthetic construct
  source 1..906: mol_type = other DNA; note = Synthetic coding sequence
atggtgaggaccaagacctggaccctgaagaagcactttgtgggctaccccaccaacagcgactttgagctgaagacagctgagctgccccccctgaagaatggagaggtgctgctggaggccctcttcctgactgtggacccctacatgagggtggccgccaagaggctgaaggagggggacaccatgatgggccagcaggtggccaaggtggtggagagcaagaatgtggccctgcccaagggcaccatcgtgctggccagccctggctggaccacccacagcatcagtgatggcaaggacctggagaagctgctgacagagtggccagacaccatccccctgagcctggccctgggcaccgtgggcatgcctggcctgacagcctacttcggcctgctggagatctgtggggtgaagggcggggagaccgtgatggtgaatgctgctgctggagctgtgggctctgtggtgggccagatcgccaagctgaagggctgcaaggtggtgggcgctgtgggcagtgatgagaaggtggcctacctgcagaagctgggctttgatgtggtgttcaactacaagacagtggagagcctggaggagaccctgaagaaggccagcccagatggctatgactgctactttgacaacgtgggcggggagttcagcaacacagtgattggccagatgaagaagtttggccgcatcgccatctgtggggccatcagcacctacaacagaacaggccccctgcccccaggccccccacctgagatcgtcatctaccaggagctgaggatggaggcctttgtggtgtaccgctggcagggagatgcccggcagaaggccctgaaggacctgctgaagtgggtgctggagatcaagagagaaaatgaggaggactag

SEQ ID NO: 22338 - DNA, 1068 bp, synthetic construct
  source 1..1068: mol_type = other DNA; note = Synthetic coding sequence
atgctgggcagcggcttcaaggccgagcggctgcgggtgaacctgcggctggtgatcaaccggctgaagctgctggagaagaagaagacagagctggcccagaaggccaggaaggagattgctgactacctggccgccggcaaggatgagcgggcccgcatccgggtggagcacatcatccgggaggactacctggtggaggccatggagatcctggagctgtactgtgacctgctgctggccaggtttggcctcatccagagcatgaaggagctggacagcggcctggccgagagcgtgtccaccctggccgagctgaagatcgtggccgaccagctgtgtgccaagtacagcaaggagtatggcaagctgtgcaggaccaaccagatcggcaccgtgaatgaccggctgatgcacaagctgtctgtggaggccccacccaagatcctggtggagcgctacctgattgagatcgccaagaactacaacgtgccctatgagccagacagcgtggtgatggccgaggcccctcctggggtggagacagacctgattgatgtgggcttcacagatgatgtgaagaagggcggccctggccggggcggcagcggcggcttcaccgcccctgtgggcggcccagatggcaccgtgcccatgcccatgcccatgcccatgcccatgcccagcgccaacacccccttctcctaccccctgcccaagggccccagcgacttcaacggcctgcccatgggcacctaccaggccttccccaacatccaccccccccagatcccagccaccccacccagctatgaatctgtggatgacatcaatgctgacaagaacatcagcagcgcccagatcgtgggccctggccccaagccagaggccagcgccaagctgcccagcaggcctgctgacaactatgacaactttgtgctgcctgagctgcccagcgtgcctgacaccctgcccacagccagcgctggggccagcaccagcgcctctgaagatattgactttgatgacctgagccgccgctttgaggagctgaagaagaagacctag

SEQ ID NO: 22339 - DNA, 2175 bp, synthetic construct
  source 1..2175: mol_type = other DNA; note = Synthetic coding sequence
atgcagatgaccatccaggccctgcaggatgagctgcgcatccagagggacctgaaccagctgttccagcaggacagcagcagcaggactggagagccctgtgtggccgagctgacagaggagaacttccagaggctgcacgccgagcacgagcggcaggccaaggagctgttcctgctgaggaagaccctggaggagatggagctgagaattgagacccagaagcagaccctgaatgccagagatgagagcatcaagaagctgctggagatgctgcagagcaagggcctgagcgccaaggccacagaggaggaccacgagaggacccggcggctggccgaggccgagatgcacgtgcaccacctggagagcctgctggagcagaaggagaaggagaacagcatgctgcgggaggagatgcacagaagatttgaaaatgccccagacagcgccaagaccaaggccctgcagaccgtcatcgagatgaaggacagcaagatcagctccatggagcggggcctgcgggacctggaggaggagatccagatgctgaagagcaatggagccctgagcacagaggagcgggaggaggagatgaagcagatggaggtgtaccgcagccacagcaagttcatgaagaacaagattggccaggtgaagcaggagctgagcaggaaggacacagagctgctggccctgcagaccaagctggagaccctgaccaaccagttcagtgacagcaagcagcacatcgaggtgctgaaggagagcctgacagccaaggagcagagagctgccatcctgcagacagaggtggatgccctgcggctgcggctggaggagaaggagaccatgctgaacaagaagaccaagcagatccaggacatggccgaggagaagggcacccaggccggggagatccatgacctgaaggacatgctggatgtgaaggagaggaaggtgaatgtgctgcagaagaagattgagaacctgcaggagcagctgcgggacaaggagaagcagatgagcagcctgaaggagcgggtgaagagcctgcaggccgacaccaccaacacagacacagccctgaccaccctggaggaggccctggccgagaaggagaggaccatcgagcggctgaaggagcagagggacagagatgagcgggagaagcaggaggagattgacaactacaagaaggacctgaaggacctgaaggagaaggtgtccctgctgcagggcgacctgtctgagaaggaggccagcctgctggacctgaaggagcacgccagcagcctggccagcagcggcctgaagaaggacagccggctgaagaccctggagatcgccctggagcagaagaaggaggagtgcctgaagatggagagccagctgaagaaggcccatgaagctgccctggaggcccgggccagccctgagatgtctgaccgcatccagcacctggagcgggagatcacccgctacaaggatgagagcagcaaggcccaggccgaggtggaccggctgctggagatcctgaaggaggtggagaatgagaagaatgacaaggacaagaagattgctgagctggagagcctgaccagccggcaggtgaaggaccagaacaagaaggtggccaacctgaagcacaaggagcaggtggagaagaagaagagcgcccagatgctggaggaggcccggcggcgggaggacaacctgaatgacagcagccagcagctgcaggtggaggagctgctgatggccatggagaaggtgaagcaggagctggagagcatgaaggccaagctgagcagcacccagcagagcctggccgagaaggagacccacctgaccaacctgcgggcagagaggaggaagcacctggaggaggtgctggagatgaagcaggaggccctgctggccgccatcagcgagaaggatgccaacatcgccctgctggagctgagcagcagcaagaagaagacccaggaggaggtggccgccctgaagcgggagaaggaccggctggtgcagcagctgaagcagcagacccagaacaggatgaagctgatggctgacaactatgaagatgaccacttcaagagcagccacagcaaccagaccaaccacaagcccagcccagaccaggatgaggaggagggcatctgggcctag

SEQ ID NO: 22340 - DNA, 408 bp, synthetic construct
  source 1..408: mol_type = other DNA; note = Synthetic coding sequence
atggccatcggcttcaacgtggagaccgtgacctacaagaacctgaagttccaggtgtgggacctgggcggccagaccagcatccggccctactggcgctgctactacagcaacacagatgctgtgatctacgtggtggacagctgtgaccgggaccgcatcggcatcagcaagtctgagctggtggccatgctggaggaggaggagctgaggaaggccatcctggtggtgtttgccaacaagcaggacatggagcaggccatgaccagcagcgagatggccaacagcctgggcctgcctgccctgaaggacaggaagtggcagatcttcaagaccagcgccaccaagggcaccggcctggatgaggccatggagtggctggtggagaccctgaagagccggcagtag

SEQ ID NO: 22341 - DNA, 684 bp, synthetic construct
  source 1..684: mol_type = other DNA; note = Synthetic coding sequence
agacggcagatcctgaaggagctggccctgtgcctgcggcggcaggagatgtatggcccccgggccgccagcaggaacaaggagaccagcgctggccctgtggccgtgatgggcaaggactactacaagatcctgggcatccccagcggggccaatgaagatgagatcaagaaggcctacaggaagatggccctgaagtaccacccagacaagaacaaggagcccaatgctgaggagaagttcaaggagattgctgaggcctatgatgtgctgagtgaccccaagaagaggggcctgtatgaccagtatggagaggagggcctgaagacaggaggcggcaccagcggcggcagcagcggcagcttccactacaccttccatggagacccccacgccacctttgccagcttcttcggcggcagcaacccctttgacatcttctttgccagcagccgcagcacccggcccttcagcggctttgatcctgatgacatggatgtggatgaagatgaggacccctttggagccttcggccgcttcggcttcaacggcctgagccggggcccccggcgggcccctgagcccctgtaccccaggaggaaggtgcaggacccccctgtggtgcatgagctgcgggtgtccctggaggagatctaccacggcagcaccaagaggatgaagtag

SEQ ID NO: 22342 - DNA, 252 bp, synthetic construct
  source 1..252: mol_type = other DNA; note = Synthetic coding sequence
atgtccatgctgaagcccagcggcctgaaggcccccaccaagatcctgaagccaggcagcacagccctgaagacccccacagctgtggtggcccctgtggagaagaccatcagcagcgagaaggccagcagcacccccagcagcgagacccaggaggagtttgtggatgacttccgggtgggggagcgggtgtgggtgaatggaaacaagccaggcttcatccagttcctgggggagacccagtttgcctag

SEQ ID NO: 22343 - DNA, 642 bp, synthetic construct
  source 1..642: mol_type = other DNA; note = Synthetic coding sequence
atggacatgctgggcggccctggcatcgagagccagtgcaggaaggtggacatcatcgcagatgctgcctacagcatcttccagaagcccaagagcttcaccggcaactttgtgattgatgagaacatcctgaaggaggagggcatcgagaactttgatgtgtatgccatcaagccaggccaccccctgcagcctgacttcttcctggatgagtacccagaggccgtgtccaagaaggtggagagcactggagctgtgcctgagttcaaggaggagaagctgcagctgcagcccaagcccaggtctggagctgtggaggagaccttcagaattgtgaaggacagcctgagtgatgatgtggtgaaggccacccaggccatctacctgtttgagctgtctggagaagatggcggcacctggttcctggacctgaagagcaaaggaggaaatgtgggctatggagagcccagcgaccaggctgatgtggtgatgtccatgaccacagatgactttgtgaagatgttcagcggcaagctgaagcccaccatggccttcatgtctgggaagctgaagatcaagggcaacatggccctggccatcaagctggagaagctgatgaaccagatgaatgcccggctgtag

SEQ ID NO: 22344 - DNA, 1230 bp, synthetic construct
  source 1..1230: mol_type = other DNA; note = Synthetic coding sequence
atgaacagaacctggccccggcgcatctggggcagcagccaggatgagcctgagtttgccagctctgtgcggcggccccacctgaccagtgatgctgtggccctgctgcgggacaacgtgaccccccgggagaatgagctgtggaccagcctgggggacagctggacccggcccggcctggagctgagccctgaggagggccccccctacagacctgagttcttcagcggctgggagccccctgtgacagacccccagagccgggcctgggaggaccctgtggagaagcagctgcagcacgagaggagaagacggcaggtgacccaggccacccagcagggccggggctgggaggtgcggggccggggccgcagcgcctggccccggctgacccggctgagctacttcctgcagcagagcgccccccaggtggccgtgaatggccaccgggacctggagcctgagagcgagccccagctggagagcgagacagctgggaagtgggtgctgtgcaactatgacttccaggccaggaacagcagcgagctgtctgtgaagcagagagatgtgctggaggtgctggatgacagcaggaagtggtggaaggtgcgggaccctgctggccaggagggctacgtgccctacaacatcctgaccccctacccaggcccccggctgcaccacagccagagccctgcccggagcctgaacagcaccccacctcctcctccagccccagccccagcccctcctccagccctggcccggccccgctgggaccggccccgctgggacagctgtgacagcctgaatggcctggaccccagcgagaaggagaagttcagccagatgctgattgtgaatgaggagctgcaggcccggctggcccagggccgcagcggccccagcagagctgtgcccggcccccgggcccctgagccccagctgagccctggcagtgatgccagcgaggtgcgggcctggctgcaggccaagggcttcagcagcggcaccgtggatgccctgggcgtgctgaccggggcccagctgttcagcctgcagaaggaggagctgcgggctgtgtccccagaggagggcgcccgggtgtacagccaggtgacagtgcagaggagcctgctggaggacaaggagaaggtgtctgagctggaggccgtgatggagaagcagaagaagaaggtggagggggaggtggagatggaggtgatctag

SEQ ID NO: 22345 - DNA, 1425 bp, synthetic construct
  source 1..1425: mol_type = other DNA; note = Synthetic coding sequence
atggccagcctgagccgggccctgcgggtggccgccgcccacccccggcagagccccacccggggcatgggcccctgcaacctgagcagcgctgctggccccacagctgagaagtctgtgccctaccagaggaccctgaaggagggccagggcacctctgtggtggcccagggccccagccggcccctgcccagcacagccaacgtggtggtgattggaggcggcagcctgggctgccagaccctgtaccacctggccaagctgggcatgtctggagctgtgctgctggagcgggagcggctgaccagcggcaccacctggcacacagctggcctgctgtggcagctgcggcccagtgatgtggaggtggagctgctggcccacacccggcgggtggtgtcccgggagctggaggaggagaccggcctgcacacaggctggatccagaatggaggcctcttcatcgccagcaaccggcagaggctggatgagtacaagaggctgatgagcctgggcaaggcctatggagtggagagccacgtgctgagccctgctgagaccaagaccctgtaccccctgatgaatgtggatgacctgtatggcaccctgtatgtgccccatgatggcaccatggaccctgctggcacctgcaccaccctggcccgggccgccagcgcccggggggcccaggtgattgagaactgccctgtgacaggcatccgggtgtggacagatgactttggagtgcggcgggtggccggcgtggagacccagcacggcagcatccagaccccctgtgtggtgaactgtgccggcgtgtgggccagcgctgtgggccgcatggccggcgtgaaggtgcccctggtggccatgcaccacgcctacgtggtgacagaaagaattgagggcatccagaacatgcccaacgtgcgggaccatgatgcctctgtgtacctgcggctgcagggagatgccctgtctgtgggcggctatgaggccaaccccatcttctgggaggaggtgtctgacaagtttgccttcggcctgtttgacctggactgggaggtgttcacccagcacattgaaggagccatcaacagagtgcctgtgctggagaagacaggcatcaagagcacagtgtgtggccctgagagcttcaccccagaccacaagcccctgatgggagaggcccctgagctgcggggcttcttcctgggctgcggcttcaacagcgctggcatgatgctgggcggcggctgcggccaggagctggcccactggatcatccacggccggcctgagaaggacatgcacggctatgacatccgccgcttccaccacagcctgacagaccacccccgctggatccgggagaggagccatgagagctaccaggagctgctgcggcggctgccccccaggtag

SEQ ID NO: 22346 - DNA, 1893 bp, synthetic construct
  source 1..1893: mol_type = other DNA; note = Synthetic coding sequence
atgagcattgagctgcagagcgtgagcaaccctgtgcacaggaaggacctggtgatccggctgacagatgacacagaccccttcttcctgtacaacctggtgatcagcgaggaggacttccagagcctgaagttccagcagggcctgctggtggacttcctggccttcccccagaagttcatcgacctgctgcagcagtgcacccaggagcacgccaaggagatcccccgcttcctgctgcagctggtgtccccagctgccatcctggacaacagccctgccttcctgaatgtggtggagaccaaccccttcaagcacctgacccacctgagcctgaagctgctgcctggaaatgatgtggagatcaagaagttcctggccggctgcctgaagtgcagcaaggaggagaagctgagcctgatgcagagcctggatgatgccaccaagcagctggacttcaccaggaagaccctggccgagaagaagcaggagctggacaagctgagaaatgagtgggccagccacacagctgccctgaccaacaagcacagccaggagctgaccaatgagaaggagaaggccctgcaggcccaggtgcagtaccagcagcagcacgagcagcagaagaaggacctggagatcctgcaccagcagaacatccaccagctgcagaaccggctgtctgagctggaggccgccaacaaggacctgacagagaggaagtacaagggggacagcaccatccgggagctgaaggccaagctgagcggcgtggaggaggagctgcagaggaccaagcaggaggtgctgagcctgcggcgggagaacagcaccctggatgtggagtgccacgagaaggagaagcacgtgaaccagctgcagaccaaggtggccgtgctggagcaggagatcaaggacaaggaccagctggtgctgcggaccaaggaggcctttgacaccatccaggagcagaaggtggtgctggaggagaatggagagaagaaccaggtgcagctgggcaagctggaggccaccatcaagagcctgtctgctgagctgctgaaggccaatgagatcatcaagaagctgcagggcgacctgaagaccctgatgggcaagctgaagctgaagaacacagtgaccatccagcaggagaagctgctggccgagaaggaggagaagctgcagaaggagcagaaggagctgcaggatgtgggccagagcctgcgcatcaaggagcaggaggtgtgcaagctgcaggagcagctggaggccaccgtgaagaagctggaggagagcaagcagctgctgaagaacaatgagaagctgatcacctggctgaacaaggagctgaatgaaaaccagctggtgaggaagcaggatgtgctgggccccagcaccaccccaccagcccacagcagcagcaacaccatccgcagcggcatcagccccaacctgaatgtggtggatggccgcctgacctaccccacctgtggcatcggctaccctgtgagcagcgcctttgccttccagaacaccttcccccacagcatcagcgccaagaacaccagccaccctggcagcggcaccaaggtgcagttcaacctgcagttcaccaagcccaatgccagcctgggagatgtgcagagcggggccaccatctccatgccctgcagcacagacaaggaaaatggagaaaatgtgggcctggagagcaagtacctgaagaagagagaagattccatccccctgcggggcctgagccagaacctcttcagcaacagcgaccaccagagagatggcaccctgggcgccctgcacaccagcagcaagcccacagccctgcccagcgccagcagcgcctacttccctggccagctgcccaacagctag

SEQ ID NO: 22347 - DNA, 1170 bp, synthetic construct
  source 1..1170: mol_type = other DNA; note = Synthetic coding sequence
atggaccgggagaccctgattgatgtggcccggaccagcctgcggaccaaggtgcacgccgagctggctgatgtgctgacagaagctgtggtggacagcatcctggccatcaagaagcaggatgagcccatcgacctcttcatgattgagatcatggagatgaagcacaagtcagaaacagacaccagcctcatccggggcctggtgctggaccacggggcccggcacccagacatgaagaagagggtggaggatgcctacatcctgacctgcaatgtgtccctggagtatgagaagacagaggtgaacagcggcttcttctacaagtctgctgaggagcgggagaagctggtgaaggccgagaggaagttcatcgaggacagagtgaagaagatcatcgagctgaagaggaaggtgtgtggggacagcgacaagggctttgtggtgatcaaccagaagggcatcgaccccttcagcctggatgccctgagcaaggagggcatcgtggccctgcggcgggccaagagaagaaacatggagcggctgaccctggcctgtggcggcgtggccctgaacagctttgatgacctgagcccagactgcctgggccatgctggcctggtgtatgagtacaccctgggggaggagaagttcaccttcatcgagaagtgcaacaaccccaggtctgtgaccctgctgatcaagggccccaacaagcacaccctgacccagatcaaggatgctgtgagagatggcctgcgggctgtgaagaatgccattgatgatggctgtgtggtgcctggagctggagctgtggaggtggccatggccgaggccctgatcaagcacaagcccagcgtgaagggccgggcccagctgggcgtgcaggcctttgctgatgccctgctgatcatccccaaggtgctggcccagaacagcggctttgacctgcaggagaccctggtgaagatccaggccgagcacagcgagagcggccagctggtgggcgtggacctgaacacaggagagcccatggtggccgctgaggtgggcgtgtgggacaactactgtgtgaagaagcagctgctgcacagctgcaccgtgattgccaccaacatcctgctggtggatgagatcatgagagctggcatgagcagcctgaagggctag

SEQ ID NO: 22348 - DNA, 441 bp, synthetic construct
  source 1..441: mol_type = other DNA; note = Synthetic coding sequence
atgacagtgaatgaggccaaggagaagctgaaggaggcccctgagggcaccttcctgatccgggacagcagccacagcgactacctgctgaccatctctgtgaagaccagcgctggccccaccaacctgagaattgagtaccaggacggcaagttccggctggacagcatcatctgtgtgaagagcaagctgaagcagtttgattctgtggtgcacctgattgactactacgtgcagatgtgcaaggacaagaggacaggccctgaggcccccagaaatggaacagtgcacctgtacctgaccaagcccctgtacaccagcgcccccagcctgcagcacctgtgccgcctgaccatcaacaagtgcacaggagccatctggggcctgcccctgcccacccggctgaaggactacctggaggagtacaagttccaggtgtag

SEQ ID NO: 22349 - DNA, 1905 bp, synthetic construct
  source 1..1905: mol_type = other DNA; note = Synthetic coding sequence
atgctggagtatgccctgaagcaggagcgggccaagtaccacaagctgaagtttggaacagacctgaaccagggcgagaagaaggcagatgtgtctgagcaggtgtccaatggacctgtggagagcgtgaccctggagaacagccccctggtgtggaaggagggccggcagctgctgcggcagtacctggaggaggtgggctacacagacaccatcctggacatgaggagcaagagggtgcgcagcctgctgggccgcagcctggagctgaatggagctgtggagcccagcgagggcgccccccgggcccctcctggccctgctggcctgtctggaggagagagcctgctggtgaagcagatcgaggagcagatcaagagaaatgctgctgggaaggatggcaaggagcggctgggcggctctgtgctgggccagatccccttcctgcagaactgtgaagatgaagattctgatgaagatgatgagctggacagcgtgcagcacaagaagcagagggtgaagctgcccagcaaggccctggtgcctgagatggaggatgaagatgaggaggatgattctgaagatgccatcaatgaatttgacttcctgggcagcggagaagatggagagggcgccccagacccccggcgctgcaccgtggatggcagcccccatgagctggagagccggcgggtgaagctgcagggcatcctggccgacctgagagatgtggatggcctgccccccaaggtgacaggccccccacctggcaccccccagccccggccccatgaagatgtgttcatcatggacaccatcggcggcggggaggtgtccctgggggacctggccgacctgactgtgaccaatgacaatgacctgagctgtgacctgagtgacagcaaggatgccttcaagaagacctggaaccccaagttcaccctgcggagccactatgatggcatccgcagcctggccttccaccacagccagagcgccctgctgacagcctctgaagatggcaccctgaagctgtggaacctgcagaaggctgtgacagccaagaagaatgctgccctggatgtggagcccatccacgccttccgggcccaccggggccctgtgctggccgtggccatgggcagcaacagcgagtactgctacagcggcggcgcagatgcctgcatccacagctggaagatcccagacctgtccatggacccctatgatggctatgaccccagcgtgctgagccacgtgctggagggccatggagatgctgtgtggggcctggccttcagccccaccagccagaggctggccagctgcagcgcagatggcaccgtgcgcatctgggaccccagcagcagcagccctgcctgcctgtgcaccttccccacagccagcgagcacggcgtgcccacctctgtggccttcaccagcacagagcccgcccacatcgtggccagcttccgcagcggggacacagtgctgtatgacatggaggtgggcagcgccctgctgaccctggagagccggggcagcagcggccccacccagatcaaccaggtggtgagccaccccaaccagcccctgaccatcacagcccatgatgaccggggcatccgcttcctggacaacagaacaggcaagcctgtgcacagcatggtggcccacctggatgctgtgacctgcctggccgtggaccccaatggagccttcctgatgagcggcagccatgactgcagcctgcggctgtggagcctggacaacaagacctgtgtgcaggagatcacagcccacaggaagaagcatgaggaggccatccatgctgtggcctgccaccccagcaaggccctgattgccagcgctggagcagatgccctggccaaggtgtttgtgtag

SEQ ID NO: 22350 - DNA, 1368 bp, synthetic construct; identical to SEQ ID NO: 19227
  source 1..1368: mol_type = other DNA; note = Synthetic coding sequence

SEQ ID NO: 22351 - DNA, 474 bp, synthetic construct
  source 1..474: mol_type = other DNA; note = Synthetic coding sequence
atgaagtccatgagccagctggccgtgctgagccgccgctggaagcccagcgagatgaagctggaccccttccaggaggtggtgctggagagcagctctgtggatgagctgcgggagaagctgtctgagatcagcggcatccccctggatgacatcgagtttgccaagggccggggcaccttcccctgtgacatctctgtgctggacatccaccaggacctggactggaaccccaaggtgtccaccctgaatgtgtggcccctgtacatctgtgatgatggagctgtgatcttctacagagacaagacagaggagctgatggagctgacagatgagcagagaaatgagctgatgaagaaggagagcagccggctgcagaagacaggccaccgggtgacctacagccccaggaaggagaaggccctgaagatctacctggatggagcccccaacaaggacctgacccaggactag

SEQ ID NO: 22352 - DNA, 1083 bp, synthetic construct
  source 1..1083: mol_type = other DNA; note = Synthetic coding sequence
atgaaggccacagccatgaccagcgcctggctggcccagggcactggagagggcgtgaatgatgtgaggaagggggcctgtgccagccacgtgtccaccatggccagcttcctgaagggggcccacgtgaccatcaatgcccgggcagaagaagatgtggagcctgagtgcatcatggagaaggtggccaaggccagcggggccaactacagcttccacaaggagagcggccgcttccaggatgtgggcccccaggcccctgtgggctctgtgtaccagaagaccaatgctgtgtctgagatcaagagggtgggcaaggacagcttctgggccaaggccgagaaggaggaggagaacagaaggctggaggagaagagaagagctgaggaggcccagaggcagctggagcaggagcggcgggagcgggagctgcgggaggccgcccggcgggagcagcgctaccaggagcagggcggggaggccagcccccagaggacctgggagcagcagcaggaggtggtgtccaggaacagaaatgagcaggagagcgctgtgcacccccgggagatcttcaagcagaaggagcgggccatgagcaccaccagcatcagcagcccccagcccgggaagctgcggagccccttcctgcagaagcagctgacccagcctgagacccacttcggccgggagcctgctgctgccatcagccggcccagggctgacctgcctgctgaggagcccgcccccagcaccccaccctgcctggtgcaggccgaggaggaggccgtgtatgaggagcccccagagcaggagaccttctatgagcagccccccctggtgcagcagcagggcgccggcagcgagcacatcgaccaccacatccagggccagggcctgagcggccagggcctgtgtgcccgggccctgtatgactaccaggccgcagatgacacagagatcagctttgatcctgaaaatctcatcactggaattgaggtgattgatgagggctggtggaggggctacggcccagatggccacttcggcatgtttcctgccaactacgtggagctgattgaatag

SEQ ID NO: 22353 - DNA, 291 bp, synthetic construct
  source 1..291: mol_type = other DNA; note = Synthetic coding sequence
atgtgccacaccagctgcagcagcggctgccagcctgcctgctgtgcccccagcccctgccagcctgcctgctgcgtgcctgtgtcctgccagagctctgtgtgtgtgcctgtgtcctgccggcccatcgtgtgtgccgcccccagctgccagagcagcctgtgtgtgcctgtgtcctgcaggcctgtggtgtatgctgcccccagctgccagagcagcggctgctgccagcccagctgcacctctgtgctgtgccggcccatctcctacagcatcagcagctgctgctag

SEQ ID NO: 22354 - DNA, 27 bp, synthetic construct
  source 1..27: mol_type = other DNA; note = Synthetic coding sequence
atgcccctgagcagccccaatgcctag

SEQ ID NO: 22355 - DNA, 384 bp, synthetic construct
  source 1..384: mol_type = other DNA; note = Synthetic coding sequence
atgagcagctccatgtggtacatcatgcagagcatccagagcaagtacagcctgtctgagcggctcatccgcaccatcgccgccatccgctccttcccccatgacaacgtggaggacctgatccggggcggcgcagatgtgaactgcacccacggcaccctgaagcccctgcactgtgcctgcatggtgtctgatgctgactgtgtggagctgctgctggagaagggagctgaggtgaatgccctggatggctacaacagaacagccctgcactatgctgctgagaaggatgaggcctgtgtggaggtgctgctggagtatggagccaaccccaatgccctggatggcaacagagacacccccctgcactgggccgccttctag

SEQ ID NO: 22356 - DNA, 318 bp, synthetic construct
  source 1..318: mol_type = other DNA; note = Synthetic coding sequence
cagtggacagccagcacagccaccatcaccaaggagaagcaggaccagcccaagaaggacatcagcaactaccaggtggagcaggcccaggtgctgctgaagcgggagaaggagatcccccccaccgtcttccccaacagaagcccctggtgccagaacccctacgtgtctgcccacccctactgccccctgattgagccccacaacaccagcacagctgggggccgcctggaccggcagcccaggaccaggagcacccggcccaacagagccagcggcagcaagaagaagaagaccagcgagagccagaagcagtag

SEQ ID NO: 22357 - DNA, 1116 bp, synthetic construct
  source 1..1116: mol_type = other DNA; note = Synthetic coding sequence
atggaggaggagggcctggctgatgaggaggtgcggctggtgcagaagaaggacaccggccacatctatgccatgaagatcctgaggaagagtgacatgctggagaaggagcaggtggcccacatccgggcagagcgggacatcctggtggaggctgatggagcctgggtggtgaagatgttctacagcttccaggacaagaggaacctgtacctgatcatggagttcctgcccggcggggacatgatgaccctgctgatgaagaaggacaccctgacagaggaggagacccagttctacatcagcgagaccgtgctggccattgatgccatccaccagctgggcttcatccaccgggacatcaagccagacaacctgctgctggatgccaagggccacgtgaagctgagtgactttggcctgtgcaccggcctgaagaaggcccacaggacagagttctacagaaacctgacccacaaccccccaagtgacttctccttccagaacatgaacagcaagaggaaggccgagacctggaagaagaacagacggcagctggcctacagcacagtgggcaccccagactacatcgcccctgaggtgttcatgcagacaggctacaacaagctgtgtgactggtggagcctgggcgtcatcatgtatgagatgctgattggctacccacccttctgcagcgagaccccccaggagacctacaggaaggtgatgaactggaaggagaccctggtgttccccccagaggtgcccatcagcgagaaggccaaggacctgatcctgcgcttctgcatcgacagtgaaaatcgcatcggcaacagcggcgtggaggagatcaagggccaccccttctttgagggcgtggactgggagcacatccgggagaggcctgctgccatccccatcgagatcaagagcattgatgacaccagcaactttgatgacttccctgagagtgacatcctgcagcctgtgcccaacaccacagagccagactacaagagcaaggactgggtgttcctgaactacacctacaagagatttgagggcctgacccagaggggcagcatccccacctacatgaaggccggcaagctgtag

SEQ ID NO: 22358 - DNA, 564 bp, synthetic construct
  source 1..564: mol_type = other DNA; note = Synthetic coding sequence
atgaacaacaccctgaggaaggatggcaagaaggactgctgctttgagatcagcgccccagacaagaggatctaccagttcaccgctgccagccccaaggatgctgaggagtgggtgcagcagctgaagtttgtgctgcaggacatggagagtgacatcatccctgaggactatgatgagcggggggagctgtatgatgatgtggaccaccccctgcccatcagcaaccccctgaccagcagccagcccattgatgatgagatctatgaggagctgcctgaggaggaggaggacagcgcccctgtgaaggtggaggagcagaggaagatgagccaggacagcgtgcaccacaccagcggggacaagagcacagattatgccaacttctaccagggcctgtgggactgcacaggagccttcagtgatgagctgtccttcaagagaggagatgtgatctacatcctgagcaaggagtacaacagatatggctggtgggtgggggagatgaagggggccatcggcctggtgcccaaggcctacatcatggagatgtatgacatctag

SEQ ID NO: 22359 - DNA, 219 bp, synthetic construct
  source 1..219: mol_type = other DNA; note = Synthetic coding sequence
atggccctgagcctgggctggaaggcccacaggaaccactgcggcctgctgctgcaggccctgcggagcagcggcctgctgctcttcccctgtggccagtgcccctggagaggagctggcagcttcctggaccctgagatcaaggccttcctggaggagaacacagaggtgaccagcagcggcagcctgaccccagagatccagctgcggctgctgtag

SEQ ID NO: 22360 - DNA, 2919 bp, synthetic construct
  source 1..2919: mol_type = other DNA; note = Synthetic coding sequence
atggctgctgctgctgctgagcagcagcagttctacctgctgctgggcaacctgctgagcccagacaacgtggtgaggaagcaggccgaggagacctatgagaacatccctggccagagcaagatcaccttcctgctgcaggccatccggaacaccacagctgctgaggaggcccggcagatggctgctgtgctgctgcggcggctgctgagcagcgcctttgatgaggtgtacccagccctgcccagtgatgtgcagacagccatcaagaacctgctgcccggcttcctgcaggccgtgaatgacagctgctaccagaatgatgacagcgtgctgaagagcctggtggagattgctgacacagtgcccaagtacctgcggccccacctggaggccaccctgcagctgagcctgaagctgtgtggggacaccagcctgaacaacatgcagaggcagctggccctggaggtgattgtgaccctgtctgaaacagctgctgccatgctgaggaagcacaccaacatcgtggcccagaccatcccccagatgctggccatgatggtggacctggaggaggatgaggactgggccaatgctgatgagctggaggatgatgactttgacagcaatgctgtggccggggagagcgccctggacaggatggcctgtggcctgggcggcaagctggtgctgcccatgatcaaggagcacatcatgcagatgctgcagaacccagactggaagtacagacatgctggcctgatggccctgagcgccatcggggagggctgccaccagcagatggagggcatcctgaatgaaattgtgaactttgtgctgctcttcctgcaggacccccacccccgggtgcgctatgctgcctgcaatgctgtgggccagatggccacagactttgcccctggcttccagaagaagttccacgagaaggtgattgctgccctgctgcagaccatggaggaccagggcaaccagagggtgcaggcccatgctgctgctgccctgatcaacttcacagaggactgccccaagagcctgctgatcccctacctggacaacctggtgaagcacctgcacagcatcatggtgctgaagctgcaggagctgatccagaagggcaccaagctggtgctggagcaggtggtgaccagcatcgcctctgtggccgacacagctgaggagaagtttgtgccctactatgacctcttcatgcccagcctgaagcacatcgtggagaatgctgtgcagaaggagctgcggctgctgcggggcaagaccatcgagtgcatcagcctgattggcctggccgtgggcaaggagaagttcatgcaggatgccagtgatgtgatgcagctgctgctgaagacccagacagacttcaatgacatggaggatgatgacccccagatctcctacatgatcagcgcctgggccaggatgtgcaagatcctgggcaaggagttccagcagtacctgcctgtggtgatgggccccctgatgaagacagccagcatcaagccagaggtggccctgctggacacccaggacatggagaacatgtctgatgatgatggctgggagtttgtgaacctgggggaccagcagagctttggcatcaagacagctggcctggaggagaagagcacagcctgccagatgctggtgtgctacgccaaggagctgaaggagggctttgtggagtacacagagcaggtggtgaagctgatggtgcccctgctgaagttctacttccatgatggagtgcgggtggccgctgctgagagcatgcccctgctgctggagtgtgcccgggtgcggggccctgagtacctgacccagatgtggcacttcatgtgtgatgccctgatcaaggccatcggcacagagccagacagtgatgtgctgtctgagatcatgcacagctttgccaagtgcatcgaggtgatgggagatggctgcctgaacaatgagcactttgaggagctgggcggcatcctgaaggccaagctggaggagcacttcaagaaccaggagctgcggcaggtgaagaggcaggatgaagattatgatgagcaggtggaggagagcctgcaggatgaagatgacaatgatgtgtacatcctgaccaaggtgtctgacatcctgcacagcatcttcagcagctacaaggagaaggtgctgccctggtttgagcagctgctgcccctgattgtgaacctgatctgcccccaccggccctggccagaccggcagtggggcctgtgcatctttgatgatgtgattgagcactgcagccctgccagcttcaagtatgcagagtacttcctgcggcccatgctgcagtatgtgtgtgacaacagccctgaggtgcggcaggccgccgcctacggcctgggcgtgatggcccagtatggaggagacaactaccggcccttctgcacagaggccctgcccctgctggtgcgggtcatccagagcgctgacagcaagaccaaggaaaatgtgaatgccacagagaactgcatctctgctgtgggcaagatcatgaagttcaagccagactgtgtgaatgtggaggaggtgctgccccactggctgtcctggctgcccctgcacgaggacaaggaggaggccgtgcagaccttcaactacctgtgtgacctgattgagagcaaccaccccatcgtgctgggccccaacaacaccaacctgcccaagatcttcagcatcatcgccgagggggagatgcatgaggccatcaagcatgaggacccctgtgccaagaggctggccaacgtggtgcggcaggtgcagaccagcggcggcctgtggacagagtgcatcgcccagctgagccctgagcagcaggccgccatccaggagctgctgaacagcgcctag

SEQ ID NO: 22361 - DNA, 1428 bp, synthetic construct
  source 1..1428: mol_type = other DNA; note = Synthetic coding sequence
atgcaggtgaccttcatctacgtgtgcctgaagggcctgatgctgcaggacctggtgtctgccaagctgatcagtgactacacagtgacagagatcccagacaccatcaatgacctgcagggcagcaccaaggtgctgcaggccgtgcagtggctggtgagccactgcccccacagcctggacctgtgctgccagaccctcatccagtatgtggaggatggcattggacatgagttcagcggccgcttcttccatgacagaagagagcggcggctgggcggcctggccagccaggagcccggggccatcatcgagctgttcaacagcgtgctgcagttcctggcctctgtggtgagcagcgagcagctgtgtgacctgtcctggcctgtgacagaatttgctgaggccggcggcagccggctgctgccccacctgcactggaatgcccctgagcacctggcctggctgaagcaggccgtgctgggcttccagctgccccagatggacctgccccccctgggcgccccctggctgcctgtgtgcagcatggtggtgcagtatgccagccagatccccagcagccggcagacccagcctgtgctgcagagccaggtggagaacctgctgcacaggacctactgccgctggaagagcaagagccccagccctgtgcatggagctggccccagcgtgatggagatcccctgggatgacctgattgccctgtgcatcaaccacaagctgcgggactggaccccaccccggctgcctgtgaccagcgaggccctgtctgaagatggccagatctgtgtgtacttcttcaagaatgacctgaagaagtatgatgtgcccctgtcctgggagcaggcccggctgcagacccagaaggagctgcagctgcgggagggccgcctggccatcaagcccttccaccccagcgccaacaacttccccatccccctgctgcacatgcacaggaactggaagaggagcacagaatgtgcccaggagggccgcatccccagcacagaggacctgatgagaggagccagcgctgaggagctgctggcccagtgcctgagcagcagcctgctgctggagaaggaggagaacaagagatttgaggaccagctgcagcagtggctgtctgaggacagcggggccttcacagacctgaccagcctgcccctgtacctgccccagaccctggtgtccctgagccacaccatcgagcctgtgatgaagacctctgtgaccaccagcccccagagcgacatgatgagggagcagctgcagctgtctgaggccaccggcacctgcctgggggagcggctgaagcacctggagcggctcatccgcagcagccgggaggaggaggtggccagcgagctgcacctgagcgccctgctggacatggtggacatctag

SEQ ID NO: 22362 - DNA, 333 bp, synthetic construct
  source 1..333: mol_type = other DNA; note = Synthetic coding sequence
atgagcacagccctgacccacaccaccgtggccatgcgctgccccatgggcggcggcggcggccccacctacggccccccccagccctggggccacccagatgtgcacatcatgcagcaccacgtgctgcccatccaggcccggctgggcagcattgctgagattgacctgggcgtgcccccacctgtgatgaagaccttcaaggagttcctgctgagcctggatgattctgtggatgaaacagaagctgtgaagcgctacaatgactacaagctggacttccggcggcagcagatgcaggacttcttcctggcccacaaggatgaggagtag

SEQ ID NO: 22363 - DNA, 828 bp, synthetic construct; identical to SEQ ID NO: 21402
  source 1..828: mol_type = other DNA; note = Synthetic coding sequence

SEQ ID NO: 22364 - DNA, 876 bp, synthetic construct
  source 1..876: mol_type = other DNA; note = Synthetic coding sequence
atgattggagatggagaggactacttcctgagcctgtttggagacagcaagaagctgacagcccacagcaactacacccagaagaccctgaagtacttctccatgatcctggaggaggtgggccagttcaccagcagcagcctgggagatgtggagattgctgaggtgaatgtgaagggcctgtttgtgaagctgatcaacagcagcctggacaaggagatggccatcggggaccacatcctgcagcagaatgtgaatggccagaccatcagcctgtaccgcttcctgcccaacatcgtgatgcaggccaacagcacagtgacagtgtgggccgccgccagcgaggccaagcaccagccccccagcgacttcctgtggaaggagcaggacaagttccgggccagcccagactgcatcaccatcctgtgcaagcccaacggccaggccatcgcctggtacacccccatccactggaagcaggcctgggagaagctggatgctgatgtggagttcaaccgctgcagcgtggtgagccccaccttcaggaagagggtcttccagtggacagccagcacagccaccatcaccaaggagaagcaggaccagcccaagaaggacatcagcaactaccaggtggagcaggcccaggtgctgctgaagcgggagaaggagatcccccccaccgtcttccccaacagaagcccctggtgccagaacccctacgtgtctgcccacccctactgccccctgattgagccccacaacaccagcacagctgggggccgcctggaccggcagcccaggaccaggagcacccggcccaacagagccagcggcagcaagaagaagaagaccagcgagagccagaagcagtag

SEQ ID NO: 22365 - DNA, 1185 bp, synthetic construct
  source 1..1185: mol_type = other DNA; note = Synthetic coding sequence
atggtgcccagccaggccccctacctggtgcctgccttccccctgcctgctgccaccagccctggccgggagtatgctgcccctggaacagcccctgagggcctgcacggcctgcccctgtctgagggcctgcagccctacccagccttccccttcccctacctggacaccttcatgaccgtcttcctgcctgacccccctgtgtgccccctgctgagccccagcttcctgccctgccccttcctgggcgccacagccagcagcgccatcagccccagcatgagcagcgccatgagccccaccctggaccccccaccttctgtgaccagccagaggcgggaggaggagaagtgggaggcccagagcgagggccaccccttcatcaccagccgcagcagcagccccctgcagctgaacctgctgcaggaggagatgccccggcccagcgagagcccagaccagatgagaagaaacacctgcccccagacagagtactgtgtgacaggcaacaatggaagtgagagcagccctgccaccaccggggccctgagcacaggcagccccccccgggagaaccccagccaccccacagccagcgccctgagcacaggcagcccccccatgaagaaccccagccaccccacagccagcaccctgtccatgggcctgccccccagcaggacccccagccaccccacagccaccgtgctgagcacaggcagcccccccagcgagagccccagcaggacaggcagcgctgccagcggcagcagtgacagcagcatctacctgaccagctctgtgtacagcagcaagatcagccagaatggccagcagagccaggatgtgcagaagaaggagaccttccccaacgtggccgaggagcccatctggaggatgatccggcagaccccagagcgcatcctgatgacctaccaggtgcctgagcgggtgaaggaggtggtgctgaaggaggacctggagaagctggagagcatgaggcagcagcagccccagttcagccacggccagaaggaggagctggccaaggtgtacaactggatccagagccagacagtgacccaggagattgacatccaggcctgtgtgacctgtgaaaatgaagattctgcagatggagctgccaccagctgtggccaggtgctggtggaggacagctgctag

SEQ ID NO: 22366 - DNA, 2424 bp, synthetic construct
  source 1..2424: mol_type = other DNA; note = Synthetic coding sequence
cagggcgccagctttgccctggccgctgctgctgccctgctgtttggaagtgacatggaggatggccccagcaacaatgccagctgcttccggcggctgacagagtgcttcctgagccccagcctgacagatgagaaggtgaaggcctacctgagcctgcacccccaggtgctggatgaatttgtgtctgagagcgtgtctgctgagaccgtggagaagtggctgaagaggaagaacaacaagtcagaagatgagagcgcccccaaggaggtgagccgctaccaggacaccaacatgcagggcgtggtgtatgagctgaacagctacatcgagcagaggctggacaccggcggggacaaccagctgctgctgtatgagctgagcagcatcatcaagatcgccaccaaggcagatggctttgccctgtacttcctgggggagtgcaacaacagcctgtgcatcttcaccccacctggcatcaaggagggcaagcccaggctcatcccagctggccccatcacccagggcaccaccgtgtctgcctacgtggccaagagcaggaagaccctgctggtggaggacatcctgggagatgagcgcttcccccggggcaccggcctggagagcggcacccgcatccagagcgtgctgtgcctgcccatcgtgacagccatcggggacctgattggcatcctggagctgtaccgccactggggcaaggaggccttctgcctgagccaccaggaggtggccacagccaacctggcctgggcctctgtggccatccaccaggtgcaggtgtgccggggcctggccaagcagacagagctgaatgacttcctgctggatgtgtccaagacctactttgacaacatcgtggccatcgacagcctgctggagcacatcatgatctatgccaagaacctggtgaatgctgacagatgtgccctcttccaggtggaccacaagaacaaggagctgtacagcgacctgtttgacatcggggaggagaaggagggcaagcctgtgttcaagaagaccaaggagatccgcttcagcattgagaagggcattgctggccaggtggccaggactggagaggtgctgaacatcccagatgcctatgctgacccccgcttcaaccgggaggtggacctgtacacaggctacaccaccaggaacatcctgtgcatgcccatcgtgtcccggggctctgtgattggagtggtgcagatggtgaacaagatcagcggcagcgccttcagcaagacagatgagaacaacttcaagatgtttgctgtgttctgtgccctggccctgcactgtgccaacatgtaccaccgcatccgccacagcgagtgcatctacagagtgaccatggagaagctgagctaccacagcatctgcaccagcgaggagtggcagggcctgatgcagttcaccctgcctgtgcggctgtgcaaggagattgagctgttccactttgatattggcccctttgagaacatgtggccaggcatctttgtgtacatggtgcacaggagctgtggcaccagctgctttgagctggagaagctgtgccgcttcatcatgtctgtgaagaagaactaccgccgggtgccctaccacaactggaagcatgctgtgacagtggcccactgcatgtatgccatcctgcagaacaaccacaccctcttcacagacctggagaggaagggcctgctgattgcctgcctgtgccacgacctggaccaccggggcttcagcaacagctacctgcagaagtttgaccaccccctggccgccctgtacagcaccagcaccatggagcagcaccacttcagccagacagtgtccatcctgcagctggagggccacaacatcttcagcaccctgagcagcagtgaatatgagcaggtgctggagatcatcaggaaggccatcatcgccacagacctggccctgtactttggaaacaggaagcagctggaggagatgtaccagacaggcagcctgaacctgaacaaccagagccaccgggacagagtcatcggcctgatgatgacagcctgtgacctgtgcagcgtgaccaagctgtggcctgtgaccaagctgacagccaatgacatctatgcagagttctgggccgagggagatgagatgaagaagctgggcatccagcccatccccatgatggaccgggacaagaaggatgaggtgccccagggccagctgggcttctacaatgctgtggccatcccctgctacaccaccctgacccagatcctgcccccaacagagcccctgctgaaggcctgccgggacaacctgagccagtgggagaaggtgatccggggggaggagacagccacctggatcagcagccccagcgtggcccagaaggctgctgccagcgaggactag

SEQ ID NO: 22367 - DNA, 1677 bp, synthetic construct
  source 1..1677: mol_type = other DNA; note = Synthetic coding sequence
atggccagctgcccagacagcgacaacagctgggtgctggccggcggggagctgggcatcagcctgaacatgtgcctgctgggcgccctggtgctgctgggcctgggcgtgctgctcttcagcggcggcctgtctgagagcgagaccggccccatggaggaggtggagcggcaggtgctgcctgaccctgaggtgctggaggccgtgggggaccggcaggacggcctgcgggagcagctgcaggcccctgtgcccccagacagcgtgcccagcctgcagaacatgggcctgctgctggacaagctggccaaggagaaccaggacatccggctgctgcaggcccagctgcaggcccagaaggaggagctgcagagcctgatgcaccagcccaagggcctggaggaggagaatgcccagctgcggggggccctgcagcagggcgaggccttccagagggccctggagagcgagctgcagcagctgcgggcccggctgcagggcctggaggccgactgtgtgcggggcccagatggagtgtgcctgagcggcggccggggcccccagggcgacaaggccatccgggagcagggcccccgggagcaggagcctgagctgtccttcctgaagcagaaggagcagctggaggccgaggcccaggccctgcggcaggagctggagcggcagaggcggctgctgggctctgtgcagcaggacctggagaggagcctgcaggatgccagcagaggagaccctgcccacgccggcctggccgagctgggccaccggctggcccagaagctgcagggcctggagaactggggccaggaccccggggtgtctgccaatgccagcaaggcctggcaccagaagagccacttccagaacagccgggagtggagcggcaaggagaagtggtgggatggccagagggacaggaaggccgagcactggaagcacaagaaggaggagagcggccgggagaggaagaagaactggggcggccaggaggaccgggagcctgctggccgctggaaggagggccggccccgggtggaggagagcggcagcaagaaggagggcaagaggcagggccccaaggagccccccaggaagagcggcagcttccacagcagcggggagaagcagaagcagccccgctggagggagggcaccaaggacagccatgaccccctgcccagctgggccgagctgctgcggcccaagtaccgggccccccagggctgcagcggcgtggatgaatgtgcccggcaggagggcctgaccttcttcggcacagagctggcccctgtgcggcagcaggagctggccagcctgctgcggacctacctggcccggctgccctgggccggccagctgaccaaggagctgcccctgagccctgccttcttcggggaggatggcatcttcagacatgaccggctgcgcttccgggactttgtggatgccctggaggacagcctggaggaggtggccgtgcagcagacaggagatgatgatgaggtggatgactttgaggacttcatcttcagccacttcttcggggacaaggccctgaagaagaggtctgggaagaaggacaagcacagccagagccccagggctgctggcccccgggagggccacagccacagccaccaccaccaccaccggggctag

SEQ ID NO: 22368 - DNA, 1881 bp, synthetic construct
  source 1..1881: mol_type = other DNA; note = Synthetic coding sequence
atgggaaatgctgctggcagcgctgagcagcctgctggccctgctgcccccccacccaagcagcacagatttgagaagctgatggagtacttcagaaatgaagacagcaacatcgacttcatggtggcctgcatgcagttcatcaacatcgtggtgcacagcgtggagaacatgaacttccgggtcttcctgcagtatgagttcacccacctgggcctggacctgtacctggagcggctgcggctgacagaaagtgacaagctgcaggtgcagatccaggcctacctggacaacatctttgatgtgggcgccctgctggaggacacagagaccaagaatgctgtgctggagcacatggaggagctgcaggagcaggtggccctgctgacagagcggctgagagatgctgaaaatgaatccatggccaagattgctgagctggagaagcagctgagccaggccaggaaggagctggagaccctgcgggagcgcttcagcgagagcacagccatgggccccagcagaagacctcctgagcctgagaaggcccccccagctgcccccacccggcccagcgccctggagctgaaggtggaggagctggaggagaagggcctcatccgcatcctgcggggccctggagatgctgtgtccattgagatcctgcctgtggccgtggccacccccagcggaggagatgcccccaccccaggagtgcccaccggcagccccagcccagacctggccccagctgctgagcccgcccctggggccgcccctcctcctcctcctcctcctcctgggggccccccagatgccctgggccggcgggacagcgagctgggccctggggtgaaggccaagaagcccatccagaccaagttcaggatgcccctgctgaactgggtggccctgaagcccagccagatcactggaacagtgttcacagagctgaatgatgagaaggtgctgcaggagctggacatgtctgactttgaggagcagttcaagaccaagagccagggccccagcctggacctgagcgccctgaagagcaaggccgcccagaaggcccccagcaaggccaccctgattgaggccaacagagccaagaacctggccatcaccctgaggaaaggaaacctgggcgctgagcgcatctgccaggccatcgaggcctatgacctgcaggccctgggcctggacttcctggagctgctgatgaggttcctgcccacagaatatgaaagaagcctcatcaccaggtttgagcgggagcagaggcccatggaggagctgtctgaggaggaccgcttcatgctgtgcttcagccgcatcccccggctgcctgagaggatgaccaccctgaccttcctgggcaacttcccagacacagcccagctgctgatgccccagctgaatgccatcatcgccgcctccatgagcatcaagagcagtgacaagctgcggcagatcctggagatcgtgctggcctttggaaactacatgaacagcagcaagagaggagctgcctacggcttccggctgcagagcctggatgccctgctggagatgaagagcacagacaggaagcagaccctgctgcactacctggtgaaggtgattgctgagaagtacccccagctgaccggcttccacagcgacctgcacttcctggacaaggccggctctgtgtccctggacagcgtgctggctgatgtgcgcagcctgcagaggggcctggagctgacccagcgggagtttgtgcggcaggatgactgcatggtgctgaaggagttcctgcgggccaacagccccaccatggacaagctgctggccgacagcaagacagcccaggccgtgcccactggaggcctgtag

SEQ ID NO: 22369 - DNA, 1500 bp, synthetic construct
  source 1..1500: mol_type = other DNA; note = Synthetic coding sequence
atggacaagctgattgtggatggccggggcaaggccaccatcagcaatgatggagccaccatcctgaagctgctggatgtggtgcaccctgctgccaagaccctggtggacatcgccaagagccaggatgctgaggtgggagatggcaccacctctgtgaccctgctggccgctgagttcctgaagcaggtgaagccctacgtggaggagggcctgcacccccagatcatcatccgggccttcagaacagccacccagctggccgtgaacaagatcaaggagattgctgtgacagtgaagaaggctgacaaggtggagcagaggaagctgctggagaagtgtgccatgacagccctgagcagcaagctgatcagccagcagaaggccttctttgccaagatggtggtggatgctgtgatgatgctggatgacctgctgcagctgaagatgattggcatcaagaaggtgcagggcggggccctggaggacagccagctggtggccggcgtggccttcaagaagaccttctcctatgccggctttgagatgcagcccaagaagtaccacaaccccaagatcgccctgctgaatgtggagctggagctgaaggccgagaaggacaatgctgagatccgggtgcacacagtggaggactaccaggccatcgtggatgctgagtggaacatcctgtatgacaagctggagaagatccaccacagcggggccaaggtggtgctgagcaagctgcccatcggagatgtggccacccagtactttgctgaccgggacatgttctgtgccggccgggtgcctgaggaggacctgaagaggaccatgatggcctgtggcggcagcatccagacctctgtgaatgccctgtctgcagatgtgctgggccgctgccaggtgtttgaggagacccagattggaggagagcgctacaacttcttcaccggctgccccaaggccaagacctgcaccttcatcctgcggggcggcgctgagcagttcatggaggagacagagaggagcctgcatgatgccatcatgattgtgagaagagccatcaagaatgacagcgtggtggccggcggcggggccatcgagatggagctgagcaagtacctgcgggactacagcaggaccatccctgggaagcagcagctgctgattggagcctatgccaaggccctggagatcatcccccggcagctgtgtgacaatgccggctttgatgccaccaacatcctgaacaagctgcgggcccggcatgcccagggcggcacctggtatggagtggacatcaacaatgaagatattgctgacaactttgaggcctttgtgtgggagcccgccatggtgcgcatcaatgccctgacagctgccagcgaggccgcctgcctgattgtgtctgtggatgagaccatcaagaaccccaggagcacagtggatgcccccacagctgctggccggggccggggccggggccggccccactag

SEQ ID NO: 22370 - DNA, 78 bp, synthetic construct
  source 1..78: mol_type = other DNA; note = Synthetic coding sequence
atggcccacgagatgattggcacccagatcgtgacagagcggctggtggccctgctggagagcggcacagagaagtag

SEQ ID NO: 22371 - DNA, 633 bp, synthetic construct
  source 1..633: mol_type = other DNA; note = Synthetic coding sequence
atggagaagacagagctgatccagaaggctgtggcctacaagaatgtggtgggcggccgccgcagcgcctggagggtcatcagcagcattgagcagaagacagacaccagtgacaagaagctgcagctgatcaaggactaccgggagaaggtggagagcgagctgcggagcatctgcaccaccgtgctggagctgctggacaagtacctgattgccaatgccaccaaccctgagagcaaggtgttctacctgaagatgaagggggactacttccgctacctggccgaggtggcctgtggagatgacaggaagcagaccatcgacaacagccagggcgcctaccaggaggcctttgacatcagcaagaaggagatgcagcccacccaccccatccggctgggcctggccctgaacttcagcgtcttctactatgagatcctgaacaaccctgagctggcctgcaccctggccaagacagcctttgatgaggccatcgccgagctggacaccctgaatgaagattcctacaaggacagcaccctcatcatgcagctgctgcgggacaacctgaccctgtggaccagtgacagcgctggggaggagtgtgatgctgctgagggcgcagaaaattag

SEQ ID NO: 22372 - DNA, 501 bp, synthetic construct
  source 1..501: mol_type = other DNA; note = Synthetic coding sequence
atggacctgatgcccttcatcaacaaggccggctgtgaatgtctgaatgaaagtgatgaacatggctttgacaactgcctgaggaaggacaccaccttcctggagagtgactgtgatgagcagctgctgatcaccgtggccttcaaccagcctgtgaagctgtacagcatgaagttccagggccctgacaatggccagggccccaagtatgtgaagatcttcatcaacctgcccaggtccatggactttgaggaggccgagaggtctgagcccacccaggccctggagctgacagaagatgacatcaaggaggatggcatcgtgcccctgcgctacgtgaagttccagaatgtgaacagcgtgaccatctttgtgcagagcaaccagggcgaggaggagaccacccgcatctcctacttcaccttcatcggcacccctgtgcaggccaccaacatgaatgacttcaagagggtggtgggcaagaagggggagagccactag

SEQ ID NO: 22373 - DNA, 639 bp, synthetic construct
  source 1..639: mol_type = other DNA; note = Synthetic coding sequence
atggccgcccctgaggagcgggacctgacccaggagcagacagagaagctgctgcagttccaggacctgaccggcatcgagagcatggaccagtgccgccacaccctggagcagcacaactggaacattgaagctgctgtgcaggaccggctgaatgagcaggagggcgtgcccagcgtcttcaaccccccacccagccggcccctgcaggtgaacacagctgaccaccgcatctacagctatgtggtgtcccggccccagccccggggcctgctgggctggggctactacctgatcatgctgcccttccgcttcacctactacaccatcctggacatcttccgctttgccctgcgcttcatccggccagaccccaggagccgggtgacagatcctgtgggggacatcgtgtccttcatgcacagctttgaggagaagtatggccgggcccaccctgtgttctaccagggcacctacagccaggccctgaatgatgccaagcgggagctgcgcttcctgctggtgtacctgcatggagatgaccaccaggacagtgatgagttctgcaggaacaccctgtgtgcccctgaggtgatcagcctcatcaacaccagcagccacagcttcctgctgctgtag

SEQ ID NO: 22374 - DNA, 1371 bp, synthetic construct; identical to SEQ ID NO: 20778
  source 1..1371: mol_type = other DNA; note = Synthetic coding sequence

SEQ ID NO: 22375 - DNA, 183 bp, synthetic construct
  source 1..183: mol_type = other DNA; note = Synthetic coding sequence
atggatgagcaggccctgctgggcctgaaccccaatgctgacagcgacttccggcagagggccctggcctactttgagcagctgaagatcagcccagatgcctggcaggtgtgtgccgaggccctggcccagaggacctacagtgatgaccacgtgaagttcttctgcttccaggtgctgtag

SEQ ID NO: 22376 - DNA, 339 bp, synthetic construct
  source 1..339: mol_type = other DNA; note = Synthetic coding sequence
atgagcagctccatgtggtacatcatgcagagcatccagagcaagtacagcctgtctgagcggctcatccgcaccatcgccgccatccgctccttcccccatgacaacgtggaggacctgatccggggcggcgcagatgtgaactgcacccacggcaccctgaagcccctgcactgtgcctgcatggtgtctgatgctgactgtgtggagctgctgctggagaagggagctgaggtgaatgccctggatggctacaacagaacagccctgcactatgctgctgagaaggatgaggcctgtgtggaggtgctgctggagtatggagccaaccccaactag

SEQ ID NO: 22377 - DNA, 1173 bp, synthetic construct; identical to SEQ ID NO: 21560
  source 1..1173: mol_type = other DNA; note = Synthetic coding sequence

SEQ ID NO: 22378 - DNA, 1335 bp, synthetic construct; identical to SEQ ID NO: 18494
  source 1..1335: mol_type = other DNA; note = Synthetic coding sequence

SEQ ID NO: 22379 - DNA, 495 bp, synthetic construct; identical to SEQ ID NO: 19754
  source 1..495: mol_type = other DNA; note = Synthetic coding sequence

SEQ ID NO: 22380 - DNA, 3252 bp, synthetic construct; identical to SEQ ID NO: 18590
  source 1..3252: mol_type = other DNA; note = Synthetic coding sequence

SEQ ID NO: 22381 - DNA, 1503 bp, synthetic construct
  source 1..1503: mol_type = other DNA; note = Synthetic coding sequence
atggctgctgtgaagaccctgaaccccaagggcaccatgaagatgctggtgtctggggccggggacatcaagctgaccaaggatggaaatgtgctgctgcacgagatgcagatccagcaccccacagccagcctcatcgccaaggtggccacagcccaggatgacatcactggagatggcaccaccagcaatgtgctgatcatcggggagctgctgaagcaggccgacctgtacatcagcgagggcctgcacccccgcatcatcacagagggctttgaggccgccaaggagaaggccctgcagttcctggaggaggtgaaggtgtcccgggagatggaccgggagaccctgattgatgtggcccggaccagcctgcggaccaaggtgcatgctgagctggctgatgtgctgacagaggccgtggtggacagcatcctggccatcaagaagcaggatgagcccatcgacctcttcatgattgagatcatggagatgaagcacaagtcagaaacagacaccagcctcatccggggcctggtgctggaccatggagcccggcacccagacatgaagaagagggtggaggatgcctacatcctgacctgcaatgtgtccctggagtatgagaagacagaggtgaacagcggcttcttctacaagtctgctgaggagcgggagaagctggtgaaggccgagaggaagttcattgaagatagagtgaagaagatcatcgagctgaagaggaaggtgtgtggggacagcgacaagggctttgtggtgatcaaccagaagggcatcgaccccttcagcctggatgccctgagcaaggagggcatcgtggccctgcggcgggccaagagaagaaacatggagcggctgaccctggcctgtggcggcgtggccctgaacagctttgatgacctgagcccagactgcctgggccacgccggcctggtgtatgagtacaccctgggggaggagaagttcaccttcatcgagaagtgcaacaaccccaggtctgtgaccctgctgatcaagggccccaacaagcacaccctgacccagatcaaggatgctgtgagagatggcctgcgggctgtgaagaatgccattgatgatggctgtgtggtgcctggggccggggctgtggaggtggccatggccgaggccctgatcaagcacaagcccagcgtgaagggccgggcccagctgggcgtgcaggcctttgctgatgccctgctgatcatccccaaggtgctggcccagaacagcggctttgacctgcaggagaccctggtgaagatccaggccgagcacagcgagagcggccagctggtgggcgtggacctgaacacaggagagcccatggtggccgctgaggtgggcgtgtgggacaactactgtgtgaagaagcagctgctgcacagctgcaccgtcatcgccaccaacatcctgctggtggatgagatcatgagagctggcatgagcagcctgaagggctag

SEQ ID NO: 22382 - DNA, 1542 bp, synthetic construct
  source 1..1542: mol_type = other DNA; note = Synthetic coding sequence
atgtgggatgtgtgcatggagcggggccaccgggacctggagcagtttgagcgggtgcaccgctacatcagtgaccagctgttcaccaacttcaaggagaggacagagcggctggtgatcagccccctgaaccagctgctgtccatgttcaccggcccccacaagctggtgcagaagagatttgacaagctgctggacttctacaactgcacagagcgggcagagaagctgaaggacaagaagaccctggaggagctgcagagcgccaggaacaactatgaggccctgaatgcccagctgctggatgagctgcccaagttccaccagtatgcccagggcctcttcaccaactgtgtgcacggctatgcagaggcccactgtgactttgtgcaccaggccctggagcagctgaagcccctgctgagcctgctgaaggtggccggccgggagggcaacctgattgccatcttccacgaggagcacagccgggtgctgcagcagctgcaggtgttcaccttcttccctgagagcctgcctgccaccaagaagccctttgagaggaagaccatcgaccggcagagcgccaggaagcccctgctgggcctgcccagctacatgctgcagagcgaggagctgcgggccagcctgctggcccgctacccacctgagaagctgttccaggccgagaggaacttcaatgctgcccaggacctggatgtgtccctgctggagggggacctggtgggcgtcatcaagaagaaggaccccatgggcagccagaaccgctggctgattgacaatggagtgaccaagggctttgtgtacagcagcttcctgaagccctacaaccccaggaggagccacagtgatgcctctgtgggcagccacagcagcacagaaagtgaacatggcagcagcagcccccgcttcccccggcagaacagcggcagcaccctgaccttcaaccccagctccatggctgtgtccttcaccagcggcagctgccagaagcagccccaggatgccagccccccacccaaggaatgtgaccagggcaccctgagcgccagcctgaaccccagcaacagcgagagcagccccagccgctgccccagcgaccctgacagcaccagccagcccaggtctggggacagcgcagatgtggccagagatgtgaagcagcccacagccacccccaggagctacagaaacttccgccaccctgagatcgtgggctacagcgtgcccggcagaaatggccagagccaggacctggtgaagggctgtgccaggacagcccaggccccagaagatagaagcacagagccagatggcagcgaggccgagggcaaccaggtgtactttgctgtgtacaccttcaaggccaggaaccccaatgagctgtctgtgtctgccaaccagaagctgaagatcctggagttcaaggatgtgactggaaacacagagtggtggctggccgaggtgaatggcaagaagggctacgtgcccagcaactacatcaggaagacagagtacacctag

SEQ ID NO: 22383 - DNA, 153 bp, synthetic construct; identical to SEQ ID NO: 20270
  source 1..153: mol_type = other DNA; note = Synthetic coding sequence

SEQ ID NO: 22384 - DNA, 4317 bp, synthetic construct
  source 1..4317: mol_type = other DNA; note = Synthetic coding sequence
atgtccatgctgaagcccagcggcctgaaggcccccaccaagatcctgaagccaggcagcacagccctgaagacccccacagctgtggtggcccctgtggagaagaccatcagcagcgagaaggccagcagcacccccagcagcgagacccaggaggagtttgtggatgacttccgggtgggggagcgggtgtgggtgaatggaaacaagccaggcttcatccagttcctgggggagacccagtttgcccctggccagtgggccggcatcgtgctggatgagcccatcggcaagaatgatggctctgtggccggcgtgcgctacttccagtgtgagcccctgaagggcatcttcacccggcccagcaagctgaccaggaaggtgcaggctgaagatgaggccaacggcctgcagaccaccccagccagccgggccaccagccccctgtgcaccagcacagcctccatggtgagcagcagccccagcacccccagcaacatcccccagaagcccagccagcctgctgccaaggagcccagcgccaccccacccatcagcaacctgaccaagacagccagcgagagcatcagcaacctgtctgaggccggcagcatcaagaagggggagcgggagctgaagatcggggacagagtgctggtgggcggcaccaaggccggcgtggtgcgcttcctgggggagacagactttgccaagggggagtggtgtggggtggagctggatgagcccctgggcaagaatgatggagctgtggccggcacccgctacttccagtgccagcccaagtatggcctgtttgcccctgtgcacaaggtgaccaagattggcttccccagcaccaccccagccaaggccaaggccaatgctgtgagaagagtgatggccaccaccagcgccagcctgaagaggagccccagcgccagcagcctgagctccatgagctctgtggccagctctgtgagcagccggcccagcaggacaggcctgctgacagagaccagcagccgctatgccaggaagatcagcggcaccacagccctgcaggaggccctgaaggagaagcagcagcacatcgagcagctgctggccgagcgggacctggagcgggcagaggtggccaaggccaccagccacgtgggggagattgagcaggagctggccctggccagagatggccatgaccagcacgtgctggagctggaggccaagatggaccagctgcggaccatggtggaggccgctgaccgggagaaggtggagctgctgaaccagctggaggaggagaagaggaaggtggaggacctgcagttccgggtggaggaggagagcatcaccaagggggacctggagcagaagagccagatcagtgaagatcctgagaacacccagaccaagctggagcacgcccgcatcaaggagctggagcagagcctgctgtttgagaagaccaaggctgacaagctgcagcgggagctggaggacaccagggtggccaccgtgtctgagaagagccgcatcatggagctggagaaggacctggccctgcgggtgcaggaggtggccgagctgcggcggcggctggagagcaacaagccagctggagatgtggacatgagcctgagcctgctgcaggagatcagcagcctgcaggagaagctggaggtgaccaggacagaccaccagcgggagatcaccagcctgaaggagcactttggagcccgggaggagacccaccagaaggagatcaaggccctgtacacagccacagagaagctgagcaaagaaaatgaaagcctgaagagcaagctggagcacgccaacaaggaaaattctgatgtgattgccctgtggaagagcaagctggagacagccatcgccagccaccagcaggccatggaggagctgaaggtgtccttcagcaagggcctgggcacagaaacagctgagtttgctgagctgaagacccagatcgagaagatgaggctggactaccagcacgagattgagaacctgcagaaccagcaggacagcgagcgggccgcccacgccaaggagatggaggccctgcgggccaagctgatgaaggtgatcaaggagaaggagaacagcctggaggccatccgcagcaagctggacaaggccgaggaccagcacctggtggagatggaggacaccctgaacaagctgcaggaggccgagatcaaggtgaaggagctggaggtgctgcaggccaagtgcaatgagcagaccaaggtgattgacaacttcaccagccagctgaaggccacagaggagaagctgctggacctggatgccctgaggaaggccagcagcgagggcaagtctgagatgaagaagctgcggcagcagctggaggccgctgagaagcagatcaagcacctggagattgagaagaatgctgagagcagcaaggccagcagcatcacccgggagctgcagggccgggagctgaagctgaccaacctgcaggagaacctgtctgaggtgtcccaggtgaaggagaccctggagaaggagctgcagatcctgaaggagaagtttgctgaggccagcgaggaggccgtgtctgtgcagaggtccatgcaggagaccgtgaacaagctgcaccagaaggaggagcagttcaacatgctgagcagtgacctggagaagctgcgggagaacctggccgacatggaggccaagttccgggagaaggatgagcgggaggagcagctgatcaaggccaaggagaagctggagaatgacattgctgagatcatgaagatgtctggggacaacagcagccagctgaccaagatgaatgatgagctgcggctgaaggagagagatgtggaggagctgcagctgaagctgaccaaggccaatgaaaatgccagcttcctgcagaagagcattgaggacatgacagtgaaggccgagcagagccagcaggaggccgccaagaagcatgaggaggagaagaaggagctggagaggaagctgagtgacctggagaagaagatggagaccagccacaaccagtgccaggagctgaaggcccgctatgagcgggccaccagcgagaccaagaccaagcatgaggagatcctgcagaacctgcagaagaccctgctggacacagaggacaagctgaagggggcccgggaggagaacagcggcctgctgcaggagctggaggagctgaggaagcaggccgacaaggccaaggccgcccagacagcagaagatgccatgcagatcatggagcagatgaccaaggagaagacagagaccctggccagcctggaggacaccaagcagaccaatgccaagctgcagaatgagctggacaccctgaaggagaacaacctgaagaatgtggaggagctgaacaagagcaaggagctgctgactgtggagaaccagaagatggaggagttcaggaaggagattgagaccctgaagcaggccgccgcccagaagagccagcagctgagcgccctgcaggaggagaatgtgaagctggccgaggagctgggccgcagcagagatgaggtgaccagccaccagaagctggaggaggagaggtctgtgctgaacaaccagctgctggagatgaagaagcgggagagcaagttcatcaaggatgctgatgaggagaaggccagcctgcagaagagcatcagcatcaccagcgccctgctgacagagaaggatgctgagctggagaagctgagaaatgaggtgacagtgctgcggggggagaatgccagcgccaagagcctgcacagcgtggtgcagaccctggagagtgacaaggtgaagctggagctgaaggtgaagaacctggagctgcagctgaaggagaacaagaggcagctgagcagcagcagcggcaacacagacacccaggctgatgaagatgagcgggcccaggagagccagattgacttcctgaacagcgtcatcgtggacctgcagaggaagaaccaggacctgaagatgaaggtggagatgatgtctgaggccgccctgaatggaaatggagatgacctgaacaactatgacagtgatgaccaggagaagcagagcaagaagaagcccaggctcttctgtgacatctgtgactgctttgacctgcatgacacagaggactgccccacccaggcccagatgtctgaagatcctccccacagcacccaccacggcagcagaggagaggagcggccctactgtgagatctgtgagatgtttggccactgggccaccaactgcaatgatgatgagaccttctag

SEQ ID NO: 22385 - DNA, 636 bp, synthetic construct
  source 1..636: mol_type = other DNA; note = Synthetic coding sequence
atggcctttgctgacagccacctgtggaagctgctggacagacatgccaacaccatccggctgtttgtgctgctgcctgagcagagccctgtgtcctacagcaagaggacagcctaccagaaggccggcggggacagcggaaatgtggatgatgactgtgagcgggtgaagggccctgtgggcagcctgaagtctgtggaggccatcctggaggagagcacagagaagctgaagagcctgagcctgcagcagcagcaggatggagacaacggggacagcagcaagagcacagagaccagtgactttgaaaatattgagagccccctgaatgaaagagacagcagcgcctctgtggacaaccgggagctggagcagcacatccagaccagtgaccctgagaacttccagagcgaggagaggagtgacagtgatgtgaacaatgacaggagcaccagctctgtggacagcgacatcctgagcagcagccacagcagtgacaccctgtgcaatgctgacaatgcccagatccccctggccaacggcctggacagccacagcatcaccagcagcaggaggaccaaggccaaccgggagaagaggaacatgggctacagcagaagaaggctgtggaactag

SEQ ID NO: 22386 - DNA, 2136 bp, synthetic construct
  source 1..2136: mol_type = other DNA; note = Synthetic coding sequence
atgctggccagcctgaaggtgaagaagcaggagctggccaacagcagtgatgccaccctgcctgaccggcccctgagcccccccctgacagccccacccaccatgaagagcagcgagttctttgagatgctggagaagatgcagggcatcaagctggaggagcagaagccaggcccccagaagaacaaggatgactacatcccctaccccagcattgatgaggtggtggagaagggcggcccctacccccaggtgatcctgccccagtttggaggctactggattgaggaccctgaaaatgtgggcacccccaccagcctgggcagcagcatctgtgaggaggaggaggaggacaacctgagccccaacaccttcggctacaagctggagtgcaagggggaggcccgggcctacagaagacacttcctgggcaaggaccacctgaacttctactgcaccggcagcagcctgggcaacctgatcctgtctgtgaagtgtgaggaggccgagggcatcgagtacctgcgggtcatcctgcggagcaagctgaagacagtgcatgagcgcatccccctggccggcctgagcaagctgcccagcgtgccccagatcgccaaggccttctgtgatgatgctgtgggcctgcgcttcaaccctgtgctgtaccccaaggccagccagatgattgtgtcctatgatgaacatgaggtgaacaacaccttcaagtttggagtcatctaccagaaggcccggcagaccctggaggaggagctgtttggaaataatgaggagagccctgccttcaaggagttcctggacctgctgggggacaccatcaccctgcaggacttcaagggcttccggggcggcctggatgtgacccacggccagacaggagtggagagcgtgtacaccaccttccgggaccgggagatcatgtttcatgtgtccaccaagctgcccttcacagatggagatgcccagcagctgcagaggaagaggcacatcggaaatgacatcgtggccatcatcttccaggaggagaacaccccatttgtgcctgacatgattgccagcaacttcctgcacgcctacatcgtggtgcaggtggagaccccaggcacagagacccccagctacaaggtgtctgtgacagcccgggaggatgtgcccacctttggaccacccctgcccagcccccctgtgttccagaagggccctgagttccgggagttcctgctgaccaagctgaccaatgcagaaaatgcctgctgcaagagtgacaagtttgccaagctggaggacaggaccagggctgccctgctggacaacctgcatgatgagctgcacgcccacacccaggccatgctgggcctgggccctgaggaggacaagtttgaaaatggaggccatggaggcttcctggagagcttcaagagggccatccgggtgcgcagccacagcatggagaccatggtgggcggccagaagaagagccacagcggcggcatccctggcagcctgagcggcggcatcagccacaacagcatggaggtgaccaagaccaccttcagcccccctgtggtggccgccaccgtgaagaaccagagccgcagccccatcaagagaagaagtggcctcttcccccggctgcacactggaagtgagggccagggcgacagccgggcccgctgtgacagcaccagcagcacccccaagaccccagatggcggccacagcagccaggagatcaagtctgagaccagcagcaaccccagcagccctgagatctgccccaacaaggagaagcccttcatgaagctgaaggaaaatggccgggccatcagccgcagcagcagcagcaccagctctgtgagcagcacagctggggagggggaggccatggaggagggggacagcggcggcagccagcccagcaccaccagccccttcaagcaggaggtgtttgtgtacagccccagccccagcagcgagagccccagcctgggcgccgccgccacccccatcatcatgagccgcagccccacagatgccaagagcaggaacagccccaggagcaacctgaagttccgctttgacaagctgagccacgccagcagtggagctggccactag

SEQ ID NO: 22387 - DNA, 1089 bp, synthetic construct
  source 1..1089: mol_type = other DNA; note = Synthetic coding sequence
atggatggcctggatgatgtggagaacagcatgctgtactacaaccaggccgtcatcctgtaccacctgcggcagtacacagaggccatctctgtgggggagaagctgtaccagttcatcgagccctttgaggagaagtttgcccaggccgtgtgcttcctgctggtggacctgtacatcctgacctaccaggccgagaaggccctgcacctgctggccgtgctggagaagatgatcagccagggcaacaacaacaagaatggcaagaatgagaccggcaacaacaacaacaaggatggcagcaaccacaaggccgagagcggggccctgattgaagctgccaagagcaagatccaccagtacaaggtgcgggcctacatccagatgaagagcctgaaggcctgcaagcgggagatcaagtctgtgatgaacacagctggcaacagcgcccccagcctcttcctgaagagcaactttgagtacctgcggggcaactacaggaaggctgtgaagctgctgaacagcagcaacattgctgagcaccctggcttcatgaagacaggagaatgtctgcgctgcatgttctggaacaacctgggctgcatccactttgccatgagcaagcacaacctgggcatcttctacttcaagaaggccctgcaggagaatgacaacgtgtgtgcccagctgtctgctggcagcacagatcctgggaagaagttcagcggccggcccatgtgcaccctgctgaccaacaagagatatgagctgctgtacaactgtggcatccagctgctgcacatcggccggcccctggccgcctttgagtgcctgattgaagctgtgcaggtgtaccacgccaacccccggctgtggctgcggctggccgagtgctgcatcgccgccaacaagggcaccagcgagcaggagaccaagggcctgcccagcaagaagggcatcgtgcagagcatcgtgggccagggctaccacaggaagatcgtgctggccagccagagcatccagaacacagtgtacaatgatggccagagcagcgccatccctgtggccaaggccggcaagtggggctag

SEQ ID NO: 22388 - DNA, 1821 bp, synthetic construct
  source 1..1821: mol_type = other DNA; note = Synthetic coding sequence
atgtgtggggccggcttcggccactttgagtggctggccggcggcggggccggccaggatgtgggccgcagctgcatcctggtgtccattgctgggaagaatgtgatgctggactgtggcatgcacatgggcttcaatgatgaccggcgcttcccagacttctcctacatcacccagaatggccgcctgacagacttcctggactgtgtgatcatcagccacttccacctggaccactgtggggccctgccctacttcagcgagatggtgggctatgatggccccatctacatgacccaccccacccaggccatctgccccatcctgctggaggactacaggaagattgctgtggacaagaagggggaggccaacttcttcaccagccagatgatcaaggactgcatgaagaaggtggtggccgtgcacctgcaccagacagtgcaggtggatgatgagctggagatcaaggcctactatgccggccacgtgctgggcgccgccatgttccagatcaaggtgggcagcgagagcgtggtgtacaccggggactacaacatgaccccagacagacacctgggcgccgcctggattgacaagtgccggcccaacctgctgatcacagagagcacctacgccaccaccatccgggacagcaagcgctgccgggagcgggacttcctgaagaaggtgcatgagaccgtggagcggggcggcaaggtgctgatccctgtgtttgccctgggccgggcccaggagctgtgcatcctgctggagaccttctgggagaggatgaacctgaaggtgcccatctacttcagcacaggcctgacagagaaggccaaccactactacaagctgttcatcccctggaccaaccagaagatcaggaagacctttgtgcagaggaacatgtttgagttcaagcacatcaaggcctttgaccgggcctttgctgacaaccctggccccatggtggtgtttgccaccccaggcatgctgcacgccggccagagcctgcagatcttcaggaagtgggccggaaatgagaagaacatggtgatcatgcctggctactgtgtgcagggcaccgtgggccacaagatcctgagcggccagaggaagctggagatggagggccggcaggtgctggaggtgaagatgcaggtggagtacatgtccttcagcgcccatgctgatgccaagggcatcatgcagctggtgggccaggccgagcctgagagcgtgctgctggtgcacggggaggccaagaagatggagttcctgaagcagaagattgagcaggagctgcgggtgaactgctacatgcctgccaacggggagaccgtgaccctgcccaccagccccagcatccctgtgggcatcagcctgggcctgctgaagcgggagatggcccagggcctgctgcctgaggccaagaagccccggctgctgcacggcaccctcatcatgaaggacagcaacttccggctggtgtcctctgagcaggccctgaaggagctgggcctggccgagcaccagctgcgcttcacctgccgggtgcacctgcatgacaccaggaaggagcaggagacagccctgcgggtgtacagccacctgaagtctgtgctgaaggaccactgtgtgcagcacctgcctgatggctctgtgacagtggagagcgtgctgctgcaggccgccgcccccagtgaagatcctggcaccaaggtgctgctggtgtcctggacctaccaggatgaggagctgggcagcttcctgaccagcctgctgaagaagggcctgccccaggcccccagctag

SEQ ID NO: 22389 - DNA, 399 bp, synthetic construct
  source 1..399: mol_type = other DNA; note = Synthetic coding sequence
atgaagaaggtgcggctgaaggagctggagagccggctgcagcaggtggatggctttgagaagcccaagctgctgctggagcagtaccccacccggccccacatcgccgcctgcatgctgtacaccatccacaacacctatgatgacatcgagaacaaggtggtggccgacctgggctgcggctgcggcgtgctgagcattggaacagccatgctgggcgccggcctgtgtgtgggctttgatattgatgaagatgccctggagatcttcaacagaaatgctgaggagtttgagctgcagatcctgacctggttcaacgtgatgtgtgcctactacctgacagaatgtcccagccacagcatccagaactatgagagcagcctgtgggaccagaagtag

SEQ ID NO: 22390 - DNA, 1371 bp, synthetic construct
  source 1..1371: mol_type = other DNA; note = Synthetic coding sequence
atgatggtgggagatggcaccacctctgtgaccctgctggccgctgagttcctgaagcaggtgaagccctacgtggaggagggcctgcacccccagatcatcatccgggccttcagaacagccacccagctggccgtgaacaagatcaaggagattgctgtgacagtgaagaaggctgacaaggtggagcagaggaagctgctggagaagtgtgccatgacagccctgagcagcaagctgatcagccagcagaaggccttctttgccaagatggtggtggatgctgtgatgatgctggatgacctgctgcagctgaagatgattggcatcaagaaggtgcagggcggggccctggaggacagccagctggtggccggcgtggccttcaagaagaccttctcctatgccggctttgagatgcagcccaagaagtaccacaaccccaagatcgccctgctgaatgtggagctggagctgaaggccgagaaggacaatgctgagatccgggtgcacacagtggaggactaccaggccatcgtggatgctgagtggaacatcctgtatgacaagctggagaagatccaccacagcggggccaaggtggtgctgagcaagctgcccatcggagatgtggccacccagtactttgctgaccgggacatgttctgtgccggccgggtgcctgaggaggacctgaagaggaccatgatggcctgtggcggcagcatccagacctctgtgaatgccctgtctgcagatgtgctgggccgctgccaggtgtttgaggagacccagatcggcggggagcgctacaacttcttcaccggctgccccaaggccaagacctgcaccttcatcctgcggggcggcgctgagcagttcatggaggagacagagaggagcctgcatgatgccatcatgattgtgcggcgggccatcaagaatgattctgtggtggccggcggcggggccatcgagatggagctgagcaagtacctgcgggactacagcaggaccatccctgggaagcagcagctgctgattggagcctatgccaaggccctggagatcatcccccggcagctgtgtgacaatgccggctttgatgccaccaacatcctgaacaagctgcgggcccggcatgcccagggcggcacctggtacggcgtggacatcaacaatgaagatattgctgacaactttgaggcctttgtgtgggagcccgccatggtgcgcatcaatgccctgacagctgccagcgaggccgcctgcctgattgtgtctgtggatgagaccatcaagaaccccaggagcacagtggatgcccccacagctgctggccggggccggggccggggccggccccactag

SEQ ID NO: 22391 - DNA, 2520 bp, synthetic construct
  source 1..2520: mol_type = other DNA; note = Synthetic coding sequence
atggatggcaaggcagatgtgaagagcctgatggccaagtacaacacaggaggcaaccccacagaagatgtgtctgtgaacagccggcccttccgggtgacaggccccaacagcagcagcggcatccaggccaggaagaacctcttcaacaaccagggcaatgccagccccccagctggccccagcaatgtgcccaagtttggcagccccaagccccctgtggccgtgaagcccagcagcgaggagaagccagacaaggagcccaagccacccttcctgaagcccaccggggccggccagcgcttcggcaccccagccagcctgaccacccgggaccctgaggccaaggtgggcttcctgaagcctgtgggccccaagcccatcaacctgcccaaggaggacagcaagcccaccttcccctggcccccaggcaacaagcccagcctgcacagcgtgaaccaggaccatgacctgaagcccctgggccccaagagcggccccaccccacccaccagtgaaaatgagcagaagcaggccttccccaagctgactggagtgaagggcaagttcatgtctgccagccaggacctggagcccaagcccctcttccccaagccagccttcggccagaagccacccctgagcacagagaacagccatgaagatgagagccccatgaagaatgtgagcagcagcaagggcagccctgcccccctgggcgtgcgcagcaagagcggccccctgaagccagccagagaagattctgagaacaaggaccatgctggggagatcagcagcctgcccttccctggggtggtgctgaagccagctgccagcagaggaggccctggcctgagcaagaatggagaggagaagaaggaggacaggaagattgatgctgccaagaacaccttccagagcaagatcaaccaggaggagctggccagcggcaccccaccagcccgcttccccaaggcccccagcaagctgactgtgggcggcccctggggccagagccaggagaaggagaagggggacaagaacagcgccacccccaagcagaagcccctgcccccactcttcaccctgggccccccaccacccaagcccaacagacctccaaatgtggacctgaccaagttccacaagaccagcagcggcaacagcaccagcaagggccagaccagctacagcaccaccagcctgcccccacctccacccagccacccagccagccagccccccctgcctgccagccaccccagccagccccctgtgcccagcctgccccccaggaacatcaagcccccatttgacctgaagagccctgtgaatgaagacaaccaggatggagtgacccacagtgatggagctggcaacctggatgaggagcaggacagcgagggggagacctatgaagatattgaggccagcaaggagcgggagaagaagcgggagaaggaggagaagaagaggctggagctggagaagaaggagcagaaggagaaggagaagaaggagcaggagatcaagaagaagttcaagctgaccggccccatccaggtgatccacctggccaaggcctgctgtgatgtgaagggcggcaagaatgagctgtccttcaagcagggcgagcagatcgagatcatccgcatcacagacaaccctgagggcaagtggctgggccgcacagcccggggcagctatggctacatcaagaccacagctgtggagattgattatgacagcctgaagctgaagaaggacagcctgggcgcccccagccggcccattgaagatgaccaggaggtgtatgatgatgtggccgagcaggatgacatcagcagccacagccagagcggcagcggcggcatcttccccccacctccagatgatgacatctatgatggcatcgaggaggaggatgctgatgatggcagcaccctgcaggtgcaggagaagagcaacacctggagctggggcatcctgaagatgctgaagggcaaggatgacaggaagaagagcatccgggagaagcccaaggtgtctgacagcgacaacaatgaaggcagcagcttccctgccccacccaagcagctggacatgggagatgaggtgtatgatgatgtggacaccagtgacttccctgtgtcctctgctgagatgagccagggcaccaacgtgggcaaggccaagacagaggagaaggacctgaagaagctgaagaagcaggagaaggaggagaaggacttcaggaagaagttcaagtatgatggagagatccgggtgctgtacagcaccaaggtgaccaccagcatcaccagcaagaagtggggcacccgggacctgcaggtgaagccaggagagagcctggaggtgatccagaccacagatgacaccaaggtgctgtgcagaaatgaggagggcaagtatggctacgtgctgcggagctacctggccgacaatgatggagagatctatgatgacattgctgatggctgcatctatgacaatgactag

SEQ ID NO: 22392 - DNA, 1017 bp, synthetic construct
  source 1..1017: mol_type = other DNA; note = Synthetic coding sequence
atgggccaccgctacatcgaggtgttcaagagccacaggacagagatggactgggtgctgaagcacagcggccccaacagcgctgacagcgccaatgatggctttgtgcggctgcggggcctgcccttcggctgcaccaaggaggagatcgtgcagttcttcagcggcctggagatcgtgcccaacggcatcaccctgcctgtggaccctgagggcaagatcactggagaggcctttgtgcagtttgccagccaggagctggccgagaaggccctgggcaagcacaaggagagaattggccaccgctacatcgaggtgttcaagagcagccaggaggaggtgcgcagctacagcgacccccccctgaagttcatgtctgtgcagaggcctggcccctatgaccggcccggcacagcccggcgctacatcggcatcgtgaagcaggccggcctggagaggatgaggcctggggcctacagcacaggctatggaggctatgaggagtacagcggcctgagtgatggctacggcttcaccacagacctgtttggccgggacctgagctactgcctgagcggcatgtatgaccacagatatggagacagcgagttcaccgtgcagagcaccaccggccactgtgtgcacatgaggggcctgccctacaaggccacagaaaatgacatctacaacttcttcagccccctgaaccctgtgcgggtgcacatcgagatcggcccagatggccgggtgactggagaggctgatgtggagtttgccacccatgaggaggccgtggccgccatgagcaaggaccgggccaacatgcagcaccgctacatcgagctgttcctgaacagcaccaccggggccagcaatggagcctacagcagccaggtgatgcagggcatgggcgtgtctgctgcccaggccacctacagcggcctggagagccagagcgtgtctggctgctacggggccggctacagcggccagaacagcatgggcggctatgactag

SEQ ID NO: 22393 - DNA, 1536 bp, synthetic construct
  source 1..1536: mol_type = other DNA; note = Synthetic coding sequence
atggcctctgtggtggagtacaagggcctgcgggccggctaccactgcggctactgtgacagcaaggagggcaaggccagctgtggcatgtgggcccacagcatgacagtgcaggactaccaggacctgattgaccggggctggaggagaagtggcaagtatgtgtacaagcctgtgatgaaccagacctgctgcccccagtacaccatccgctgccggcccctgcagttccagcccagcaagagccacaagaaggtgctgaagaagatgctgaagttcctggccaagggggaggtgcccaagggcagctgtgaagatgagcccatggacagcaccatggatgatgctgtggccggggactttgccctgatcaacaagctggacatccagtgtgacctgaagaccctgagtgatgacatcaaggagagcctggagagcgagggcaagaacagcaagaaggaggagccccaggagctgctgcagagccaggactttgtgggggagaagctgggcagcggggagcccagccacagcgtgaaggtgcacacagtgcccaagccaggaaaaggagctgacctgagcaagccaccctgcaggaaggccaaggagatcaggaaggagaggaagaggctgaagctgatgcagcagaacccagctggggagctggagggcttccaggcccagggccacccccccagcctcttcccccccaaggccaagagcaaccagcccaagagcctggaggacctgatctttgagagcctgcctgaaaatgccagccacaagctggaggtgcggctggtgcctgtgtcctttgaagatcctgagttcaagagcagcttcagccagagcttcagcctgtatgtgaagtaccaggtggccatccaccaggaccccccagatgaatgtgggaagacagagttcacccgcttcctgtgcagcagccccctggaggccgagaccccacccaacggccctgactgtggctacggcagcttccaccagcagtactggctggatggcaagatcatcgctgtgggcgtgattgacatcctgcccaactgtgtgtcctctgtgtacctgtactatgaccctgactacagcttcctgagcctgggcgtgtacagcgccctgcgggagatcgccttcacccggcagctgcacgagaagaccagccagctgagctactactacatgggcttctacatccacagctgccccaagatgaagtacaagggccagtaccggcccagcgacctgctgtgcccagagacctacgtgtgggtgcccatcgagcagtgcctgcccagcctggagaacagcaagtactgccgcttcaaccaggaccctgaggccgtggatgaagatagaagcacagagccagaccggctgcaggtgttccacaagagggccatcatgccctatggagtgtacaagaagcagcagaaggaccccagcgaggaggccgctgtgctgcagtatgccagcctggtgggccagaagtgcagcgagaggatgctgctcttcaggaactag

SEQ ID NO: 22394 - DNA, 3963 bp, synthetic construct
  source 1..3963: mol_type = other DNA; note = Synthetic coding sequence
atgcaggatgacagcattgaggccagcaccagcatcagccagctgctgcgggagagctacctggccgagaccaggcaccggggcaacaatgaaagaagcagagctgagcccagcagcaacccctgccacttcggcagccccagcggggctgctgagggcggcggcggccaggatgacctgcctgacctgagcgccttcctgagccaggaggagctggatgaatctgtgaacctggcccggctggccatcaactatgaccccctggagaaggcagatgagacccaggccaggaagaggctgagcccagaccagatgaagcacagccccaacctgagctttgagcccaacttctgccaggacaaccccaggagccccaccagcagcaaggagagcccccaggaggccaagaggccccagtactgcagcgagacccagagcaagaaggtgttcctgaacaaggctgctgacttcatcgaggagctgagcagcctcttcaagagccacagcagcaagaggatccggccccgggcctgcaagaaccacaagagcaagctggagagccagaacaaggtgatgcaggagaacagcagcagcttcagtgacctgtctgaaagaagagagaggagctctgtgcccatccccatcccagctgacacccgggacaatgaggtgaaccacgccctggagcagcaggaggccaagagaagagaggccgagcaggccgccagcgaggccgccggcggggacaccaccccaggcagcagccccagcagcctgtactatgaggagcccctgggccagcccccacgcttcacccagaagctgcggagccgggaggtgcctgagggcaccagggtgcagctggactgcatcgtggtgggcatccccccaccccaggtgcgctggtactgtgagggcaaggagctggagaacagcccagacatccacatcgtgcaggccggcaacctgcacagcctgaccatcgccgaggcctttgaggaggacaccggccgctacagctgctttgccagcaacatctatggaacagacagcaccagcgctgagatctacatcgagggcgtgagcagcagtgacagcgagggggaccccaacaaggaggagatgaaccgcatccagaagcccaatgaggtgagcagcccccccaccaccagcgctgtgattcctcctgctgtgccccaggcccagcacctggtggcccagccccgggtggccaccatccagcagtgccagagccccaccaactacctgcagggcctggatggcaagcccatcatcgccgcccctgtgttcaccaagatgctgcagaacctgagcgccagcgagggccagctggtggtgtttgaatgtcgggtgaagggggcccccagccccaaggtggagtggtaccgggagggcaccctgattgaggacagcccagacttccgcatcctgcagaagaggcctgtgtgcatggagcacatcgaggagatctgcaccctggtgattgctgaggtgtttgctgaggacagcggctgcttcacctgcacagccagcaacaagtatggaacagtgagcagcatcgcccagctgcacgtgagaggaaatgaagacctgagcaacaacggcagcctgcacagcgccaacagcaccaccaacctggccgccatcgagccccagcccagccccccccacagcgagcccccatctgtggagcagccccccaagcccaagctggagggcgtgctggtgaaccacaatgagcccaggagcagcagccgcatcggcctgcgggtgcacttcaacctgcctgaagatgacaagggcagcgaggccagcagcgaggccggcgtggtgaccacccggcagaccaggccagacagcttccaggagcgcttcaacggccaggccaccaagaccccagagcccagcagccctgtgaaggagcccccacctgtgctggccaagcccaagctggacagcacccagctgcagcagctgcacaaccaggtgctgctggagcagcaccagctgcagaaccccccacccagcagccccaaggagttccccttctccatgacagtgctgaacagcaatgcccccccagctgtgaccaccagcagcaagcaggtgaaggcccccagcagccagaccttcagcctggcccggcccaagtacttcttccccagcaccaacaccacagctgccaccgtggcccccagcagcagccctgtgttcaccctgagcagcaccccccagaccatccagaggacagtgtccaaggagagcctgctggtgagccaccccagcgtgcagaccaagagccctgggggcctgagcatccagaatgagcccctgcccccaggccccacagagcccaccccaccacccttcaccttcagcatccccagcggcaaccagttccagccccgctgtgtgagccccatccctgtgagccccaccagccgcatccagaaccctgtggccttcctgagctctgtgctgcccagcctgcctgccatcccccccaccaatgccatgggcctgcccaggtctgcccccagcatgcccagccagggcctggccaagaagaacaccaagagcccccagcctgtgaatgatgacaacatccgggagaccaagaatgctgtgatccgggacctgggcaagaagatcaccttcagtgatgtgcggcccaaccagcaggagtacaagatcagcagctttgagcagaggctgatgaatgaaattgagttccggctggagaggacccctgtggatgaaagtgatgatgagatccagcatgatgagatccccactggaaaatgtattgcccccatctttgacaagaggctgaagcacttccgggtgacagagggcagccctgtgaccttcacctgcaagatcgtgggcatccctgtgcccaaggtgtactggttcaaggatggcaagcagatcagcaagagaaatgagcactgcaagatgagaagagaaggagatggcacctgcagcctgcacatcgagagcaccaccagtgatgatgatggcaactacaccatcatggccgccaacccccagggccgcatcagctgcagcggccacctgatggtgcagagcctgcccatccgcagccggctgaccagcgctggccagagccaccggggccgcagccgggtgcaggagcgggacaaggagcccctgcaggagcgcttcttccggccccacttcctgcaggcccctggggacatggtggcccacgagggccgcctgtgccgcctggactgcaaggtgtctggcctgcccccacctgagctgacctggctgctgaatggccagcctgtgctgcctgatgccagccacaagatgctggtgcgggagaccggggtgcacagcctgctgattgaccccctgacccagagagatgctggcacctacaagtgcatcgccaccaacaagacaggccagaacagcttcagcctggagctgtctgtggtggccaaggaggtgaagaaggcccctgtgatcctggagaagctgcagaactgtggggtgcctgagggccaccctgtgcggctggagtgcagggtcatcggcatgcctcctcctgtgttctactggaagaaggacaatgagaccatcccctgcacccgggagcgcatctccatgcaccaggacaccaccggctacgcctgcctgctgatccagcctgccaagaagagtgatgctggctggtacaccctgagcgccaagaatgaggccggcatcgtgtcctgcacagcccggctggacatctatgcccagtggcaccaccagatccccccacccatgtctgtgcggcccagcggcagccgctatggcagcctgaccagcaagggcctggacatcttcagcgccttcagctccatggagagcaccatggtgtacagctgcagcagccgctctgtggtggagagtgatgagctgtag

SEQ ID NO: 22395 - DNA, 2292 bp, synthetic construct
  source 1..2292: mol_type = other DNA; note = Synthetic coding sequence
atgcaggacctgggggacaagctgaggatgattgtgatgggccaccggcgggtgcacatcagccggcagctggaggtggagcctgaggagcctgaggccgagaacaagcacaagcccaggaggaagagcaagaggggcaagaaggaggctgaagatgagctgagcgcccggcaccctgctgagctggccatggagcccaccccagagctgcctgctgaggtgctgatggtggaggtggagaatgtggtgcatgaggacttccaggtgacagaggaggtgaaggccctgacagctgagatcgtgaagaccatccgggacatcatcgccctgaaccccctgtaccgggagagcgtgctgcagatgatgcaggccggccagagggtggtggacaaccccatctacctgagtgacatgggcgccgccctgactggagctgagagccatgagctgcaggatgtgctggaggagaccaacatccccaagaggctgtacaaggccctgagcctgctgaagaaggagtttgagctgagcaagctgcagcagaggctgggccgggaggtggaggagaagatcaagcagacccacaggaagtacctgctgcaggagcagctgaagatcatcaagaaggagctgggcctggagaaggatgacaaggatgccatcgaggagaagttccgggagcggctgaaggagctggtggtgcccaagcacgtgatggatgtggtggatgaggagctgagcaagctgggcctgctggacaaccacagcagcgagttcaacgtgaccaggaactacctggactggctgaccagcatcccctggggcaagtacagcaatgaaaacctggacctggcccgggcccaggccgtgctggaggaggaccactacggcatggaggatgtgaagaagaggatcctggagttcatcgctgtgtcccagctgcggggcagcacccagggcaagatcctgtgcttctacggccccccaggagtgggcaagaccagcatcgcccggagcatcgcccgggccctgaaccgggagtacttccgcttctctgtgggcggcatgacagatgtggccgagatcaagggccacaggaggacctacgtgggcgccatgcctgggaagatcatccagtgcctgaagaagaccaagacagagaaccccctcatcctgattgatgaggtggacaagattggccggggctaccagggcgaccccagcagcgccctgctggagctgctggaccctgagcagaatgccaacttcctggaccactacctggatgtgcctgtggacctgagcaaggtgctcttcatctgcacagccaacgtgacagacaccatccctgagcccctgcgggacaggatggagatgatcaacgtgtctggctacgtggcccaggagaagctggccatcgccgagcgctacctggtgccccaggcccgggccctgtgtggcctggatgagagcaaggccaagctgagcagtgatgtgctgaccctgctgatcaagcagtactgccgggagagcggcgtgaggaacctgcagaagcaggtggagaaggtgctgaggaagagcgcctacaagatcgtgtctggagaggccgagagcgtggaggtgaccccagagaacctgcaggactttgtgggcaagcctgtgttcaccgtggagaggatgtatgatgtgaccccacctggggtggtgatgggcctggcctggacagccatgggcggcagcaccctgtttgtggagaccagcctgcggcggccccaggacaaggatgccaagggggacaaggatggcagcctggaggtgacaggccagctgggggaggtgatgaaggagagcgcccgcatcgcctacacctttgcccgggccttcctgatgcagcacgccccagccaatgactacctggtgaccagccacatccacctgcacgtgcctgagggcgccacccccaaggatggccccagcgctggctgcaccatcgtgacagccctgctgagcctggccatgggccggcctgtgcggcagaacctggccatgaccggggaggtgtccctgaccgggaagatcctgcctgtgggcggcatcaaggagaagaccatcgccgccaagagagctggggtgacctgcatcgtgctgcctgctgagaacaagaaggacttctatgacctggccgccttcatcacagagggcctggaggtgcactttgtggagcactaccgggagatctttgatattgccttcccagatgagcaggccgaggccctggccgtggagaggtag

SEQ ID NO: 22396 - DNA, 558 bp, synthetic construct
  source 1..558: mol_type = other DNA; note = Synthetic coding sequence
atgaacaacaaccagatcgtggccaaggacctgcaggatgagaagatcctgtacccagagttcaacaagctgaaggagaggaaccgggagctgaagaccctgctgagcattggaggctggaactttggcaccagccgcttcaccaccatgctgagcacctttgccaaccgggagaagttcatcgccagcgtcatcagcctgctgcggacccatgactttgatggcctggacctcttcttcctgtacccaggcctgcggggcagccccatgcatgaccgctggaccttcctgttcctgattgaggagctgctgtttgccttcaggaaggaggccctgctgaccatgaggccccggctgctgctgtctgctgctgtgtctggagtgccccacatcgtgcagaccagctatgatgtgcgcttcctgggccgctttgtgcccctgagcggggagaggaggagcacaggcctcatcacctccatgagcaggatgcccacccggggcaagagcggcctggccatgaccatgcccagcgcctctgtgaccaggcatggcctgtag

SEQ ID NO: 22397 - DNA, 1269 bp, synthetic construct
  source 1..1269: mol_type = other DNA; note = Synthetic coding sequence
atgtctgggggcaccccctacatcggcagcaagatcagcctcatcagcaaggccgagatccgctatgagggcatcctgtacaccatcgacacagagaacagcacagtggccctggccaaggtgcgcagctttggaacagaagatcggcccacagaccggcccatccccccaagagatgaggtgtttgagtacatcatcttccggggcagtgacatcaaggacctgactgtgtgtgagccccccaagccccagtgcagcctgccccaggaccctgccatcgtgcagagcagcctgggcagcagcaccagcagcttccagagcatgggcagctatggccccttcggccgcatgcccacctacagccagttcagccccagcagcctggtgggccagcagtttggagctgtgggcgtgggccgcagcagcccccagctggaccccctgaggaagagccccaccatggagcaggccgtgcagacagccagcgcccacctgcctgccccagctgctgtgggcagaagaagccctgtgtccacccggcccctgcccagcgccagccagaaggccggggagaaccaggagcaccggcgggcagaggtgcacaaggtgtccaggccagaaaatgagcagctgagaaatgacaacaagaggcaggtggcccctggggcccccagcgccccccggcggggccggggcggccaccggggcggccggggccgcttcggcatcagaagagatggccccatgaagtttgagaaggactttgattttgaaagtgccaatgcccagttcaacaaggaggagattgaccgggagttccacaacaagctgaagctgaaggaggacaagctggagaagcaggagaagcctgtgaatggagaggacaagggggacagcggcgtggacacccagaacagcgagggcaatgctgatgaggaggaccccctgggccccaactgctactatgacaagaccaagagcttctttgacaacatcagctgtgatgacaaccgggagcggcggcccacctgggccgaggagcggcggctgaatgctgagaccttcggcatccccctgcggcccaacagaggccggggcggctaccggggccggggcggcctgggcttccggggcggccggggccggggcggcggccggggcggcaccttcaccgccccccggggcttccggggcggcttccggggcggccggggcggccgggagtttgctgactttgagtacaggaagaccacagccttcggcccctag

SEQ ID NO: 22398 - DNA, 1266 bp, synthetic construct; identical to SEQ ID NO: 19415
  source 1..1266: mol_type = other DNA; note = Synthetic coding sequence

SEQ ID NO: 22399 - DNA, 756 bp, synthetic construct
  source 1..756: mol_type = other DNA; note = Synthetic coding sequence
atggattctgagctgatgcacagcatcgtgggcagctaccacaagcccccagagcgggtgtttgtgcccagcttcacccagaatgagcccagccagaactgccacccagccaacctggaggtgaccagccccaagatcctgcacagccccaacagccaggccctgatcctggccctgaagaccctgcaggagaagatccaccggctggagctggagaggacccaggccgaggacaacctgaacatcctgagccgggaggccgcccagtacaagaaggccctggagaatgagaccaatgaaagaaacctggcccaccaggagctgatcaagcagaagaaggacatcagcatccagctgagcagcgcccagagccgctgcaccctgctggagaagcagctggagtacaccaagaggatggtgctgaatgtggagcgggagaagaacatgatcctggagcagcaggcccagctgcagcgggagaaggagcaggaccagatgaagctgtatgccaagctggagaagctggatgtgctggagaaggagtgcttccggctgaccaccacccagaagacagctgaggacaagatcaagcacctggaggagaagctgaaggaggaggagcaccagaggaagctgttccaggacaaggccagcgagctgcagacaggcctggagatcagcaagatcatcatgagctctgtgagcaacctgaagcacagcaaggagaagaagaagagcagcaaggtgtgcatctag

SEQ ID NO: 22400 - DNA, 1980 bp, synthetic construct
  source 1..1980: mol_type = other DNA; note = Synthetic coding sequence
atggacagccagggccgggtgtgggcccaggagatgctgctgcgggtgtccccagaccacgtgaccctgctggaccctgccagcaaggaggagctggagagctaccccctgggcgccatcgtgcgctgtgatgctgtgatgcctcctggccgcagccgcagcctgctgctgctggtgtgccaggagcctgagcgggcccagccagatgtgcacttcttccagggcctgcggctgggcgctgagctgatccgggaggacatccagggcgccctgcacaactaccgcagcggccgcggggagaggagagctgctgccctgcgggccacccaggaggagctgcagagggacaggagccctgctgctgagaccccacccctgcagaggcggcccagcgtgcgggccgtcatcagcacagtggagagaggagctggccggggccggccccaggccaagcccatccctgaggccgaggaggcccagaggcctgagcctgtgggcaccagcagcaatgctgacagcgccagcccagacctgggcccccggggccctgacctggccgtgctgcaggccgagcgggaggtggacatcctgaaccacgtgtttgatgatgtggagagctttgtgtcccggctgcagaagtctgctgaggccgcccgggtgctggagcaccgggagcggggccgccgcagcagaagaagagctgctggggagggcctgctgaccctgcgggccaagccacccagcgaggccgagtacacagatgtgctgcagaagatcaagtatgccttcagcctgctggcccggctgcggggcaacattgctgaccccagcagccctgagctgctgcacttcctgtttggccccctgcagatgattgtgaacaccagcggcggccctgagtttgccagctctgtgcggcggccccacctgaccagtgatgctgtggccctgctgcgggacaacgtgaccccccgggagaatgagctgtggaccagcctgggggacagctggacccggcccggcctggagctgagccctgaggagggccccccctacagacctgagttcttcagcggctgggagccccctgtgacagacccccagagccgggcctgggaggaccctgtggagaagcagctgcagcacgagaggagaagacggcagcagagcgccccccaggtggccgtgaatggccaccgggacctggagcctgagagcgagccccagctggagagcgagacagctgggaagtgggtgctgtgcaactatgacttccaggccaggaacagcagcgagctgtctgtgaagcagagagatgtgctggaggtgctggatgacagcaggaagtggtggaaggtgcgggaccctgctggccaggagggctacgtgccctacaacatcctgaccccctacccaggcccccggctgcaccacagccagagccctgcccggagcctgaacagcaccccacctcctcctccagccccagccccagcccctcctccagccctggcccggccccgctgggaccggccccgctgggacagctgtgacagcctgaatggcctggaccccagcgagaaggagaagttcagccagatgctgattgtgaatgaggagctgcaggcccggctggcccagggccgcagcggccccagcagagctgtgcccggcccccgggcccctgagccccagctgagccctggcagtgatgccagcgaggtgcgggcctggctgcaggccaagggcttcagcagcggcaccgtggatgccctgggcgtgctgaccggggcccagctgttcagcctgcagaaggaggagctgcgggctgtgtccccagaggagggcgcccgggtgtacagccaggtgacagtgcagaggagcctgctggaggacaaggagaaggtgtctgagctggaggccgtgatggagaagcagaagaagaaggtggagggggaggtggagatggaggtgatctag

SEQ ID NO: 22401 - DNA, 3702 bp, synthetic construct
  source 1..3702: mol_type = other DNA; note = Synthetic coding sequence
atgaacaccaagaagaggggcagccctgcccggacccacagcatgatgagcctgtctgtgcggccccagaggcggctgctgagcgcccgggtgaacagaagccagagctttgctggggtgctgggcagccatgagcggggccccaggagcttccctgtgttcagccccccaggcccccccaggaagcccccagccctgagccgggtgtccaggatgttttctgtggcccaccctgctgccaaggtgccccagcctgagcggctggacctggtgtacacagccctgaagaggggcctgacagcctacctggaggtgcaccagcaggagcaggagaagctgcagggccagatccgggagagcaagaggaacagccggctgggcttcctgtatgacctggacaagcaggtgaagagcattgagcgcttcctgcggcggctggagttccacgccagcaagattgatgagctgtatgaggcctactgtgtgcagaggcggctgagagatggagcctacaacatggtgcgggcctacaccaccggcagccctggcagccgggaggcccgggacagcctggccgaggccacccggggccaccgggagtacacagagagcatgtgcctgctggagagcgagctggaggcccagctgggggagttccacctgaggatgaagggcctggccggctttgcccggctgtgtgtgggggaccagtatgagatctgcatgaagtatggccggcagcgctggaagctgcggggcagaattgagggcagcggcaagcaggtgtgggacagcgaggagaccatcttcctgcccctgctgacagagttcctgagcatcaaggtgacagagctgaagggcctggccaaccacgtggtggtgggctctgtgtcctgtgagaccaaggacctgtttgctgccctgccccaggtggtggccgtggacatcaatgacctgggcaccatcaagctgagcctggaggtgacctggagcccctttgacaaggatgaccagcccagcgctgccagctctgtgaacaaggccagcacagtgaccaagcgcttcagcacctacagccagagccccccagacacccccagcctgcgggagcaggccttctacaacatgctgcggcggcaggaggagctggagaatggaacagcctggagcctgagcagcgagagcagtgatgacagcagcagcccccagctgtctggaacagcccggcacagccctgccccccggcccctggtgcagcagcctgagcccctgcccatccaggtggccttcagaagacctgagacccccagcagcggccccctggatgaggagggcgctgtggcccctgtgctggccaatggacatgccccctacagcaggaccctgagccacatcagcgaggcctctgtggatgctgccctggccgaggcctctgtggaggccgtgggccctgagagcctggcctggggccccagcccccccacccacccagcccccacccatggagagcaccccagccctgtgcccccagccctggaccccggccacagcgccaccagcagcaccctgggcaccaccggctctgtgcccaccagcacagatcctgcccccagcgcccacctggacagcgtgcacaagagcacagacagcggccccagcgagctgcccggccccacccacaccaccaccggcagcacctacagcgccatcaccaccacccacagcgcccccagccccctgacccacaccaccaccggcagcacccacaagcccatcatcagcaccctgaccaccaccggccccaccctgaacatcatcggccctgtgcagaccaccaccagccccacccacaccatgcccagccccacccacaccacagccagccccacccacaccagcaccagccccacccacacccccaccagccccacccacaagacctccatgagcccccccaccaccaccagccccacccccagcggcatgggcctggtgcagacagccaccagccccacccaccccaccaccagccccacccaccccaccaccagccccatcctgatcaacgtgagccccagcaccagcctggagctggccaccctgagcagccccagcaagcacagcgaccccaccctgcctggaacagacagcctgccctgcagcccccctgtgagcaacagctacacccaggccgaccccatggcccccaggaccccccaccccagccctgcccacagcagcaggaagcccctgaccagccctgccccagaccccagcgagagcacagtgcagagcctgagccccacccccagcccccccaccccagccccccagcacagcgacctgtgcctggccatggctgtgcagacccctgtgcccacagctgctgggggcagcggggacaggagcctggaggaggccctgggcgccctgatggccgccctggatgactaccggggccagtttcctgagctgcagggcctggagcaggaggtgacccggctggagagcctgctgatgcagaggcagggcctgaccaggagccgggccagcagcctgagcatcaccgtggagcacgccctggagagcttctccttcctgaatgaagatgaagatgaagataatgatgtgcctggggaccggccccccagcagccctgaggccggggctgaagattccattgacagccccagcgcccggcccctgagcacaggctgcccagccctggatgctgccctggtgcgccacctgtaccactgcagccggctgctgctgaagctgggcaccttcggccccctgcgctgccaggaggcctgggccctggagcggctgctgcgggaggcccgggtgctggaggccgtgtgtgagttcagccgccgctgggagatcccagccagcagcgcccaggaggtggtgcagttcagcgccagcaggcctggcttcctgaccttctgggaccagtgcacagagcggctgagctgcttcctgtgccctgtggagcgggtgctgctgaccttctgcaaccagtacggggcccggctgagcctgcggcagcccggcctggccgaggccgtgtgtgtgaagttcctggaggatgccctgggccagaagctgccccggcggccccagcccggccctggagagcagctgactgtgttccagttctggagctttgtggagaccctggacagccccaccatggaggcctacgtgacagaaacagctgaggaggtgctgctggtgaggaacctgaacagtgatgaccaggccgtggtgctgaaggccctgcggctggcccctgagggccgcctgcggagagatggcctgcgggccctgagcagcctgctggtgcacggcaacaacaaggtgatggctgctgtgtccacccagctgcggagcctgagcctgggccccaccttccgggagcgggccctgctgtgcttcctggaccagctggaggatgaagatgtgcagaccagggtggccggctgcctggccctgggctgcatcaaggcccctgagggcatcgagcccctggtgtacctgtgccagacagacacagaagctgtgcgggaggccgcccggcagagcctgcagcagtgtggggaggagggccagagcgcccaccggcggctggaggagagcctggatgccctgccccgcatctttggacctggctccatggccagcacagccttctag

SEQ ID NO: 22402 - DNA, 1428 bp, synthetic construct
  source 1..1428: mol_type = other DNA; note = Synthetic coding sequence
atggaccagatggtgcagcaccctgctgccaagatgattgtgatggccagccacatgcaggagcaggaggtgggagatggcaccaactttgtgctggtgtttgctggggccctgctggagctggccgaggagctgctgcgcatcggcctgtctgtgtctgaggtgattgagggctatgaaattgcctgcaggaaggcccacgagatcctgcccaacctggtgtgctgcagcgccaagaacctgcgggacattgatgaggtgagcagcctgctgcggaccagcatcatgagcaagcagtatggaaatgaggtgttcctggccaagctgattgcccaggcctgtgtgtccatcttcccagattctggccacttcaacgtggacaacatccgggtgtgcaagatcctgggcagcggcatcagcagcagctctgtgctgcacggcatggtgttcaagaaggagacagaaggagatgtgacctctgtgaaggatgccaagattgctgtgtacagctgcccctttgatggcatgatcacagagaccaagggcaccgtgctgatcaagacagctgaggagctgatgaacttcagcaaaggagaggagaacctgatggatgcccaggtgaaggccatcgctgacacaggagccaacgtggtggtgactggaggcaaggtggccgacatggccctgcactacgccaacaagtacaacatcatgctggtgcggctgaacagcaagtgggacctgcggcggctgtgcaagacagtgggcgccacagccctgccccggctgaccccacctgtgctggaggagatgggccactgtgacagcgtgtacctgtctgaggtgggggacacccaggtggtggtgttcaagcatgagaaggaggatggagccatcagcaccatcgtgctgcggggcagcacagacaacctgatggatgacatcgagagagctgtggatgatggagtgaacaccttcaaggtgctgacccgggacaagaggctggtgcctgggggcggggccacagaaattgagctggccaagcagatcaccagctatggagagacctgccccggcctggagcagtatgccatcaagaagtttgctgaggcctttgaggccatcccccgggccctggctgaaaattctggagtgaaggccaatgaggtgatcagcaagctgtatgctgtgcaccaggagggcaacaagaatgtgggcctggacattgaagctgaggtgcctgctgtgaaggacatgctggaggccggcatcctggacacctacctgggcaagtactgggccatcaagctggccaccaatgctgctgtgacagtgctgcgggtggaccagatcatcatggccaagccagctgggggccccaagccacccagcggcaagaaggactgggatgatgaccagaatgactag

SEQ ID NO: 22403 - DNA, 1626 bp, synthetic construct
  source 1..1626: mol_type = other DNA; note = Synthetic coding sequence
atgagggccctgctgcacaagccagagatgatcaagcagatcctgcctgagcacagcgtgctgcagaacatcaactttgtggaggccttccaggatgagctgctggtgacagaggtgtatgacctgccccagaggcccaatgatgtgcagctgttctacggctccatgtgcaagatcatcctgagcgtcatcggggagttccgggactgcatcagcagccgggagttcctgcagcccagcagcaaggccagcctggagagcaccagtgacctgggcgccagcggcaagcatggaggaaatgtgtccctggatgtgctgcctgtgaagggcccccagggcagccccctgctgagccgggccgcccggccccccctggaccagctggccagcgaggagccctggacagtgctgcctgagcacctgatcctggtggcccccagcccctgtgacatggccaagacaggccgcttccagatcgtgaacaacagcgtgcggctgctgcgctttgagctgtgctggccagcccactgcctgactgtgaccccccagcacggctgtgtggcccctgagagcaagctgcagatcctggtgagccccaacagcagcctgagcaccaagcagagcatgttcccctggagcggcctcatctacatccactgtgatgatggccagaagaagatcgtgaaggtgcagatccgggaggacctgacccaggtggagctgctgacccggctgaccagcaagcccttcggcatcctgagccctgtgtctgagcccagcgtgagccacctggtgaagcccatgaccaagccacccagcaccaaggtggagatccggaacaagagcatcaccttccccaccacagagcccggggagaccagcgagagctgcctggagctggagaaccacggcaccacagatgtgaagtggcacctgagcagcctggccccaccctacgtgaagggcgtggatgagagcggagatgtgttccgggccacctatgctgccttccgctgcagccccatcagcggcctgctggagagccacggcatccagaaggtgtccatcaccttcctgccccggggccgcggggactatgcccagttctgggatgtggagtgccaccccctgaaggagccccacatgaagcacaccctgcgcttccagctgagcggccagagcattgaagcagaaaatgaaccagaaaatgcctgcctgagcacagacagcctcatcaagattgaccacctggtgaagccccggcggcaggccgtgtctgaggccagcgcccgcatccctgagcagctggatgtgacagcccggggcgtgtatgccccagaagatgtgtaccgcttccggcccacctctgtgggggagagcaggaccctgaaggtgaacctgaggaacaacagcttcatcacccacagcctgaagttcctgagcccccgggagcccttctacgtgaagcacagcaagtacagcctgcgggcccagcactacatcaacatgcctgtgcagttcaagcccaagtctgctgggaagtttgaggccctgctggtgatccagacagatgagggcaagagcatcgccatccgcctcatcggggaggccctgggcaagaactag

SEQ ID NO: 22404 - DNA, 1737 bp, synthetic construct
  source 1..1737: mol_type = other DNA; note = Synthetic coding sequence
atgagcagcaagggcagcagcacagatggccgcacagacctggccaacggcagcctgagcagcagccctgaggagatgtctggagctgaggagggccgggagaccagcagcggcatcgaggtggaggccagtgacctgagcctgagcctgactggagatgatggcggccccaacagaacctccatggaggacaccggccactacagcatcaatgatgaaaatagagtgcatgacagaagtgaggaggaggaggaggaggaggaggaggaggaggaggagcagcccaggagaagagtgcagaggaagagggccaacagagaccaggacagcagtgatgatgagcgggccctggaggactgggtgtcctctgagaccagcgccctgccccggccccgctggcaggccctgcctgccctgcgggagcgggagctgggcagcagcgccaggtttgtgtatgaggcctgtggggcccgggtgtttgtgcagcgcttccggctgcagcacggcctggagggccacacaggctgtgtgaacaccctgcacttcaaccagaggggcacctggctggccagcggcagtgatgacctgaaggtggtggtgtgggactgggtgcggcggcagcctgtgctggactttgagagcggccacaagagcaatgtgttccaggccaagttcctgcccaacagcggggacagcaccctggccatgtgtgccagagatggccaggtgcgggtggccgagctgagcgccacccagtgctgcaagaacaccaagagggtggcccagcacaagggggccagccacaagctggccctggagccagacagcccctgcaccttcctgtctgctggagaagatgctgtggtgttcaccatcgacctgcggcaggacaggcctgccagcaagctggtggtgaccaaggagaaggagaagaaggtgggcctgtacaccatctacgtgaacccagccaacacccaccagtttgctgtgggcggccgggaccagtttgtgcgcatctatgaccagaggaagattgatgaaaatgaaaataatggagtgctgaagaagttctgcccccaccacctggtgaacagcgagagcaaggccaacatcacctgcctggtgtacagccatgatggaacagagctgctggccagctacaatgatgaggacatctacctgttcaacagcagccacagtgatggagcccagtatgtgaagcgctacaagggccacagaaataatgccaccgtgaagggcgtgaacttctacggccccaagtcagaatttgtggtgtctggcagtgactgtggccacatcttcctgtgggagaagagcagctgccagatcatccagttcatggagggggacaagggcggcgtggtgaactgcctggagccccacccccacctgcctgtgctggccaccagcggcctggaccatgatgtgaagatctgggcccccacagctgaggccagcacagagctgaccggcctgaaggatgtgatcaagaagaacaagcgggagagagatgaggacagcctgcaccagacagacctgtttgacagccacatgctgtggttcctgatgcaccacctgcggcagaggaggcaccaccggcgctggagggagcccggggtgggcgccacagatgctgacagtgatgagagccccagcagcagtgacaccagtgatgaggaggagggccctgacagagtgcagtgcatgcccagctag

SEQ ID NO: 22405 - DNA, 426 bp, synthetic construct
  source 1..426: mol_type = other DNA; note = Synthetic coding sequence
atgggcggcaagcccaggcacagcctgtacttcatcggctaccaggatgacttcctgctgtacctggacccccactactgccagcccaccgtggatgtgtcccaggccgacttccccctggagagcttccactgcaccagccccaggaagatggcctttgccaagatggaccccagctgcaccgtgggcttctacgccggggacaggaaggagtttgagaccctgtgcagcgagctgaccagggtgctgagcagcagcagcgccacagagcgctaccccatgttcaccctggccgagggccacgcccaggaccacagcctggatgacctgtgcagccagctggcccagcccaccctgcggctgcccaggacaggccgcctgctgcgggccaagaggcccagcagcgaggactttgtgttcctgtag

SEQ ID NO: 22406 - DNA, 570 bp, synthetic construct
  source 1..570: mol_type = other DNA; note = Synthetic coding sequence
atggtgctgctgcacgtgaagagaggagatgagagccagttcctgctgcaggcccctggcagcacagagctggaggagctgactgtgcaggtggcccgggtgtacaacggccgcctgaaggtgcagaggctgtgcagcgccccaaatgagaagatgaagcaggtgctgaagaagaccatcgaggaggccaaggccatcatcagcaagaagcaggtggaggccggcgtgtgtgtgaccatggagatggtgaaggatgccctggaccagctgcggggagctgtgatgattgtgtaccccatgggcctgcccccctatgaccccatccgcatggagtttgagaacaaggaggacctgagcggcacccaggccggcctgaatgtcatcaaggaggccgaggcccagctgtggtgggccgccaaggagctgcggaggaccaagaagctgagtgactatgtgggcaagaatgagaagaccaagatcatcgccaagatccagcaggtgtccaccttctgcttcaacgtgtctgtggtgtttgtgatcagcctgcagacagacaagaatgtgcagtag

SEQ ID NO: 22407 - DNA, 2031 bp, synthetic construct
  source 1..2031: mol_type = other DNA; note = Synthetic coding sequence
atggccgccatccagcacggccacgaggccgtggtgcggctgctgatggagtggggcgctgaccccaaccacgccgccaggacagtgggctggagccccctgatgctggccgccctgaccggccgcctgggcgtggcccagcagctggtggagaagggggccaacccagaccacctgtctgtgctggagaagacagcctttgaggtggccctggactgcaagcaccgggacctggtggactacctggaccccctgaccaccgtgcggcccaagacagatgaggagaagagaagaccagacatcttccacgccctgaagatgggcaacttccagctggtgaaggagattgctgatgaggaccccagccacgtgaacctggtgaatggagatggagccacccccctgatgctggccgctgtgacaggccagctggccctggtgcagctgctggtggagagacatgctgatgtggacaagcaggacagcgtgcacggctggacagccctgatgcaggccacctaccacggcaacaaggagatcgtgaagtacctgctgaaccagggcgcagatgtgaccctgcgggccaagaatggctacacagcctttgacctggtgatgctgctgaatgaccctgacacagagctggtgcggctgctggcctctgtgtgcatgcaggtgaacaaggacaagggccggcccagccaccagccccccctgccccacagcaaggtgcggcagccctggagcatccctgtgctgcctgatgacaagggcggcctgaagtcctggtggaacaggatgagcaaccgcttcaggaagctgaagctgatgcagaccctgccccggggcctgagcagcaaccagcccctgcccttcagtgatgagcctgagcccgccctggacagcaccatgagagctgccccccaggacaagaccagccgcagcgccctgcctgatgctgcccctgtgaccaaggacaatggacctggcagcaccagaggagagaaggaggacaccctgctgaccaccatgctgagaaatggagcccccctgacccggctgcccagcgacaagctgaaggctgtgatcccccccttcctgccccccagcagctttgagctgtggagcagtgacaggagcaggaccaggcacaacgggaaggctgaccccatgaagacagccctgccccagagggccagccggggccaccctgtgggcggcggcggcacagacaccacccctgtgcggcctgtgaagttccccagcctgcccaggagccctgccagcagcgccaacagcggcaacttcaaccacagcccccacagcagcggcggcagcagtggagtgggcgtgagccgccacggcggggagctgctgaacagaagtggcggcagcattgacaacgtgctgagccagattgctgcccagaggaagaaggctgctggcctgctggagcagaagcccagccacaggagcagccctgtgggccctgcccctggcagcagccccagcgagctgcctgccagccctgctgggggcagcgcccctgtgggcaagaagctggagaccagcaagaggcctccttctggcaccagcaccaccagcaagagcaccagccccaccctgacccccagccccagccccaagggccacacagctgagagctctgtgagcagcagcagcagccaccggcagagcaagagcagcggcggcagcagcagcggcaccatcacagatgaagatgagctgaccggcatcctgaagaagctgagcctggagaagtaccagcccatctttgaggagcaggaggtggacatggaggccttcctgaccctgacagatggagacctgaaggagctgggcatcaagacagatggcagccggcagcagatcctggccgccatcagcgagctgaatgctgggaagggccgggagcggcagatcctgcaggagaccatccacaacttccacagcagctttgagagcagcgccagcaacacccgggcccctggcaacagcccctgtgcctag

SEQ ID NO: 22408 - DNA, 2319 bp, synthetic construct
  source 1..2319: mol_type = other DNA; note = Synthetic coding sequence
atgaggcaccagaagagaaatgtgtaccactgcaacaagtgccgcctgcagttcctgtttgccaaggacaagattgagcacaagctgcagcaccacaagaccttcaggaagcccaagcagctggagggcctgaagccaggcaccaaggtgaccatccgggccagccggggccagcccaggacagtgcctgtgagcagcaatgacaccccacccagcgccctgcaggaggccgcccccctgaccagctccatggaccccctgcccgtcttcctgtacccacctgtgcagaggagcatccagaagagagctgtgaggaagatgtctgtgatgggccggcagacctgcctggagtgcagctttgagatcccagacttccccaaccacttccccacctacgtgcactgcagcctgtgccgctacagcacctgctgcagccgggcctatgccaaccacatgatcaacaaccacgtgcccaggaagagccccaagtacctggccctcttcaagaacagcgtgtctggcatcaagctggcctgcaccagctgcacctttgtgacctctgtgggagatgccatggccaagcacctggtgttcaaccccagccacaggagcagcagcatcctgccccggggcctgacctggatcgcccacagccgccacggccagacccgggacagagtgcatgacagaaatgtgaagaacatgtaccccccacccagcttccccaccaacaaggccgccaccgtgaagtctgctggggccaccccagctgagcctgaggagctgctgacccccctggccccagccctgcccagccctgccagcacagccaccccaccacccacccccacccacccccaggccctggccctgccccccctggccacagagggcgctgagtgcctgaatgtggatgaccaggatgagggcagccctgtgacccaggagcctgagctggccagcggcggcggcggcagcggcggcgtgggcaagaaggagcagctgtctgtgaagaagctgcgggtggtgctgtttgccctgtgctgcaacacagagcaggccgctgagcacttcaggaacccccagaggcgcatccgccgctggctgcggcgcttccaggccagccagggcgagaacctggagggcaagtacctgagctttgaagctgaggagaagctggccgagtgggtgctgacccagcgggagcagcagctgcctgtgaatgaggagaccctcttccagaaggccaccaagattggccgcagcctggagggcggcttcaagatctcctatgagtgggccgtgcgcttcatgctgcggcaccacctgaccccccacgcccggcgggctgtggcccacaccctgcccaaggatgtggctgaaaatgccggcctcttcatcgactttgtgcagaggcagatccacaaccaggacctgcccctgtccatgattgtggccattgatgagatcagcctcttcctggacacagaggtgctgagcagtgatgacagaaaagaaaatgccctgcagacagtgggcaccggggagccctggtgtgatgtggtgctggccatcctggctgatggcaccgtgctgcccaccctggtgttctaccggggccagatggaccagcctgccaacatgccagacagcatcctgctggaggccaaggagagcggctacagtgatgatgagatcatggagctgtggagcaccagggtgtggcagaagcacacagcctgccagaggagcaagggcatgctggtgatggactgccacaggacccacctgtctgaggaggtgctggccatgctgagcgccagcagcaccctgcctgctgtggtgcctgctggctgcagcagcaagatccagcccctggatgtgtgcatcaagaggacagtgaagaacttcctgcacaagaagtggaaggagcaggcccgggagatggctgacacagcctgtgacagtgatgtgctgctgcagctggtgctggtgtggctgggggaggtgctgggcgtcatcggggactgcccagagctggtgcagaggagcttcctggtggcctctgtgctgcccggcccagatggcaacatcaacagccccaccagaaatgctgacatgcaggaggagctgattgccagcctggaggagcagctgaagctgagcggggagcacagcgagagcagcaccccccggcccaggagcagccctgaggagaccatcgagcctgagagcctgcaccagctgtttgaaggagagagcgagacagagagcttctacggctttgaggaggccgacctggacctgatggagatctag

SEQ ID NO: 22409 - DNA, 285 bp, synthetic construct
  source 1..285: mol_type = other DNA; note = Synthetic coding sequence
atggccatgacagctggcaccaccaccaccttccccatgagcaaccacacccgggagcgggtgacagtggccaagctgaccctggagaacttctacagcaacctgatcctgcagcacgaggagcgggagacccggcagaagaagctggaggtggccatggaggaggagggcctggctgatgaggagaagaagctgcggcgcagccagcacgccaggaaggagacagagttcctgcggctgaagaggacccggctgggcctggatgactttgagagcctgaagtag

SEQ ID NO: 22410 - DNA, 1047 bp, synthetic construct; identical to SEQ ID NO: 18886
  source 1..1047: mol_type = other DNA; note = Synthetic coding sequence

SEQ ID NO: 22411 - DNA, 888 bp, synthetic construct; identical to SEQ ID NO: 18344
  source 1..888: mol_type = other DNA; note = Synthetic coding sequence

SEQ ID NO: 22412 - DNA, 258 bp, synthetic construct
  source 1..258: mol_type = other DNA; note = Synthetic coding sequence
atgccctacaatgaagctgagaacaagaggagctaccacctgtgtgacctgtgtgaccgcatcatcattggagaccgggagtgggccgcccacatcaagagcaagagccacctgaaccagctgaagaagagaagaaggctggacagtgatgctgtgaacaccatcgagagccagagcgtgtccccagaccacaacaaggagcccaaggagaagggcagccctggccagaatgaccaggagctgaagtgcagcgtgtag

SEQ ID NO: 22413 - DNA, 396 bp, synthetic construct
  source 1..396: mol_type = other DNA; note = Synthetic coding sequence
atggccatgacagctggcaccaccaccaccttccccatgagcaaccacacccgggagcgggtgacagtggccaagctgaccctggagaacttctacagcaacctgatcctgcagcacgaggagcgggagacccggcagaagaagctggaggtggccatggaggaggagggcctggctgatgaggagaagaagctgcggcgcagccagcacgccaggaaggagacagagttcctgcggctgaagaggacccggctgggcctggatgactttgagagcctgaaggtgattggccgcggggcctttggagaggtgcggctggtgcagaagaaggacaccggccacatctatgccatgaagatcctgaggaagagtgacatgctggagaaggagcagtag

SEQ ID NO: 22414 - DNA, 21 bp, synthetic construct
  source 1..21: mol_type = other DNA; note = Synthetic coding sequence
atggcccacgagatgatctag

SEQ ID NO: 22415 - DNA, 2199 bp, synthetic construct
  source 1..2199: mol_type = other DNA; note = Synthetic coding sequence
atgggcttcagagatgaagctgctggctacttccacaaggctgtgaagctgaacccagacttcagtgatgccaaggagaacttctacagagtggccaactggctggtggagcgctggcacttcatcatgctgaatgacaccaagaggaacaccatctacaatgctgccatccagaaggctgtgtgcctgggcagcaagtctgtgctggacattggagctggcaccggcatcctgtccatgtttgccaagaaggccggggcccacagcgtgtatgcctgtgagctgagcaagaccatgtatgagctggcctgtgatgtggtggccgccaacaagatggaggccggcatcaagctgctgcacaccaagagcctggacatcgagatccccaagcacatccctgagcgggtgtccctggtggtgacagaaacagtggatgctggcctgtttggagagggcatcgtggagagcctcatccacgcctgggagcacctgctgctgcagcccaagaccaagggggagagcgccaactgtgagaagtatggcaaggtgatcccagccagcgctgtgatcttcggcatggctgtggagtgtgccgagatcagaagacaccaccgggtgggcatcaaggacattgctggcatccacctgcccaccaacgtgaagttccagagccctgcctacagctctgtggacacagaggagaccatcgagccctacaccacagagaagatgagccgggtgcctgggggctacctggccctgacagagtgctttgagatcatgacagtggacttcaacaacctgcaggagctgaagagcctggccaccaagaagccagacaagattggcatccctgtgatcaaggagggcatcctggatgccatcatggtgtggtttgtgctgcagctggatgatgagcacagcctgagcaccagccccagcgaggagacctgctgggagcaggccgtgtaccctgtgcaggacctggccgactactggatcaagccaggggaccacgtgatgatggaggtgtcctgccaggactgctacctgcgcatccagagcatctctgtgctgggcctggagtgtgagatggatgtggccaagagcttcacccagaacaaggacctgctgagcctgggcaatgaggccgagctgtgcagcgccctggccaacctgcagaccagcaagccagatgctgtggagcagacctgcatcctggagagcacagagatcgccctgctgaacaacatcccctaccacgagggcttcaagatggccatgagcaaggtgctgagcagcctgaccccagagaagctgtaccagaccatggacacccactgccagaatgagatgagcagcggcaccggccagagcaacacagtgcagaacatcctggagcccttctacgtgctggatgtgtctgagggcttctctgtgctgcctgtgattgctggcaccctgggccaggtgaagccctacagctctgtggagaaggaccagcaccgcatcgccctggacctgatcagcgaggccaaccacttccccaaggagaccctggagttctggctgcggcacgtggaggatgaaagtgccatgctgcagaggcccaagagtgacaagctgtggagcatcatcatcctggatgtgattgagcccagcggcctcatccagcaggagatcatggagaaggccgccatcagccgctgcctgctgcagagcggcggcaagatcttcccccagtatgtgctgatgtttggcctgctggtggagagccagaccctgctggaggagaatgctgtgcagggcacagagaggaccctgggcctgaacatcgcccccttcatcaaccagttccaggtgcccatccgggtcttcctggacctgagcagcctgccctgcatccccctgagcaagcctgtggagctgctgcggctggacctgatgaccccctacctgaacaccagcaaccgggaggtgaaggtgtatgtgtgcaagagcggccgcctgacagccatccccttctggtaccacatgtacctggatgaggagatccggctggacaccagcagcgaggccagccactggaagcaggccgctgtggtgctggacaaccccatccaggtggagatgggagaggagctggtgctgagcatccagcaccacaagagcaatgtgtccatcaccgtgaagcagtag

SEQ ID NO: 22416 - DNA, 1554 bp, synthetic construct
  source 1..1554: mol_type = other DNA; note = Synthetic coding sequence
atgtgcagcctggccagcggggccactggaggccgcggggctgtggagaatgaggaggacctgcctgagctgagtgacagcggagatgaagctgcctgggaggatgaagatgatgctgacctgccccacggcaagcagcagaccccctgcctcttctgcaacagactcttcaccagcgctgaggagaccttcagccactgcaagtctgagcaccagttcaacatcgacagcatggtgcacaagcacggcctggagttctacggctacatcaagctgatcaacttcatccggctgaagaaccccaccgtggagtacatgaacagcatctacaaccctgtgccctgggagaaggaggagtacctgaagcctgtgctggaggatgacctgctgctgcagtttgatgtggaggacctgtatgagcctgtgtctgtgcccttctcctaccccaacggcctgtctgagaacacctctgtggtggagaagctgaagcacatggaggcccgggccctgtctgctgaggccgccctggcccgggcccgggaggacctgcagaagatgaagcagtttgcccaggactttgtgatgcacacagatgtgaggacctgcagcagcagcacctctgtgattgctgacctgcaggaggatgaagatggagtgtacttcagcagctatggccactacggcatccacgaggagatgctgaaggacaagatcagaacagagagctacagagacttcatctaccagaacccccacatcttcaaggacaaggtggtgctggatgtgggctgcggcaccggcatcctgtccatgtttgctgccaaggccggggccaagaaggtgctgggcgtggaccagagcgagatcctgtaccaggccatggacatcatccggctgaacaagctggaggacaccatcaccctcatcaagggcaagattgaggaggtgcacctgcctgtggagaaggtggatgtgatcatcagcgagtggatgggctacttcctgctgtttgagagcatgctggacagcgtgctgtatgccaagaacaagtacctggccaagggcggctctgtgtacccagacatctgcaccatcagcctggtggccgtgtctgatgtgaacaagcatgctgaccgcatcgccttctgggatgatgtgtatggcttcaagatgagctgcatgaagaaggctgtgattcctgaggccgtggtggaggtgctggaccccaagaccctcatcagcgagccctgtggcatcaagcacatcgactgccacaccaccagcatcagtgacctggagttcagcagtgacttcaccctgaagatcaccaggacctccatgtgcacagccatcgccggctactttgacatctactttgagaagaactgccacaacagagtggtgttcagcacaggcccccagagcaccaagacccactggaagcagacagtgttcctgctggagaagcccttctctgtgaaggccggggaggccctgaagggcaaggtgacagtgcacaagaacaagcgggaggtgctgattgtgggcatctag

SEQ ID NO: 22417 - DNA, 1560 bp, synthetic construct
  source 1..1560: mol_type = other DNA; note = Synthetic coding sequence
atggagcaggagaagtttgacctgcagaagcagcacacagagaacatccaggagctgctggaggacaccaacgtgcggctgaacaagatggagagcgagtacatggcccagacccagagcaccaaccacatgatcaaggagctggaggcccgggtgcagcagctgaccggggaggccgagaacagcaacctgcagaggcagaagctgatccaggagaaggccgagctggagcgctgctaccagatcacctgcagcgagctgcaggaggtgaaggcccggaggaacaccctgcacaaggagaaggaccacctggtgaatgactatgagcagaacatgaagctgctgcagaccaagtatgatgctgacatcaacctgctgaagcaggagcacgccctgagcgccagcaaggccagctccatgattgaggagctggagcagaatgtgtgccagctgaagcagcagctgcaggagagcgagctgcagaggaagcagcagctgcgggaccaggagaacaagttccagatggagaagagccacctgaagcacatctatgagaagaaggcccatgacctgcagagcgagctggacaagggcaaggaggacacccagaagaagatccacaagtttgaggaggccctgaaggagaaggaggagcagctgaccagggtgacagaggtgcagaggctgcaggcccagcaggctgatgctgccctggaggagttcaagaggcaggtggagctgaacagcgagaaggtgtatgcagagatgaaggagcagatggagaaggtggaggccgacctgaccaggagcaagagcctgcgggagaagcagagcaaggagttcctgtggcagctggaggacatccggcagagatatgagcagcagatcgtggagctgaagctggagcacgagcaggagaagacccacctgctgcagcagcacaatgctgagaaggacagcctggtgcgggaccacgagcgggagattgagaacctggagaagcagctgcgggccgccaacatggagcacgagaaccagatccaggagttcaagaagagagatgcccaggtgattgctgacatggaggcccaggtgcacaagctgcgggaggagctgatcaacgtgaacagccagaggaagcagcagctggtggagctgggcctgctgcgggaggaggagaagcagagggccacccgggagcatgaaattgtggtgaacaagctgaaggccgagagcgagaagatgaagattgagctgaagaagacccacgccgctgagacagagatgaccctggagaaggtgctgcaggatgagctggagaacagaagcaaccaggtgcgctgtgccgagaagaagctgcagcacaaggagctggagagccaggagcagatcacctacatccggcaggagtatgagaccaagctgaagggcctgatgcctgccagcctgcggcaggagctggaggacaccatcagcagcctgaagagccaggtgaacttcctgcagaagagggccagcatcctgcaggaggagctgaccacctaccagggcagaagatag

SEQ ID NO: 22418 - DNA, 1743 bp, synthetic construct
  source 1..1743: mol_type = other DNA; note = Synthetic coding sequence
atgaacaacatccacgtggagaatgaaagcctggacaacttcctgaaggagaccaacaaggagaacctgctggacatcctgacagagcctgagaggaagccagaccccaagctgtacaccaggagcaagcccaagacagacagctacaaccagaccaagaacagcctggtgcccaagcaggccctgggcaagagctctgtgaacagcgctgtgctgaaggacagagtgaacaagcagtttgtgggggagacccagagcaggaccttccctgtgaagagccagcagctgagcagaggagctgacctggcccggcctggggtgaagcccagcaggacagtgcccagccacttcatccgcaccctgagcaaggtgcagagcagcaagaagcctgtggtgaagaacatcaaggacatcaaggtgaacagaagccagtatgagcggcccaatgagaccaagatccgcagctaccctgtgacagagcagagggtgaagcacaccaagcccaggacctaccccagcctgctgcagggcgagtacaacaacagacaccccaacatcaagcaggaccagaagagcagccaggtgtgcatcccccagaccagctgtgtgctgcagaagagcaaggccatcagccagaggcccaacctgactgtgggccgcttcaacagcgccatccccagcacccccagcatccggcccaacggcaccagcggcaacaagcacaacaacaacggcttccagcagaaggcccagaccctggacagcaagctgaagaaggctgtgccccagaaccacttcctgaacaagacagcccccaagacccaggctgatgtgaccaccgtgaatggcacccagaccaaccccaacatcaagaagaaggccacagcagaagatagaaggaagcagctggaggagtggcagaagagcaagggcaagacctacaagaggcctcccatggagctgaagaccaagaggaaggtgatcaaggagatgaacatctccttctggaagagcattgagaaggaggaggaggagaagaaggcccagctggagctgagcagcaagatcaacaacaccctgacagagtgcctgaacctgattgaaggaggagtgcccagcaatgagatcctgaacatcctgagcagcatccctgaggccgagaagtttgccaagttctggatctgcaaggccaagctgctggccagcaagggcacctttgatgtgattggcctgtatgaggaggccatcaagaatggagccacccccatccaggagctgaggaaggtggtgctgaacatcctgcaggacagcaacagaaccacagagggcatcaccagtgacagcctggtggccgagaccagcatcacctctgtggaggagctggccaagaagatggagagcgtgaagagctgcctgagccccaaggagcgggagcaggtgacagccaccccccgcatcgccaaggccgagcagcacaactacccaggcatcaagctgcagatcggccccatcccccgcatcaatggcatgcctgaggtgcaggacatgaagttcatcacccctgtgagaagaagcagccgcatcgagagagctgtgagccgctacccagagatgctgcaggagcatgacctggtggtggccagcctggatgagctgctggaggtggaggagaccaagtgcttcatcttcagaagaaatgaggccctgcctgtgaccctgggcttccagaccccagagagctag

SEQ ID NO: 22419 - DNA, 705 bp, synthetic construct
  source 1..705: mol_type = other DNA; note = Synthetic coding sequence
atgtacatggacctggtggatggcatcttcctgaaccagatcatgctgcagattgacccccggcccaccaaccagaggatcaacaagcacgtgaacaatgatgtgaacctgcgcatccagaacctgaccatcctggtgaggaacatcaagacctactaccaggaggtgctgcagcagctgattgtgatgaacctgcccaacgtgctgatgattggccgggaccccctgagcggcaagtccatggaggagatcaagaaggtgctgctgctggtgctgggctgtgctgtgcagtgtgagaggaaggaggagttcatcgagcgcatcaagcagctggacatcgagacccaggccggcatcgtggcccacatccaggaggtgacccacaaccaggagaatgtgtttgacctgcagtggctggagctgcctgatgtggcccctgaggagctggaggccctgagccgctccatggtgctgcacctgcggcggctgattgaccagagagatgaatgtacagagctgattgtggacctgacccaggagcgggactacctgcaggcccagcacccccccagccccatcaagagcagcagcgctgacagcacccccagccccaccagcagcctgagcagcgaggacaagcagcacctggccgtggagctggccgacaccaaggcccggctgcggcgggtgcggcaggagctgtag

SEQ ID NO: 22420 - DNA, 1161 bp, synthetic construct
  source 1..1161: mol_type = other DNA; note = Synthetic coding sequence
atgacagacatcaggaagatccggctgggggagcggctggtggaggtgttttctgctgagaaggtgtacatggtgcggctgaggaaccccctgggccggcaggagtggagcggcccctggagcgagatcagcgaggagtggcagcagctgacagccagtgacaggaagaacctgggcctggtgatgtctgatgatggagagttctggatgagcctggaggacttctgcaggaacttccacaagctgaatgtgtgcagaaatgtgaacaaccccatctttggaaggaaggagctggagagcgtgctgggctgctggacagtggatgatgaccccctgatgaacagaagtggcggctgctacaacaacagagacaccttcctgcagaacccccagtacatcttcaccgtgcctgaagatggccacaaggtgatcatgagcctgcagcagaaggacctgcggacctacagaaggatgggccgcccagacaactacatcatcggctttgagctgttcaaggtggagatgaacaggaagttccggctgcaccacctgtacatccaggagcgggccggcaccagcacctacatcgacaccaggacagtgttcctgagcaagtacctgaagaagggcaactacgtgctggtgcccaccatgttccagcacggccgcaccagcgagttcctgctgcgcatcttcagcgaggtgcctgtgcagctgcgggagctgaccctggacatgcccaagatgagctgctggaacctggcccggggctaccccaaggtggtgacccagatcaccgtgcacagcgctgaggacctggagaagaagtatgccaatgaaacagtgaacccctacctggtgatcaagtgtgggaaggaggaggtgcgcagccctgtgcagaagaacacagtgcacgccatctttgacacccaggccatcttctacagaaggaccacagacatccccatcatcgtgcaggtgtggaacagcaggaagttctgtgaccagttcctgggccaggtgaccctggatgctgaccccagcgactgccgggacctgaagagcctgtacctgaggaagaagggcggccccacagccaaggtgaagcagggccacatctccttcaaggtgatcagcagtgatgacctgacagagctgtag

SEQ ID NO: 22421 - DNA, 966 bp, synthetic construct
  source 1..966: mol_type = other DNA; note = Synthetic coding sequence
atgacagagctgagcctgcagaaggagcagctgcagctgaagatcatcgagattgaagatgaggccgagaagtggcagaaggagaaggaccgcatcaagagcttcaccaccaatgagaaggccatcctggagcagaacttccgggacctggtgcgggacctggagaagcagaaggaggaggtgcgggccgccctggagcagcgggagcaggatgctgtggaccaggtgaaggtgatcatggatgccctggatgagcgggccaaggtgctgcacgaggacaagcagacccgggagcagctgcacagcatcagtgacagcgtgctcttcctgcaggagtttggagccctgatgagcaactacagcctgcccccacccctgcccacctaccacgtgctgctggagggggagggcctgggccagagcctgggcaacttcaaggatgacctgctgaatgtgtgcatgagacatgtggagaagatgtgcaaggctgacctgagcaggaacttcatcgagaggaaccacatggagaatggaggagaccacagatatgtgaacaactacaccaacagctttggaggagagtggagcgccccagacaccatgaagcgctacagcatgtacctgacccccaagggcggcgtgaggaccagctaccagcccagcagccctggccgcttcaccaaggagaccacccagaagaacttcaacaacctgtatggcaccaagggcaactacaccagccgggtgtgggagtacagcagcagcatccagaacagcgacaatgacctgcctgtggtgcagggcagcagcagcttcagcctgaagggctaccccagcctgatgaggagccagagccccaaggcccagccccagacctggaagagcggcaagcagaccatgctgagccactaccggcccttctacgtgaacaagggaaatggaattggcagcaatgaggccccctag

SEQ ID NO: 22422 - DNA, 687 bp, synthetic construct
  source 1..687: mol_type = other DNA; note = Synthetic coding sequence
atgtaccggcagcgcttcctgtacagcctgtaccgccacacccactgggtgcgctgtgccaagttctccccagatggccgcctgattgtgtcctgcagcgaggacaagaccatcaagatctgggacaccaccaacaagcagtgtgtgaacaacttcagtgacagcgtgggctttgccaactttgtggacttcaaccccagcggcacctgcatcgccagcgctggcagtgaccagacagtgaaggtgtgggatgtgcgggtgaacaagctgctgcagcactaccaggtgcacagcggcggcgtgaactgcatctccttccaccccagcggcaactacctgatcacagccagcagtgatggcaccctgaagatcctggacctgctggagggccgcctcatctacaccctgcagggccacacaggccctgtgttcaccgtgtccttcagcaagggcggggagctgtttgccagcggcggcgctgacacccaggtgctgctgtggaggaccaactttgatgagctgcactgcaagggcctgaccaagaggaacctgaagaggctgcactttgacagccccccccacctgctggacatctaccccaggaccccccacccccatgaggagaaggtggagaccgtggaggacttcttcctgcacctgctgcggctcatccagagcctgaggtag

SEQ ID NO: 22423 - DNA, 1686 bp, synthetic construct
  source 1..1686: mol_type = other DNA; note = Synthetic coding sequence
atgagagctgtgagaagacacctgttcccccagcacagcgcccctggccggggcgtggtgtgggagtggctgagtgatgatggctcctggacagcctatgaggcctctgtgtgtgactacctggagcagcaggtggcccggggcaaccagctggtggacctggcccccctgggctacaactacacagtgaactacaccacccacacccagaccaacaagaccagcagcttctgccgctctgtgcggcggcaggccggccccccctaccctgtgaccaccatcatcgcccctcctggccacactggagtggcctgcagctgccaccagtgcctgagcggcagcaggacaggccctgtgtctggccgctaccgccacagcatgaccaacctgcctgcctaccctgtgccccagcaccccccccacaggacagcctctgtgtttggcacccaccaggcctttgccccctacaacaagcccagcctgagcggggcccggagcgccccccggctgaacaccaccaatgcctggggcgccgccccacccagcctgggcagccagcccctgtaccgcagcagcctgagccacctgggcccccagcacctgcccccaggcagcagcaccagcggggctgtgtctgccagcctgcccagcggccccagcagcagccctggctctgtgcctgccaccgtgcccatgcagatgcccaagcccagccgggtgcagcaggccctggccggcatgacctctgtgctgatgtctgccatcggcctgcctgtgtgcctgagccgggccccccagcccaccagccccccagccagccggctggccagcaagagccacggctctgtgaagaggctgaggaagatgtctgtgaagggggccacccccaagccagagcctgagcctgagcaggtgatcaagaactacacagaggagctgaaggtgcccccagatgaggactgcatcatctgcatggagaagctgagcacagccagcggctacagtgatgtgacagacagcaaggccatcggcagcctggccgtgggccacctgaccaagtgcagccacgccttccacctgctgtgcctgctggccatgtactgcaatggaaacaaggatggcagcctgcagtgccccagctgcaagaccatctatggagagaagacaggcacccagccccagggcaagatggaggtgctgcgcttccagatgagcctgcccggccacgaggactgtggcaccatcctgattgtgtacagcatcccccacggcatccagggccctgagcaccccaaccctgggaagcccttcaccgcccggggcttcccccggcagtgctacctgcctgacaatgcccagggcaggaaggtgctggagctgctgaaggtggcctggaagagaagactcatcttcaccgtgggcaccagcagcaccactggagaaacagacacagtggtgtggaatgagatccaccacaagacagagatggacaggaacatcactggacatggctacccagaccccaactacctgcagaatgtgctggccgagctggccgcccagggcgtgacagaggactgcctggagcagcagcacgcccggctgtggtggccaccccgctgccccatggccggctgggtggcccggcaggaggtgcccagcccccggggctgggaggtgtgctag

SEQ ID NO: 22424 - DNA, 2565 bp, synthetic construct
  source 1..2565: mol_type = other DNA; note = Synthetic coding sequence
atgaaggtggaggcctgcacctgggccggctacagcggcctgtatgaggccatcgagagctgggacttcaagaagattgagaagctggaggagtaccgcctgctgctgaagaggctgcagcctgagttcaagacccgcatcatccccacagacatcatcagtgacctgtctgagtgcctgatcaaccaggagtgtgaggagatcctgcagatctgcagcaccaagggcatgatggccggggctgagaagctggtggagtgcctgctgcggagtgacaaggagaactggcccaagaccctgaagctggccctggagaaggagaggaacaagttcagcgagctgtggatcgtggagaagggcatcaaggatgtggagacagaggacctggaggacaagatggagaccagtgacatccagatcttctaccaggaggaccctgagtgccagaacctgtctgagaacagctgccccccatctgaggtgtctgacaccaacctgtacagccccttcaagcccaggaactaccagctggagctggccctgcctgccatgaagggcaagaacaccatcatctgtgcccccaccggctgcggcaagacctttgtgtccctgctgatctgtgagcaccacctgaagaagttcccccagggccagaagggcaaggtggtgttctttgccaaccagatccctgtgtatgagcagcagaagtctgtgttcagcaagtactttgagcggcacggctacagagtgacaggcatcagcggggccacagcagaaaatgtgcctgtggagcagatcgtggagaacaatgacatcatcatcctgaccccccagatcctggtgaacaacctgaagaagggcaccatccccagcctgagcatcttcaccctgatgatctttgatgagtgccacaacaccagcaagcagcacccctacaacatgatcatgttcaactacctggaccagaagctgggcggcagcagcggccccctgccccaggtgattggcctgacagcctctgtgggcgtgggagatgccaagaacacagatgaggccctggactacatctgcaagctgtgtgccagcctggatgccagcgtcatcgccaccgtgaagcacaacctggaggagctggagcaggtggtgtacaagccccagaagttcttcaggaaggtggagagccgcatcagtgacaagttcaagtacatcatcgcccagctgatgagggacacagagagcctggccaagaggatctgcaaggacctggagaacctgagccagatccagaaccgggagtttggcacccagaagtatgagcagtggatcgtgacagtgcagaaggcctgcatggtgttccagatgccagacaaggatgaggagagccgcatctgcaaggccctcttcctgtacaccagccacctgaggaagtacaatgatgccctgatcatcagcgagcacgccaggatgaaggatgccctggactacctgaaggacttcttcagcaatgtgcgggccgccggctttgatgaaattgagcaggacctgacccagagatttgaggagaagctgcaggagctggagagcgtgtcccgggaccccagcaatgaaaaccccaagctggaggacctgtgcttcatcctgcaggaggagtaccacctgaaccctgagaccatcaccatcctgtttgtgaagacccgggccctggtggatgccctgaagaactggattgagggcaaccccaagctgtccttcctgaagccaggcatcctgaccggccggggcaagaccaaccagaacacaggcatgaccctgcctgcccagaagtgcatcctggatgccttcaaggccagcggggaccacaacatcctgattgccacctctgtggctgatgagggcattgatattgcccagtgcaacctggtgatcctgtatgaatatgtgggcaatgtcatcaagatgatccagacccggggccggggccgggcccggggcagcaagtgcttcctgctgaccagcaatgctggggtgattgagaaggagcagatcaacatgtacaaggagaagatgatgaatgacagcatcctgcggctgcagacctgggatgaagctgtgttccgggagaagatcctgcacatccagacccatgagaagttcatccgggacagccaggagaagcccaagcctgtgcctgacaaggagaacaagaagctgctgtgcaggaagtgcaaggccctggcctgctacacagcagatgtgcgggtgattgaggagtgccactacacagtgctgggagatgccttcaaggaatgttttgtgtcccggccccaccccaagcccaagcagttcagcagctttgagaagagggccaagatcttctgtgcccggcagaactgcagccatgactggggcatccacgtgaagtacaagacctttgagatccctgtgatcaagattgagagctttgtggtggaggacatcgccaccggggtgcagaccctgtacagcaagtggaaggacttccactttgagaagatcccctttgatcctgctgagatgagcaagtag

SEQ ID NO: 22425 - DNA, 813 bp, synthetic construct
  source 1..813: mol_type = other DNA; note = Synthetic coding sequence
atgcagatcgagcacatcatcgagaacatcgtggccgtgaccaagggcctgtctgagaagctgcctgagaagtgggagagcgtgaagctgctgtttgtgaagacagagaagtctgctgccctgcccatcttcagcagctttgtgagcaactgggatgaggccaccaagaggagcctgctgaacaagaagaagaaggaggcccggaggaagagaagagagaggaactttgagaagcagaaggagaggaagaagaagaggcagcaggccaggaagacagcctctgtgctgagcaaggatgatgtggcccctgagagcggggacaccaccgtgaagaagccagagagcaagaaggagcagaccccagagcacggcaagaagaagaggggccggggcaaggcccaggtgaaggccaccaatgaaagtgaagatgagatcccccagctggtgcccatcggcaagaagaccccagccaatgagaaggtggagatccagaagcacgccaccgggaagaagagccctgccaagagccccaaccccagcaccccccggggcaagaagaggaaggccctgcctgccagcgagacccccaaggctgctgagagcgagacccctgggaagagccctgagaagaagcccaagatcaaggaggaggccgtgaaggagaagagccccagcctgggcaagaaggatgcccggcagacccccaagaagccagaggccaagttcttcaccacccccagcaagtctgtgaggaaggccagccacacccccaagaagtggcccaagaagcccaaggtgccccagagcacctag

SEQ ID NO: 22426 - DNA, 1059 bp, synthetic construct
  source 1..1059: mol_type = other DNA; note = Synthetic coding sequence
atgagcagcaggaagctgagcggccccaagggccggcggctgagcatccacgtggtgacctggaatgtggccagcgctgccccacccctggacctgagtgacctgctgcagctgaacaacagaaacctgaacctggacatctacgtgattggcctgcaggagctgaacagcggcatcatcagcctgctgagtgatgctgccttcaatgacagctggagcagcttcctgatggatgtgctgagccccctgtccttcatcaaggtgagccacgtgaggatgcagggcatcctgctgctggtgtttgccaagtaccagcacctgccctacatccagatcctgagcaccaagagcacccccaccggcctgtttggctactggctgagcatcgccaagaagcatgaccccctgctgcgggagttccaggagggccgcctgctcttcccccccacctacaagtttgacaggaacagcaatgactatgacaccagcgagaagaagaggaagccagcctggacagaccgcatcctgtggaggctgaagaggcagccctgtgccggccctgacacccccatccccccagccagccacttcagcctgagcctgcggggctacagcagccacatgacctacggcatcagtgaccacaagcctgtgtctggcacctttgacctggagctgaagcccctggtgtctgcccccctgattgtgctgatgcctgaggacctgtggacagtggagaatgacatgatggtgtcctacagcagcaccagtgacttccccagcagcccctgggactggattggcctgtacaaggtgggcctgagagatgtgaatgactatgtgtcctatgcctgggtgggggacagcaaggtgtcctgcagcgacaacctgaaccaggtgtacatcgacatcagcaacatccccaccacagaagatgagttcctgctgtgctactacagcaacagcctgcggtctgtggtgggcatcagccggcccttccagatccccccaggcagcctgcgggaggaccccctgggggaggcccagccccagatctag

SEQ ID NO: 22427 - DNA, 375 bp, synthetic construct
  source 1..375: mol_type = other DNA; note = Synthetic coding sequence
atgacaggcagctgctgcggcagcaccttcagcagcctgtcctatggaggcggctgctgccagccctgctgctgccgggacccctgctgctgcaggcctgtgacctgccagaccaccgtgtgcaggcctgtgacctgtgtgccccgctgcacccggcccatctgtgagccctgcagaagacctgtgtgctgtgacccctgcagcctgcaggagggctgctgccggcccatcacctgctgccccagcagctgcacagctgtggtgtgccggccctgctgctgggccaccacctgctgccagccccctgtgtctgtgcagagcccctgtggccagcccaccccctgcagcaccacctgcaggaccagcagctgctag

SEQ ID NO: 22428 - DNA, 927 bp, synthetic construct; identical to SEQ ID NO: 19214
  source 1..927: mol_type = other DNA; note = Synthetic coding sequence

SEQ ID NO: 22429 - DNA, 2943 bp, synthetic construct
  source 1..2943: mol_type = other DNA; note = Synthetic coding sequence
atgacagagggccgccactgccaggtgcacctgctggatgaccggcggctggagctgctggtgcagcccaagctgctggcccgggagctgctggacctggtggccagccacttcaacctgaaggagaaggagtacttcggcatcaccttcattgatgacaccggccagcagaactggctgcagctggaccaccgggtgctggaccatgacctgcccaagaagccaggccccaccatcctgcactttgctgtgcgcttctacatcgagagcatctccttcctgaaggacaagaccaccgtggagctgttcttcctgaatgccaaggcctgtgtgcacaagggccagatcgaggtggagagcgagaccatcttcaagctggccgccttcatcctgcagagccccaaggtgtccctgacccatgatgaaaatgccaggaaggacctgaagaccctgcctgccttccccaccaagaccctgcaggagcaccccagcctggcctactgtgaagatagagtgattgagcactacctgaagatcaagggcctgacccggggccaggccgtggtgcagtacatgaagatcgtggaggccctgcccacctatggagtgcactactatgctgtgaaggacaagcagggcctgccctggtggctgggcatctcctacaagggcatcggccagtatgacatccaggacaaggtgaagcccaggaagctgttccagtggaagcagctggagaacctgtacttccgggagaagaagtttgctgtggaggtgcatgacccccggcgcatctctgtgtccaggaggaccttcggccagagcggcctgtttgtgcagacctggtacgccaacagcagcctcatcaagagcatctgggtgatggccatcagccagcaccagttctacctggacaggaagcagagcaaggccaagatccccagcgcccggagcctggatgagatcgccatggacctgacagaaacaggcacccagagggccagcaagctggtgaccctggagaccaagagccagttcatcatggccagcaatggcagcctcatcagcagcggcagccaggacagcgaggtgtctgaggagcagaagcgggagaagatcctggagctgaagaagaaggagaagctgctgcaggagaagctgctgaagaaggtggaggagctgaagaagatctgcctgcgggaggccgagctgaccgggaagatgcccaaggagtaccccctgaacatcggggagaagccaccccaggtgagaagaagagtgggcacagccttcaagctggatgacaacctgctgcccagcgaggaggaccctgccctgcaggagctggagagcaacttcctgatccagcagaagctggtggaggccgccaagaagctggccaatgaaccagacctgtgcaagacagtgaagaagaagaggaagcaggactacacagatgccatgaagaagctgcaggagattgaaaatgccatcaatgagtaccgcatccgctgtgggaagaagcccagccagaaggccaccgtgctgcctgaggacatcatccccagcgagagcagcagcctgagtgacaccaccacctatgatgaccccagtgatgccttcaccttccctggccagaggagcagctctgtgccccacagcccccgcatcctgccccccaagagcctgggcatcgagcgcatccacttcaggaagagcagcatcaatgagcagtttgtggacacccggcagagccgggagatgctgagcacccacagcagcccctacaagaccctggagcggcggccccagggcggccgctccatgcccaccacccctgtgctgaccagaaatgcctacagcagcagccacctggagcctgagagcagcagccagcactgccggcagaggagcggcagcctggagagccagagccacctgctgtctgagatggacagcgacaagcccttcttcagcctgagcaagagccagaggagcagcagcacagagatcctggatgatggcagcagctacaccagccagagcagcacagagtactactgtgtgacccctgtgacaggcccctactacaccacccagaccctggacaccaggacccggggcagaagaagaagcaagaagcagaatgtgtccaccagcaacagcggctccatgcccaacctggcccagaaggacagcctgagaaatggagtgtacagcaagagccaggagccccccagcagcagctactacatcgccggctacaccccctatgcagaatgtgacttctactacagcggcggctacgtgtatgaaaatgacacagagggccagtacagcgtgaaccccagctaccgcagcagcgcccactacggctatgagcggcagagggactacagccgctccttccatgaagatgaggtggacagagtgccccacaacccctatgccaccctgcggctgcccaggaaggccgccgccaagtctgagcacatcaccaagaacatccacaaggccctggtggccgagcacctgcggggctggtaccagagggccagcggccagaaggaccagggccacagcccccagaccagctttgacagcgaccggggcagccagcgctgcctgggctttgctggcctgcaggtgccctgcagccccagcagccgggccagcagctacagctctgtgagcagcaccaatgccagcggcaactggaggacccagctgaccatcggcctgagtgactatgagaccccagcccacagcagctacaccagctgctatggaaatgtgtacaaccccctgcccagccccagccggcagtacacagagatcagccagctggatggaacagatggcaaccagctggaggacaacctggagagcagcgagcagaggctcttctggcatgaggacagcaagccaggcaccctggtgtag

SEQ ID NO: 22430 - DNA, 2979 bp, synthetic construct
  source 1..2979: mol_type = other DNA; note = Synthetic coding sequence
atgtatggcagcgcccggtctgtgggcaaggtggagcccagcagccagagccctggccgcagcccccggctgcccaggagcccccggctgggccacaggaggaccaacagcactggaggcagcagcggcagctctgtgggcggcggcagcggcaagaccctgtccatggagaacatccagagcctgaatgctgcctatgccaccagcggccccatgtacctgagtgaccatgaaaatgtgggcagcgagacccccaagagcaccatgaccctgggccgcagcggcggccgcctgccctacggcgtgaggatgacagccatgggcagcagccccaacatcgccagcagcggcgtggccagtgacaccatcgcctttggagagcaccacctgccccctgtgtccatggccagcacagtgccccacagcctgcggcaggcccgggacaacaccatcatggacctgcagacccagctgaaggaggtgctgcgggagaatgacctgctgaggaaggatgtggaggtgaaggagagcaagctgagcagctccatgaacagcatcaagaccttctggagccctgagctgaagaaggagcgggccctgaggaaggatgaggccagcaagatcaccatctggaaggagcagtacagagtggtgcaggaggagaaccagcacatgcagatgaccatccaggccctgcaggatgagctgcgcatccagagggacctgaaccagctgttccagcaggacagcagcagcaggactggagagccctgtgtggccgagctgacagaggagaacttccagaggctgcacgccgagcacgagcggcaggccaaggagctgttcctgctgaggaagaccctggaggagatggagctgagaattgagacccagaagcagaccctgaatgccagagatgagagcatcaagaagctgctggagatgctgcagagcaagggcctgagcgccaaggccacagaggaggaccacgagaggacccggcggctggccgaggccgagatgcacgtgcaccacctggagagcctgctggagcagaaggagaaggagaacagcatgctgcgggaggagatgcacagaagatttgaaaatgccccagacagcgccaagaccaaggccctgcagaccgtcatcgagatgaaggacagcaagatcagctccatggagcggggcctgcgggacctggaggaggagatccagatgctgaagagcaatggagccctgagcacagaggagcgggaggaggagatgaagcagatggaggtgtaccgcagccacagcaagttcatgaagaacaagattggccaggtgaagcaggagctgagcaggaaggacacagagctgctggccctgcagaccaagctggagaccctgaccaaccagttcagtgacagcaagcagcacatcgaggtgctgaaggagagcctgacagccaaggagcagagagctgccatcctgcagacagaggtggatgccctgcggctgcggctggaggagaaggagaccatgctgaacaagaagaccaagcagatccaggacatggccgaggagaagggcacccaggccggggagatccatgacctgaaggacatgctggatgtgaaggagaggaaggtgaatgtgctgcagaagaagattgagaacctgcaggagcagctgcgggacaaggagaagcagatgagcagcctgaaggagcgggtgaagagcctgcaggccgacaccaccaacacagacacagccctgaccaccctggaggaggccctggccgagaaggagaggaccatcgagcggctgaaggagcagagggacagagatgagcgggagaagcaggaggagattgacaactacaagaaggacctgaaggacctgaaggagaaggtgtccctgctgcagggcgacctgtctgagaaggaggccagcctgctggacctgaaggagcacgccagcagcctggccagcagcggcctgaagaaggacagccggctgaagaccctggagatcgccctggagcagaagaaggaggagtgcctgaagatggagagccagctgaagaaggcccatgaagctgccctggaggcccgggccagccctgagatgtctgaccgcatccagcacctggagcgggagatcacccgctacaaggatgagagcagcaaggcccaggccgaggtggaccggctgctggagatcctgaaggaggtggagaatgagaagaatgacaaggacaagaagattgctgagctggagagcctgaccagccggcaggtgaaggaccagaacaagaaggtggccaacctgaagcacaaggagcaggtggagaagaagaagagcgcccagatgctggaggaggcccggcggcgggaggacaacctgaatgacagcagccagcagctgcaggacagcctgaggaagaaggatgacagaattgaggagctggaggaggccctgcgggagagcgtgcagatcacagctgagcgggagatggtgctggcccaggaggagagcgcccggaccaatgctgagaagcaggtggaggagctgctgatggccatggagaaggtgaagcaggagctggagagcatgaaggccaagctgagcagcacccagcagagcctggccgagaaggagacccacctgaccaacctgcgggcagagaggaggaagcacctggaggaggtgctggagatgaagcaggaggccctgctggccgccatcagcgagaaggatgccaacatcgccctgctggagctgagcagcagcaagaagaagacccaggaggaggtggccgccctgaagcgggagaaggaccggctggtgcagcagctgaagcagcagacccagaacaggatgaagctgatggctgacaactatgaagatgaccacttcaagagcagccacagcaaccagaccaaccacaagcccagcccagaccaggatgaggaggagggcatctgggcctag

SEQ ID NO: 22431 - DNA, 3138 bp, synthetic construct
  source 1..3138: mol_type = other DNA; note = Synthetic coding sequence
atgctgactgtgcaggtgaagaccagcagcgccatcgagctgcctgacagcctggccttcctgtggatcatccccatgtggtactgtgagggcaaggagctggagaacagcccagacatccacatcgtgcaggccggcaacctgcacagcctgaccatcgccgaggcctttgaggaggacaccggccgctacagctgctttgccagcaacatctacggcacagacagcaccagcgctgagatctacattgaaggagtgagcagcagtgacagcgagggggaccccaacaaggaggagatgaaccgcatccagaagcccaatgaggtgagcagcccccccaccaccagcgctgtgatccccccagctgtgccccaggcccagcacctggtggcccagccccgggtggccaccatccagcagtgccagagccccaccaactacctgcagggcctggatggcaagcccatcatcgccgcccctgtgttcaccaagatgctgcagaacctgagcgccagcgagggccagctggtggtgtttgagtgccgggtgaagggggcccccagccccaaggtggagtggtaccgggagggcaccctgattgaggacagcccagacttccgcatcctgcagaagaggcctgtgtgcatggagcacatcgaggagatctgcaccctggtgattgctgaggtgtttgctgaagattctggctgcttcacctgcacagccagcaacaagtatggcaccgtgagcagcatcgcccagctgcacgtgagaggaaatgaagacctgagcaacaacggcagcctgcacagcgccaacagcaccaccaacctggccgccatcgagccccagcccagccccccccacagcgagccccccagcgtggagcagccccccaagcccaagctggagggcgtgctggtgaaccacaatgagcccaggagcagcagcagaattggcctgcgggtgcacttcaacctgcctgaagatgacaagggcagcgaggccagcagcgaggccggcgtggtgaccacccggcagaccaggccagacagcttccaggagcgcttcaacggccaggccaccaagaccccagagcccagcagccctgtgaaggagcccccacctgtgctggccaagcccaagctggacagcacccagctgcagcagctgcacaaccaggtgctgctggagcagcaccagctgcagaaccccccacccagcagccccaaggagttccccttctccatgacagtgctgaacagcaatgcccctcctgctgtgaccaccagcagcaagcaggtgaaggcccccagcagccagaccttcagcctggcccggcccaagtacttcttccccagcaccaacaccacagctgccaccgtggcccccagcagcagccctgtgttcaccctgagcagcaccccccagaccatccagaggacagtgtccaaggagagcctgctggtgagccaccccagcgtgcagaccaagagccctgggggcctgagcatccagaatgagcccctgcccccaggccccacagagcccaccccaccacccttcaccttcagcatccccagcggcaaccagttccagccccgctgtgtgagccccatccctgtgagccccaccagccgcatccagaaccctgtggccttcctgagctctgtgctgcccagcctgcctgccatcccccccaccaatgccatgggcctgcccaggtctgcccccagcatgcccagccagggcctggccaagaagaacaccaagagcccccagcctgtgaatgatgacaacatccgggagaccaagaatgctgtgatccgggacctgggcaagaagatcaccttcagtgatgtgcggcccaaccagcaggagtacaagatcagcagctttgagcagaggctgatgaatgaaattgagttccggctggagaggacccctgtggatgaaagtgatgatgagatccagcatgatgagatccccaccgggaagtgcatcgcccccatctttgacaagaggctgaagcacttccgggtgacagagggcagccctgtgaccttcacctgcaagatcgtgggcatccctgtgcccaaggtgtactggttcaaggatggcaagcagatcagcaagagaaatgagcactgcaagatgaggcgggagggagatggcacctgcagcctgcacatcgagagcaccaccagtgatgatgatggcaactacaccatcatggccgccaacccccagggccgcatcagctgcagcggccacctgatggtgcagagcctgcccatccgcagccggctgaccagcgctggccagagccaccggggccgcagccgggtgcaggagcgggacaaggagcccctgcaggagcgcttcttccggccccacttcctgcaggcccctggggacatggtggcccacgagggccgcctgtgccgcctggactgcaaggtgtctggcctgcccccacctgagctgacctggctgctgaatggccagcctgtgctgcctgatgccagccacaagatgctggtgcgggagactggagtgcacagcctgctgattgaccccctgacccagagagatgctggcacctacaagtgcatcgccaccaacaagacaggccagaacagcttcagcctggagctgtctgtggtggccaaggaggtgaagaaggcccctgtgatcctggagaagctgcagaactgtggggtgcctgagggccaccctgtgcggctggagtgccgggtgattggcatgcctcctcctgtgttctactggaagaaggacaatgagaccatcccctgcacccgggagcgcatctccatgcaccaggacaccaccggctacgcctgcctgctgatccagcctgccaagaagagtgatgctggctggtacaccctgagcgccaagaatgaagctggcatcgtgtcctgcacagcccggctggacatctatgcccagtggcaccaccagatccccccacccatgtctgtgcggcccagcggcagccgctatggcagcctgaccagcaagggcctggacatcttcagcgccttcagctccatggagagcaccatggtgtacagctgcagcagccgctctgtggtggagagtgatgagctgtag

SEQ ID NO: 22432 - DNA, 72 bp, synthetic construct
  source 1..72: mol_type = other DNA; note = Synthetic coding sequence
gtgcggctggcctggggctttgtgtctgccctgggcagcttccacacagctgaccctgagggcgccgcctag

SEQ ID NO: 22433 - DNA, 1608 bp, synthetic construct
  source 1..1608: mol_type = other DNA; note = Synthetic coding sequence
atggaggcccccaccgtggagaccccaccagaccccagcccccccagcgccccagccccagccctggtgcccctgcgggccccagatgtggcccggctgcgggaggagcaggagaaggtggtgaccaactgccaggagcgcatccagcactggaagaaggtggacaatgactacaatgccctgcgggagcggctgagcaccctgcctgacaagctgagctacaacatcatggtgcccttcggcccctttgccttcatgcctgggaagctggtgcacaccaatgaggtgacagtgctgctgggggacaactggtttgccaagtgcagcgccaagcaggccgtgggcctggtggagcacaggaaggagcacgtgaggaagaccattgatgacctgaagaaggtgatgaagaactttgagagccgggtggagttcacagaggacctgcagaagatgtctgatgctgctggggacatcgtggacatccgggaggagatcaagtgtgactttgagttcaaggccaagcacagaattgcccacaagccccacagcaagcccaagaccagtgacatctttgaagctgacatcgccaatgatgtgaagagcaaggacctgctggccgacaaggagctgtgggcccggctggaggagctggagcggcaggaggagctgctgggggagctggacagcaagccagacacagtgattgccaatggagaggacaccaccagcagcgaggaggagaaggaggacaggaacaccaacgtgaatgccatgcaccaggtgacagacagccacaccccctgccacaaggatgtggccagcagcgagcccttcagcggccaggtgaacagccagctgaactgcagcgtgaatggcagcagcagctaccacagtgatgatgatgatgatgatgatgatgatgatgatgatgacaacattgatgatgatgatggagacaatgaccacgaggccctgggcgtgggggacaacagcatccccaccatctacttcagccacacagtggagcccaagagggtgcgcatcaacacaggcaagaacaccaccctgaagttcagcgagaagaaggaggaggccaagaggaagaggaagaacagcactggaagtggccacagcgcccaggagctgcccaccatccgcaccccagctgacatctaccgggcctttgtggatgtggtgaatggagaatatgtgcccaggaagagcatcctgaagagccgcagccgggagaacagcgtgtgcagcgacaccagcgagagcagcgctgctgagtttgatgaccggcggggcgtgctgcggagcatcagctgtgaggaggccacctgcagcgacaccagcgagagcatcctggaggaggagccccaggagaaccagaagaagctgctgcccctgtctgtgaccccagaggccttcagcggcaccgtcatcgagaaggagtttgtgagccccagcctgaccccacctccagccatcgcccacccagccctgcccaccatccctgagaggaaggaggtgctgctggaggccagcgaggagaccgggaagagggtgtccaagttcaaggccgcccggctgcagcagaaggactag

SEQ ID NO: 22434 - DNA, 1731 bp, synthetic construct
  source 1..1731: mol_type = other DNA; note = Synthetic coding sequence
atggagggcctgcggaggagaagaggccgggaggccggccccccccagcccatggtgcccctggccgtggagaaccaggccggcggggagggcgctggaggagagctgggcatcagcctgaacatgtgcctgctgggcgccctggtgctgctgggcctgggcgtgctgctcttcagcggcggcctgtctgagagcgagaccggccccatggaggaggtggagcggcaggtgctgcctgaccctgaggtgctggaggccgtgggggaccggcaggacggcctgcgggagcagctgcaggcccctgtgcccccagacagcgtgcccagcctgcagaacatgggcctgctgctggacaagctggccaaggagaaccaggacatccggctgctgcaggcccagctgcaggcccagaaggaggagctgcagagcctgatgcaccagcccaagggcctggaggaggagaatgcccagctgcggggggccctgcagcagggcgaggccttccagagggccctggagagcgagctgcagcagctgcgggcccggctgcagggcctggaggccgactgtgtgcggggcccagatggagtgtgcctgagcggcggccggggcccccagggcgacaaggccatccgggagcagggcccccgggagcaggagcctgagctgtccttcctgaagcagaaggagcagctggaggccgaggcccaggccctgcggcaggagctggagcggcagaggcggctgctgggctctgtgcagcaggacctggagaggagcctgcaggatgccagcagaggagaccctgcccacgccggcctggccgagctgggccaccggctggcccagaagctgcagggcctggagaactggggccaggaccccggggtgtctgccaatgccagcaaggcctggcaccagaagagccacttccagaacagccgggagtggagcggcaaggagaagtggtgggatggccagagggacaggaaggccgagcactggaagcacaagaaggaggagagcggccgggagaggaagaagaactggggcggccaggaggaccgggagcctgctggccgctggaaggagggccggccccgggtggaggagagcggcagcaagaaggagggcaagaggcagggccccaaggagccccccaggaagagcggcagcttccacagcagcggggagaagcagaagcagccccgctggagggagggcaccaaggacagccatgaccccctgcccagctgggccgagctgctgcggcccaagtaccgggccccccagggctgcagcggcgtggatgaatgtgcccggcaggagggcctgaccttcttcggcacagagctggcccctgtgcggcagcaggagctggccagcctgctgcggacctacctggcccggctgccctgggccggccagctgaccaaggagctgcccctgagccctgccttcttcggggaggatggcatcttcagacatgaccggctgcgcttccgggactttgtggatgccctggaggacagcctggaggaggtggccgtgcagcagacaggagatgatgatgaggtggatgactttgaggacttcatcttcagccacttcttcggggacaaggccctgaagaagaggtctgggaagaaggacaagcacagccagagccccagggctgctggcccccgggagggccacagccacagccaccaccaccaccaccggggctag

SEQ ID NO: 22435 - DNA, 2244 bp, synthetic construct
  source 1..2244: mol_type = other DNA; note = Synthetic coding sequence
atggccaagtacaacacaggaggcaaccccacagaagatgtgtctgtgaacagccggcccttccgggtgacaggccccaacagcagcagcggcatccaggccaggaagaacctcttcaacaaccagggcaatgccagccccccagctggccccagcaatgtgcccaagtttggcagccccaagccccctgtggccgtgaagcccagcagcgaggagaagccagacaaggagcccaagccacccttcctgaagcccaccggggccggccagcgcttcggcaccccagccagcctgaccacccgggaccctgaggccaaggtgggcttcctgaagcctgtgggccccaagcccatcaacctgcccaaggaggacagcaagcccaccttcccctggcccccaggcaacaagcccagcctgcacagcgtgaaccaggaccatgacctgaagcccctgggccccaagagcggccccaccccacccaccagtgaaaatgagcagaagcaggccttccccaagctgactggagtgaagggcaagttcatgtctgccagccaggacctggagcccaagcccctcttccccaagccagccttcggccagaagccacccctgagcacagagaacagccatgaagatgagagccccatgaagaatgtgagcagcagcaagggcagccctgcccccctgggcgtgcgcagcaagagcggccccctgaagccagccagagaagattctgagaacaaggaccatgctggggagatcagcagcctgcccttccctggggtggtgctgaagccagctgccagcagaggaggccctggcctgagcaagaatggagaggagaagaaggaggacaggaagattgatgctgccaagaacaccttccagagcaagatcaaccaggaggagctggccagcggcaccccaccagcccgcttccccaaggcccccagcaagctgactgtgggcggcccctggggccagagccaggagaaggagaagggggacaagaacagcgccacccccaagcagaagcccctgcccccactcttcaccctgggccccccaccacccaagcccaacagacctccaaatgtggacctgaccaagttccacaagaccagcagcggcaacagcaccagcaagggccagaccagctacagcaccaccagcctgcccccacctccacccagccacccagccagccagccccccctgcctgccagccaccccagccagccccctgtgcccagcctgccccccaggaacatcaagcccccatttgacctgaagagccctgtgaatgaagacaaccaggatggagtgacccacagtgatgtggtgatccccctggaccacgagcaggacagcgagggggagacctatgaagatattgaggccagcaaggagcgggagaagaagcgggagaaggaggagaagaagaggctggagctggagaagaaggagcagaaggagaaggagaagaaggagcaggagatcaagaagaagttcaagctgaccggccccatccaggtgatccacctggccaaggcctgctgtgatgtgaagggcggcaagaatgagctgtccttcaagcagggcgagcagatcgagatcatccgcatcacagacaaccctgagggcaagtggctgggccgcacagcccggggcagctatggctacatcaagaccacagctgtggagattgattatgacagcctgaagctgaagaaggacagcctgggcgcccccagccggcccattgaagatgaccaggaggtgtatgatgatgtggccgagcaggatgacatcagcagccacagccagagcggcagcggcggcatcttccccccacctccagatgatgacatctatgatggcatcgaggaggaggatgctgatgatggcagcaccctgcaggtgcaggagaagagcaacacctggagctggggcatcctgaagatgctgaagggcaaggatgacaggaagaagagcatccgggagaagcccaaggtgtctgacagcgacaacaatgaaggcagcagcttccctgccccacccaagcagctggacatgggagatgaggtgtatgatgatgtggacaccagtgacttccctgtgtcctctgctgagatgagccagggcaccaacgtgggcaaggccaagacagaggagaaggacctgaagaagctgaagaagcaggagaaggaggagaaggacttcaggaagaagttcaagaagtag

SEQ ID NO: 22436 - DNA, 1566 bp, synthetic construct; identical to SEQ ID NO: 21571
  source 1..1566: mol_type = other DNA; note = Synthetic coding sequence

SEQ ID NO: 22437 - DNA, 1710 bp, synthetic construct
  source 1..1710: mol_type = other DNA; note = Synthetic coding sequence
atgctgcgggacatgacaggcctgccccacaacagaaaatgttttgactgtgaccagaggggccccacctacgtgaacatgacagtgggcagctttgtgtgcaccagctgcagcggcagcctgcggggcctgaaccccccccaccgggtgaagagcatctccatgaccaccttcacccagcaggagattgagttcctgcagaagcatggaaatgaggtgtgcaagcagatctggctgggcctgtttgatgacaggagcagcgccatcccagacttccgggacccccagaaggtgaaggagttcctgcaggagaagtatgagaagaagcgctggtacgtgcccccagagcaggccaaggtggtggcctctgtgcacgccagcatcagcggcagcagcgccagcagcaccagcagcaccccagaggtgaagcccctgaagagcctgctgggggacagcgcccccaccctgcacctgaacaagggcacccccagccagagccctgtggtgggccgcagccagggccagcagcaggagaagaagcagtttgacctgctgagtgacctgggcagtgacatctttgctgccccagccccccagagcacagccacagccaactttgccaactttgcccacttcaacagccacgccgcccagaacagcgccaatgctgactttgccaactttgatgccttcggccagagcagcggcagcagcaactttggaggcttccccacagccagccacagccccttccagccccagaccacagccttcaggatgctgagcagcagctgcagctttggagagttcaccagcgccttccccctgcaggccacccacagcggcagcgctgcctctgtgaatgccaactttgcccactttgacaacttccccaagagcagcagcgctgactttggcaccttcaacaccagccagagccaccagacagccagcgctgtgtccaaggtgtccaccaacaaggccggcctgcagacagctgacaagtatgctgccctggccaacctggacaacatcttctctgctggccagggcggggaccagggcagcggcttcggcaccaccgggaaggcccctgtgggctctgtggtgtctgtgcccagccagagcagcgccagcagtgacaagtatgctgccctggccgagctggacagcgtcttcagcagcgctgccaccagcagcaatgcctacaccagcaccagcaatgccagcagcaatgtgtttggcaccgtgcctgtggtggccagcgcccagacccagcctgccagcagctctgtgcctgccccctttggagccacccccagcaccaacccctttgtggccgctgctggccccagcgtggccagcagcaccaaccccttccagaccaatgcccggggggccacagctgccaccttcggcacagcctccatgtccatgcccactggatttggcaccccagccccctacagcctgcccaccagcttcagcggcagcttccagcagcctgccttccctgcccaggccgccttcccccagcagacagccttcagccagcagcccaatggatttgctgccttcggccagaccaagcctgtggtgacccccttcggccaggtggccgccgccggcgtgagcagcaaccccttcatgactggagcccccaccggccagttccccaccggcagcagcagcaccaaccccttcctgtag

SEQ ID NO: 22438 - DNA, 2007 bp, synthetic construct
  source 1..2007: mol_type = other DNA; note = Synthetic coding sequence
atgagcaagctggccgccgcccacagaggagccatccgggccctgcagatgtttgtgacccagttcacagacagaggagagcaccccctgcctgcccgctgcaaggagctgggcagcctcatccggcagctgagcctgtgcagcgtgaagctggatgctgaccccagcgtgcctgatgtggtgattgacatcctgcagcagatcgaggccctggagagcctgctggagaagaagctgagccccaagaaggtgaagaagtgcttcagcgagatccgcagccgcttccccatcggcagccagaaggccctggagcgctggcccagcaccagccccaagggggagcggcggcccctgacagccaaggacaccttcccccaggagaccagccggcccagcgtggccaagcagctgctggccgacaagtaccagcctgacacagagctgcctgagacccagaggctgcagagcgagctggatgtgctggatgctgacatcgtgctggaggagggccccttcatcctggaccagagcgccagcttcaaggatgaggtgctggccgtggccaagaccaaggccggcaagaagaagcctgtgacagaaaatgtgcccttcaggaagaaggacaccctggccccagcccggcagcagggcctgaggaaggccgagcggggccggcagagccagccccacagcaagagccgggtgcagcagaccaccgtgagcagccggctgaagatgaaccggcagcctgtgaaggacaggaaggccccctggatcccccccaaccccaccagccccccagccagccccaagtgtgccgcctggctgaaggtgaagaccagccccagagatgccaccaaggagcccctgcagcaggaggacccccaggaggagagccacctgaccggggctgtggagcatgaagctgcccggctggcctggctggatgctgagaccagcaagaggctgaaggagctggaggagctgaaggccaaggagattgacagcatgcagaagcagaggctggactggctggatgctgagaccagcaggaggaccaaggagctgaatgagctgaaggccgaggagatgtaccgcctgcagcagctgtctgtgtctgccacccacctggccgacaaggtggaggaggccgtgctggaccggctgaagcccctgctggtgaaggcccagagggtgaacagcaccacagaggccaacatccacctgaaggatggcagctctgtgaacacagccaaggcccagcctgcccaggaggtggccgctgtggactttgagagcaacaacatccggcagctggatgacttcctggaggactgtgccagcgagctgtgggccgtgacccacgccaagatcctgggcagcgagaccctggccaccgtggaggacagcaaggacagcccagacctggagatcatgatgaggaggatggaggagatggagaagtaccaggagagcgtgcggcagcgctacaacaagatcgcctatgctgacccccggctgtggatgcaggaggagaacaatgaccagaagatcagcgccatcagcgagaagcccctgagcccccaccccatccgcatcaccaagacagtggacaggaaggaccctgctgtgaacatcatgctggagcggccctgcaatggaaacagcctggatgagagcgtgggcacagaggagggcagcgagaagcgggaggcccccctgctgagcctggccgaggacagccagcagaaggagggccgggcccccctgtttgtgcccccaggcatgcagcacagcatcggggactactgcagcagatttgagcagtacctgcgcatcatcagccatgaggccgtgggcagcttcaacccctggctgattgctgagagcttcagcgaggagctggtggatgaggccctgggcgctgtggccgctgagctgcaggacatgtgtgaggactatgcagaggccgtgttcaccagcgagttcctggaggccgccacctag

SEQ ID NO: 22439 - DNA, 3612 bp, synthetic construct
  source 1..3612: mol_type = other DNA; note = Synthetic coding sequence
atgcctgccagaattggctactatgaaattgacaggaccatcggcaagggcaactttgctgtggtgaagagggccacccacctggtgaccaaggccaaggtggccatcaagatcatcgacaagacccagctggatgaggagaacctgaagaagatcttccgggaggtgcagatcatgaagatgctgtgccacccccacatcatccggctgtaccaggtgatggagacagagaggatgatctacctggtgacagaatatgccagcggcggggagatctttgaccacctggtggcccacggccgcatggccgagaaggaggcccggaggaagttcaagcagatcgtgacagctgtgtacttctgccactgcaggaacatcgtgcaccgggacctgaaggccgagaacctgctgctggatgccaacctgaacatcaagattgctgactttggcttcagcaacctcttcaccccaggccagctgctgaagacctggtgtggcagccccccctatgctgcccctgagctgtttgagggcaaggagtatgatggccccaaggtggacatctggagcctgggcgtggtgctgtatgtgctggtgtgtggggccctgccctttgatggcagcaccctgcagaacctgcgggcccgggtgctgagcggcaagttccgcatccccttcttcatgagcacagaatgtgagcacctgatccgccacatgctggtgctggaccccaacaagaggctgtccatggagcagatctgcaagcacaagtggatgaagctgggagatgctgaccccaactttgaccggctgattgctgagtgccagcagctgaaggaggagcggcaggtggaccccctgaatgaagatgtgctgctggccatggaggacatgggcctggacaaggagcagaccctgcaggccgagcaggccggcacagccatgaacatctctgtgccccaggtgcagctgatcaaccctgagaaccagatcgtggagccagatggcaccctgaacctggacagtgatgaaggagaggagcccagccctgaggccctggtgcgctacctgtccatgaggaggcacacagtgggcgtggccgaccccaggacagaggtgatggaggacctgcagaagctgctgcccggcttccctggggtgaacccccaggcccccttcctgcaggtggccccaaatgtgaacttcatgcacaacctgctgcccatgcagaacctgcagcccaccggccagctggagtacaaggagcagagcctgctgcagccccccaccctgcagctgctgaatggcatgggccccctgggccggcgggccagtgatggaggagccaacatccagctgcacgcccagcagctgctgaagaggccccggggccccagccccctggtgaccatgaccccagctgtgcctgctgtgacccctgtggatgaggagagcagtgatggagagccagaccaggaggccgtgcagcgctacctggccaacagaagcaagaggcacaccctggccatgaccaaccccacagctgagatccccccagacctgcagaggcagctgggccagcagcccttccgcagccgggtgtggccaccccacctggtgcctgaccagcacaggagcacctacaaggacagcaacaccctgcacctgcccacagagcgcttcagccctgtgcggcgcttcagtgatggagctgccagcatccaggccttcaaggcccacctggagaagatgggcaacaacagcagcatcaagcagctgcagcaggagtgtgagcagctgcagaagatgtatggaggccagattgatgagaggaccctggagaagacccagcagcagcacatgctgtaccagcaggagcagcaccaccagatcctgcagcagcagatccaggacagcatctgccccccccagcccagcccccccctgcaggccgcctgtgagaaccagcctgccctgctgacccaccagctgcagaggctgcgcatccagcccagcagccccccacccaaccaccccaacaaccacctgttccggcagcccagcaacagccccccacccatgagcagcgccatgatccagccccacggggccgccagcagcagccagttccagggcctgcccagccgcagcgccatcttccagcagcagcctgagaactgcagcagcccccccaacgtggccctgacctgcctgggcatgcagcagcctgcccagagccagcaggtgaccatccaggtgcaggagcctgtggacatgctgagcaacatgcctggaacagctgctggcagcagcggccggggcatcagcatcagccccagcgctggccagatgcagatgcagcacaggaccaacctgatggccaccctgtcctatggccaccggcccctgagcaagcagctgtctgctgacagcgctgaggcccacagcgcccaccagcagcccccccactacaccaccagcgccctgcagcaggccctgctgagccccaccccaccagactacaccaggcaccagcaggtgccccacatcctgcagggcctgctgagccccaggcacagcctgaccggccacagcgacatccggctgcccccaacagaatttgcccagctgatcaagaggcagcagcagcagaggcagcagcagcagcagcagcagcagcagcaggagtaccaggagctgttccgccacatgaaccagggagatgctggcagcctggcccccagcctgggcggccagagcatgacagagcggcaggccctgagctaccagaatgctgacagctaccaccaccacaccagcccccagcacctgctgcagatccgggcccaggagtgtgtgtcccaggccagcagccccaccccacctcatggctacgcccaccagcctgccctgatgcacagcgagagcatggaggaggactgcagctgtgagggcgccaaggatggcttccaggacagcaagagcagcagcaccctgaccaagggctgccacgacagccccctgctgctgagcactggaggccctggggaccctgagagcctgctgggcaccgtgtcccatgcccaggagctgggcatccacccctacggccaccagcccacagctgccttcagcaagaacaaggtgcccagccgggagcccgtcatcggcaactgcatggacaggagcagccctggccaggccgtggagctgcctgaccacaacggcctgggctacccagcccggcccagcgtgcatgagcaccaccggccccgggccctgcagaggcaccacaccatccagaacagtgatgatgcctacgtgcagctggacaacctgcccggcatgagcctggtggccggcaaggccctgagcagcgccaggatgtctgatgctgtgctgagccagagcagcctgatgggcagccagcagttccaggatggagaaaatgaggagtgtggggccagcctgggcggccacgagcacccagacctgagtgatggcagccagcacctgaacagcagctgctaccccagcacctgcatcacagacatcctgctgagctacaagcaccctgaggtgtccttctccatggagcaggccggcgtgtag

SEQ ID NO: 22440 - DNA, 2046 bp, synthetic construct
  source 1..2046: mol_type = other DNA; note = Synthetic coding sequence
atgattgagaagatgcagggcagcaggatggatgagcagcgctgcagcttccccccacccctgaagacagaggaggactacatcccctaccccagcgtgcatgaggtgctgggccgggagggccccttccccctcatcctgctgccccagtttggaggctactggattgagggcaccaaccacgagatcaccagcatccctgagacagagcccctgcagagccccaccaccaaggtgaagctggagtgcaaccccacagcccgcatctacaggaagcacttcctgggcaaggagcacttcaactactacagcctggatgctgccctgggccacctggtgttcagcctgaagtatgatgtgattggagaccaggagcacctgcggctgctgctgcggaccaagtgcaggacctaccatgatgtgatccccatcagctgcctgacagagttccccaacgtggtgcagatggccaagctggtgtgtgaagatgtgaatgtggaccgcttctaccctgtgctgtaccccaaggccagccggctgattgtgacctttgatgaacatgtgatcagcaacaacttcaagtttggagtcatctaccagaagctgggccagaccagcgaggaggagctgttcagcaccaatgaggagagccctgcctttgtggagttcctggagttcctgggccagaaggtgaagctgcaggacttcaagggcttccggggcggcctggatgtgacccacggccagacaggaacagagagcgtgtactgcaacttcaggaacaaggagatcatgtttcatgtgtccaccaagctgccctacacagaaggagatgcccagcagctgcagaggaagaggcacatcggaaatgacatcgtggccgtggtgttccaggatgagaacaccccatttgtgcctgacatgattgccagcaacttcctgcacgcctacgtggtggtgcaggccgagggcggcggcccagatggccccctgtacaaggtgtctgtgacagccagagatgatgtgcccttctttggaccacccctgcctgaccctgctgtgttcagaaaaggacctgagttccaggagttcctgctgaccaagctgatcaatgcagaatatgcctgctacaaggccgagaagtttgccaagctggaggagaggaccagggctgccctgctggagaccctgtatgaggagctgcacatccacagccagagcatgatgggcctgggcggagatgaggacaagatggagaatggcagcggcggcggcggcttctttgagagcttcaagagggtcatccgcagccgcagccagagcatggatgccatgggcctgagcaacaagaagcccaacacagtgtccaccagccacagcggcagctttgcccccaacaacccagacctggccaaggccgccggcatcagcctgctgatccctgggaagagcgccagccgcttcggccggcggggcagcgccatcggcattggaacagtggaggagagcctgattgtgcctgggaagagccccaccaggaagaagagcggccccttcggcagccgccgcagcagcgccatcggcatcgagaacatccaggaggtgcaggagaagcgggagagccccccagctggccagaagaccccagattctggccacgtgtcccaggagcccaagtctgagaacagcagcacccagagcagccctgagatgcccaccaccaagaacagagctgagacagctgcccagagagctgaggccctgaaggacttcagccgcagcagcagcagcgccagcagctttgcctctgtggtggaggagacagagggcgtggatggagaggacaccggcctggagagcgtgagcagcagcggcaccccccacaagagggacagcttcatctacagcacctggctggaggacagcgtgtccaccaccagcggcggcagcagcccagatgctgggaagctgggggaccctgcctgcccagagatcaagatccagctggaggccagcgagcagcacatgccccagctgggctgctag

SEQ ID NO: 22441 - DNA, 675 bp, synthetic construct
  source 1..675: mol_type = other DNA; note = Synthetic coding sequence
atgtctgtgggctacgccaacggcatccgggtgatgtccatgacccacactggagagcccggcttcatgctgtacatccccatcgagtatgccctgcacgtgtacaatgaggtgatgtctgtgggccagaagtatggcatcagaaatgccggctactatgccctgcggagcctgcgcatcgagaagttctttgccttctggggccaggacatcaacaacctgaccacccccctggagtgtggccgggagagccgggtgaagctggagaagggcatggacttcatcggcagagatgccctgctgcagcagaagcagaatggagtgtacaagaggctgaccatgttcatcctggatgaccatgacagcgacctggacctgtggccctggtggggcgagcccatctacagaaatggccagtatgtgggcaagaccaccagcagcgcctacagctacagcctggagcggcacgtgtgcctgggctttgtgcacaacttctctgaagatactggagaggagcaggtggtgacagctgacttcatcaacagaggagaatatgaaattgatattgctggctaccgcttccaggccaaggccaagctgtaccctgtggccagcctcttcacccagaagaggaggaaggatgacatggagctgagtgacctgcacggcaagtag

SEQ ID NO: 22442 - DNA, 1590 bp, synthetic construct
  source 1..1590: mol_type = other DNA; note = Synthetic coding sequence
atgcacttcagcggcctggaggaggccgtgtacagaaacatccaggcctgcaaggagctggcccagaccaccaggacagcctacggccccaacggcatgaacaagatggtgatcaaccacctggagaagctgtttgtgaccaatgatgctgccaccatcctgcgggagctggaggtgcagcaccctgctgccaagatgattgtgatggccagccacatgcaggagcaggaggtgggagatggcaccaactttgtgctggtgtttgctggggccctgctggagctggccgaggagctgctgcgcatcggcctgtctgtgtctgaggtgattgagggctatgaaattgcctgcaggaaggcccacgagatcctgcccaacctggtgtgctgcagcgccaagaacctgcgggacattgatgaggtgagcagcctgctgcggaccagcatcatgagcaagcagtatggaaatgaggtgttcctggccaagctgattgcccaggcctgtgtgtccatcttcccagattctggccacttcaacgtggacaacatccgggtgtgcaagatcctgggcagcggcatcagcagcagctctgtgctgcacggcatggtgttcaagaaggagacagaaggagatgtgacctctgtgaaggatgccaagattgctgtgtacagctgcccctttgatggcatgatcacagagaccaagggcaccgtgctgatcaagacagctgaggagctgatgaacttcagcaaaggagaggagaacctgatggatgcccaggtgaaggccatcgctgacacaggagccaacgtggtggtgactggaggcaaggtggccgacatggccctgcactacgccaacaagtacaacatcatgctggtgcggctgaacagcaagtgggacctgcggcggctgtgcaagacagtgggcgccacagccctgccccggctgaccccacctgtgctggaggagatgggccactgtgacagcgtgtacctgtctgaggtgggggacacccaggtggtggtgttcaagcatgagaaggaggatggagccatcagcaccatcgtgctgcggggcagcacagacaacctgatggatgacatcgagagagctgtggatgatggagtgaacaccttcaaggtgctgacccgggacaagaggctggtgcctgggggcggggccacagaaattgagctggccaagcagatcaccagctatggagagacctgccccggcctggagcagtatgccatcaagaagtttgctgaggcctttgaggccatcccccgggccctggctgaaaattctggagtgaaggccaatgaggtgatcagcaagctgtatgctgtgcaccaggagggcaacaagaatgtgggcctggacattgaagctgaggtgcctgctgtgaaggacatgctggaggccggcatcctggacacctacctgggcaagtactgggccatcaagctggccaccaatgctgctgtgacagtgctgcgggtggaccagatcatcatggccaagccagctgggggccccaagccacccagcggcaagaaggactgggatgatgaccagaatgactag

SEQ ID NO: 22443 - DNA, 2193 bp, synthetic construct; identical to SEQ ID NO: 18385
  source 1..2193: mol_type = other DNA; note = Synthetic coding sequence

SEQ ID NO: 22444 - DNA, 2271 bp, synthetic construct
  source 1..2271: mol_type = other DNA; note = Synthetic coding sequence
atggtggcccctgtgctggagaccagccacgtgttctgctgccccaacagagtgcggggcgtgctgaactggagcagcggcccccggggcctgctggccttcggcaccagctgcagcgtggtgctgtatgaccccctgaagagggtggtggtgaccaacctgaatggccacacagcccgggtgaactgcatccagtggatctgcaagcaggacggcagccccagcacagagctggtgtctgggggcagtgacaaccaggtgatccactgggagattgaggacaaccagctgctgaaggctgtgcacctgcagggccacgagggccctgtgtatgctgtgcatgctgtgtaccagaggaggaccagtgaccctgccctgtgcaccctcatcgtgtctgctgctgctgacagcgctgtgcggctgtggagcaagaagggccctgaggtgcccatcctggcctgtggaaatgatgactgccgcatccacatctttgcccagcagaatgaccagttccagaaggtgctgagcctgtgtggccacgaggactggatccggggcgtggagtgggccgccttcggccgggacctcttcctggccagctgcagccaggactgcctgatccgcatctggaagctgtacatcaagagcaccagcctggagacccaggatgatgacaacatccggctgaaggagaacaccttcaccattgaaaatgaatctgtgaagatcgcctttgctgtgaccctggagaccgtgctggccggccacgagaactgggtgaatgctgtgcactggcagcctgtgttctacaaggatggagtgctgcagcagcctgtgcggctgctgagcgcctccatggacaagaccatgatcctgtgggccccagatgaggagagcggcgtgtggctggagcagcgggagtggaccccagagatcgtcatcagcggccactttgatggagtgcaggacctggtgtgggaccctgagggggagttcatcatcaccgtgggcacagaccagaccacccggctgtttgccccctggaagaggaaggaccagagccaggtgacctggcatgaaattgcccggccccagatccacggctatgacctgaagtgcctggccatgatcaaccgcttccagtttgtgtctggagcagatgagaaggtgctgcgggtcttcagcgcccccaggaactttgtggagaacttctgtgccatcaccggccagagcctgaaccacgtgctgtgcaaccaggacagcgacctgcctgagggcgccaccgtgcctgccctgggcctgagcaacaaggctgtgttccagggcgacatcgccagccagcccagtgatgaggaggagctgctgaccagcacaggctttgagtaccagcaggtggccttccagcccagcatcctgacagagcccccaacagaggaccacctgctgcagaacaccctgtggccagaggtgcagaagctgtatggccacggctatgagatcttctgtgtgacctgcaacagcagcaagaccctgctggccagcgcctgcaaggccgccaagaaggagcacgccgccatcatcctgtggaacaccacctcctggaagcaggtgcagaacctggtgttccacagcctgactgtgacccagatggccttcagccccaatgagaagttcctgctggccgtgtcccgggacaggacctggagcctgtggaagaagcaggacaccatcagccctgagtttgagcctgtgttcagcctgtttgccttcaccaacaagatcacctctgtgcacagccgcatcatctggagctgtgactggagcccagacagcaagtacttcttcaccggcagccgggacaagaaggtggtggtgtggggagaatgtgacagcacagatgactgcatcgagcacaacatcggcccctgcagctctgtgctggatgtgggcggcgctgtgacagctgtgtctgtgtgccctgtgctgcaccccagccagcgctacgtggtggccgtgggcctggagtgtgggaagatctgcctgtacacctggaagaagacagaccaggtgcctgagatcaatgactggacccactgtgtggagaccagccagagccagagccacaccctggccatcaggaagctgtgctggaagaactgcagcggcaagacagagcagaaggaggccgagggcgctgagtggctgcactttgccagctgtggggaggaccacacagtgaagatccaccgggtgaacaagtgtgccctgtag

SEQ ID NO: 22445 - DNA, 1272 bp, synthetic construct
  source 1..1272: mol_type = other DNA; note = Synthetic coding sequence
atgaaccggcagcctgtgaaggacaggaaggccccctggatcccccccaaccccaccagccccccagccagccccaagtgtgccgcctggctgaaggtgaagaccagccccagagatgccaccaaggagcccctgcagcaggaggacccccaggaggagagccacctgactggagctgtggagcacgaggccgcccggctggcctggctggatgctgagaccagcaagaggctgaaggagctggaggagctgaaggccaaggagattgacagcatgcagaagcagaggctggactggctggatgctgagaccagcaggaggaccaaggagctgaatgagctgaaggccgaggagatgtaccgcctgcagcagctgtctgtgtctgccacccacctggccgacaaggtggaggaggccgtgctggaccggctgaagcccctgctggtgaaggcccagagggtgaacagcaccacagaggccaacatccacctgaaggatggcagctctgtgaacacagccaaggcccagcctgcccaggaggtggccgctgtggactttgagagcaacaacatccggcagctggatgacttcctggaggactgtgccagcgagctgtgggccgtgacccacgccaagatcctgggcagcgagaccctggccaccgtggaggacagcaaggacagcccagacctggagatcatgatgaggaggatggaggagatggagaagtaccaggagagcgtgcggcagcgctacaacaagatcgcctatgctgacccccggctgtggatgcaggaggagaacaatgaccagaagatcagcgccatcagcgagaagcccctgagcccccaccccatccgcatcaccaagacagtggacaggaaggaccctgctgtgaacatcatgctggagcggccctgcaatggaaacagcctggatgaatctgtgggcacagaggagggcagcgagaagcgggaggcccccctgctgagcctggccgaggacagccagcagaaggagggccgggcccccctgtttgtgcccccaggcatgcagcacagcattggagactactgcagcagatttgagcagtacctgcgcatcatcagccatgaagctgtgggcagcttcaacccctggctgattgctgagagcttcagcgaggagctggtggatgaggccctgggcgctgtggccgctgagctgcaggacatgtgtgaagattatgcagaggccgtgttcaccagcgagttcctggaggccgccacctag

SEQ ID NO: 22446 - DNA, 777 bp, synthetic construct
  source 1..777: mol_type = other DNA; note = Synthetic coding sequence
atggcccggctgcaggaggagcacggggaccagctgctgagcatccgctgccagcaccaggagcaggtggaggacctgacagccagccatgatgctgccctgctggagatggagaacaaccacacagtggccatcaccatcctgcaggatgaccatgaccacaaggtgcaggagctgatgagcacccatgagctggagaagaaggagctggaggagaactttgagaagctgcggctgagcctgcaggaccaggtggacaccctgaccttccagagccagagcctgcgggaccgggccaggagatttgaggaggccctgaggaagaacacagaggagcagctggagatcgccctggccccctaccagcacctggaggaggacatgaagagcctgaagcaggtgctggagatgaagaaccagcagatccacgagcaggagaagaagatcctggagctggagaagctggccgagaagaacatcatcctggaggagaagatccaggtgctgcagcagcagaatgaagacctgaaggccagaattgaccagaacacagtggtgacccggcagctgtctgaagaaaatgccaacctgcaggagtatgtggagaaggagacccaggagaagaagaggctgagcaggaccaatgaggagctgctgtggaagctgcagacaggagaccccaccagccccatcaagctgagccccaccagccctgtgtaccggggcagcagcagcggccccagcagccctgcccgggtgtccaccacccccaggtag

SEQ ID NO: 22447 - DNA, 1053 bp, synthetic construct
  source 1..1053: mol_type = other DNA; note = Synthetic coding sequence
atgtgccccaccaccacctggccccggggccgccgctggagcaggaacctgcgggacacccaggccgtgcgccactacaagatctggaggcgggccggcggccgcctgcacctgaatgaagctgtgtccttcctgagcctgcctgagctggtgaactaccaccgggcccagagcctgagccacggcctgcggctggccgccccctgcaggaagcatgagcctgagcccctgccccactgggatgactgggagcggccccgggaggagttcaccctgtgcaggaagctgggcagcggctactttggagaggtgtttgagggcctgtggaaggacagagtgcaggtggccatcaaggtgatcagccgggacaacctgctgcaccagcagatgctgcagagcgagatccaggccatgaagaagctgcggcacaagcacatcctggccctgtatgctgtggtgtctgtgggggaccctgtgtacatcatcacagagctgatggccaagggcagcctgctggagctgctgcgggacagtgatgagaaggtgctgcctgtgtctgagctgctggacatcgcctggcaggtggccgagggcatgtgctacctggagagccagaactacatccaccgggacctggccgccaggaacatcctggtgggggagaacaccctgtgcaaggtgggggactttggcctggcccggctcatcaaggaggatgtgtacctgagccatgaccacaacatcccctacaagtggacagcccctgaggccctgagccggggccactacagcaccaagagtgatgtgtggagctttggcatcctgctgcacgagatgttcagccggggccaggtgccctacccaggcatgagcaaccacgaggccttcctgcgggtggatgctggctacaggatgccctgccccctggagtgcccccccagcgtgcacaagctgatgctgacctgctggtgccgggaccctgagcagaggccctgcttcaaggccctgcgggagcggctgagcagcttcaccagctatgagaaccccacctag

SEQ ID NO: 22448 - DNA, 3480 bp, synthetic construct
  source 1..3480: mol_type = other DNA; note = Synthetic coding sequence
atggtgagcagcagccccagcacccccagcaacatcccccagaagcccagccagcctgctgccaaggagcccagcgccaccccacccatcagcaacctgaccaagacagccagcgagagcatcagcaacctgtctgaggccggcagcatcaagaagggggagcgggagctgaagattggagacagagtgctggtgggcggcaccaaggccggcgtggtgcgcttcctgggggagacagactttgccaagggggagtggtgtggggtggagctggatgagcccctgggcaagaatgatggagctgtggccggcacccgctacttccagtgccagcccaagtatggcctgtttgcccctgtgcacaaggtgaccaagattggcttccccagcaccaccccagccaaggccaaggccaatgctgtgcggcgggtgatggccaccaccagcgccagcctgaagaggagccccagcgccagcagcctgagctccatgagctctgtggccagctctgtgagcagccggcccagcaggacaggcctgctgacagagaccagcagccgctatgccaggaagatcagcggcaccacagccctgcaggaggccctgaaggagaagcagcagcacatcgagcagctgctggccgagcgggacctggagagagctgaggtggccaaggccaccagccacgtgggggagattgagcaggagctggccctggccagagatggccatgaccagcacgtgctggagctggaggccaagatggaccagctgcggaccatggtggaggccgctgaccgggagaaggtggagctgctgaaccagctggaggaggagaagaggaaggtggaggacctgcagttccgggtggaggaggagagcatcaccaagggggacctggagacccagaccaagctggagcacgcccgcatcaaggagctggagcagagcctgctgtttgagaagaccaaggctgacaagctgcagcgggagctggaggacaccagggtggccaccgtgtctgagaagagccgcatcatggagctggagaaggacctggccctgcgggtgcaggaggtggccgagctgcggcggcggctggagagcaacaagccagctggagatgtggacatgagcctgagcctgctgcaggagatcagcagcctgcaggagaagctggaggtgaccaggacagaccaccagcgggagatcaccagcctgaaggagcactttggagcccgggaggagacccaccagaaggagatcaaggccctgtacacagccacagagaagctgagcaaagaaaatgaaagcctgaagagcaagctggagcacgccaacaaggaaaattctgatgtgattgccctgtggaagagcaagctggagacagccatcgccagccaccagcaggccatggaggagctgaaggtgtccttcagcaagggcctgggcacagaaacagctgagtttgctgagctgaagacccagatcgagaagatgaggctggactaccagcacgagattgagaacctgcagaaccagcaggacagcgagcgggccgcccacgccaaggagatggaggccctgcgggccaagctgatgaaggtgatcaaggagaaggagaacagcctggaggccatccgcagcaagctggacaaggccgaggaccagcacctggtggagatggaggacaccctgaacaagctgcaggaggccgagatcaagaaggagaagtttgctgaggccagcgaggaggccgtgtctgtgcagaggtccatgcaggagaccgtgaacaagctgcaccagaaggaggagcagttcaacatgctgagcagtgacctggagaagctgcgggagaacctggccgacatggaggccaagttccgggagaaggatgagcgggaggagcagctgatcaaggccaaggagaagctggagaatgacattgctgagatcatgaagatgtctggggacaacagcagccagctgaccaagatgaatgatgagctgcggctgaaggagagagatgtggaggagctgcagctgaagctgaccaaggccaatgaaaatgccagcttcctgcagaagagcattgaggacatgacagtgaaggccgagcagagccagcaggaggccgccaagaagcatgaggaggagaagaaggagctggagaggaagctgagtgacctggagaagaagatggagaccagccacaaccagtgccaggagctgaaggcccgctatgaaagagccaccagcgagaccaagaccaagcatgaggagatcctgcagaacctgcagaagaccctgctggacacagaggacaagctgaagggggcccgggaggagaacagcggcctgctgcaggagctggaggagctgaggaagcaggccgacaaggccaaggccgcccagacagcagaagatgccatgcagatcatggagcagatgaccaaggagaagacagagaccctggccagcctggaggacaccaagcagaccaatgccaagctgcagaatgagctggacaccctgaaggagaacaacctgaagaatgtggaggagctgaacaagagcaaggagctgctgactgtggagaaccagaagatggaggagttcaggaaggagattgagaccctgaagcaggccgccgcccagaagagccagcagctgagcgccctgcaggaggagaatgtgaagctggccgaggagctgggccgcagcagagatgaggtgaccagccaccagaagctggaggaggagaggtctgtgctgaacaaccagctgctggagatgaagaagcgggagagcaagttcatcaaggatgctgatgaggagaaggccagcctgcagaagagcatcagcatcaccagcgccctgctgacagagaaggatgctgagctggagaagctgagaaatgaggtgacagtgctgcggggagaaaatgccagcgccaagagcctgcacagcgtggtgcagaccctggagagtgacaaggtgaagctggagctgaaggtgaagaacctggagctgcagctgaaggagaacaagaggcagctgagcagcagcagcggcaacacagacacccaggctgatgaagatgagcgggcccaggagagccagaaccagattgacttcctgaacagcgtgattgtggacctgcagaggaagaaccaggacctgaagatgaaggtggagatgatgtctgaggccgccctgaatggaaatggagatgacctgaacaactatgacagtgatgaccaggagaagcagagcaagaagaagcccaggctcttctgtgacatctgtgactgctttgacctgcatgacacagaggactgccccacccaggcccagatgtctgaggaccccccccacagcacccaccacggcagcagaggagaggagcggccctactgtgagatctgtgagatgtttggccactgggccaccaactgcaatgatgatgagaccttctag

SEQ ID NO: 22449 - DNA, 756 bp, synthetic construct
  source 1..756: mol_type = other DNA; note = Synthetic coding sequence
atgaccacagagcagaggaggagcctgcaggccttccaggactacatcaggaagaccctggaccccacctacatcctgagctacatggccccctggttccgggaggaggaggtgcagtacatccaggccgagaagaacaacaagggccccatggaggccgccaccctcttcctgaagttcctgctggagctgcaggaggagggctggttccggggcttcctggatgccctggaccacgccggctacagcggcctgtatgaggccattgaatcctgggacttcaagaagattgagaagctggaggagtaccgcctgctgctgaagaggctgcagcctgagttcaagacccgcatcatccccacagacatcatcagtgacctgtctgaatgtctcatcaaccaggagtgtgaggagatcctgcagatctgcagcaccaagggcatgatggccggggctgagaagctggtggagtgcctgctgcggagtgacaaggagaactggcccaagaccctgaagctggccctggagaaggagaggaacaagttcagcgagctgtggatcgtggagaagggcatcaaggatgtggagacagaggacctggaggacaagatggagaccagtgacatccagatcttctaccaggaggaccctgagtgccagaacctgtctgagaacagctgcccccccagcgaggtgtctgacaccaacctgtacagccccttcaagcccatcaagaagaagaagaagaagaagtag

SEQ ID NO: 22450 - DNA, 3189 bp, synthetic construct; identical to SEQ ID NO: 21531
  source 1..3189: mol_type = other DNA; note = Synthetic coding sequence

SEQ ID NO: 22451 - DNA, 363 bp, synthetic construct
  source 1..363: mol_type = other DNA; note = Synthetic coding sequence
atgtggagcattgaaaatattgcctttggaagtggcggcggcctgctgcagaagctgacccgggacctgctgaactgcagcttcaagtgcagctatgtggtgaccaacggcctgggcatcaacgtgttcaaggaccctgtggccgaccccaacaagaggagcaagaagggccgcctgagcctgcacaggaccccagctggcaactttgtgaccctggaggagggcaagggggacctggaggagtatggccaggacctgctgcacacagtgttcaagaatggcaaggtgaccaagagctacagctttgatgagatcaggaagaatgcccagctgaacatcgagctggaggccgcccaccactag

SEQ ID NO: 22452 - DNA, 936 bp, synthetic construct
  source 1..936: mol_type = other DNA; note = Synthetic coding sequence
atgtaccacctggacaaccaccctgagaagcagttcagcacagatgtgctgaagcaggccatcgagctgagcccagacaaccagtatgtgaaggtgctgctgggcctgaagctgcagaagatgaacaaggaggccgagggggagcagtttgtggaggaggccctggagaagagcccctgccagacagatgtgctgcggtctgctgccaagttctacagaagaaaaggagacctggacaaggccatcgagctgttccagagggtgctggagagcacccccaacaacggctacctgtaccaccagatcggctgctgctacaaggccaaggtgcggcagatgcagaacacaggagagagcgaggccagcggcaacaaggagatgattgaggccctgaagcagtatgccatggactacagcaacaaggccctggagaagggcctgaaccccctgaatgcctacagcgacctggccgagttcctggagacagagtgctaccagacccccttcaacaaggaggtgcctgatgctgagaagcagcagagccaccagcgctactgcaacctgcagaagtacaacgggaagtctgaggacacagctgtgcagcacggcctggagggcctgagcatcagcaagaagagcacagacaaggaggagatcaaggaccagccccagaatgtgtctgagaacctgctgccccagaatgcccccaactactggtacctgcagggcctcatccacaagcagaatggagacctgctgcaggccgccaagtgctatgagaaggagctgggccgcctgctgagagatgcccccagcggcatcggcagcatcttcctgagcgccagcgagctggaggatggcagcgaggagatgggccagggcgctgtgagcagcagcccccgggagctgctgagcaacagcgagcagctgaactag

SEQ ID NO: 22453 - DNA, 3267 bp, synthetic construct
  source 1..3267: mol_type = other DNA; note = Synthetic coding sequence
atgtatggcagcgcccggtctgtgggcaaggtggagcccagcagccagagccctggccgcagcccccggctgcccaggagcccccggctgggccacaggaggaccaacagcactggaggcagcagcggcagctctgtgggcggcggcagcggcaagaccctgtccatggagaacatccagagcctgaatgctgcctatgccaccagcggccccatgtacctgagtgaccatgaaaatgtgggcagcgagacccccaagagcaccatgaccctgggccgcagcggcggccgcctgccctacggcgtgaggatgacagccatgggcagcagccccaacatcgccagcagcggcgtggccagtgacaccatcgcctttggagagcaccacctgccccctgtgtccatggccagcacagtgccccacagcctgcggcaggcccgggacaacaccatcatggacctgcagacccagctgaaggaggtgctgcgggagaatgacctgctgaggaaggatgtggaggtgaaggagagcaagctgagcagctccatgaacagcatcaagaccttctggagccctgagctgaagaaggagcgggccctgaggaaggatgaggccagcaagatcaccatctggaaggagcagtacagagtggtgcaggaggagaaccagcacatgcagatgaccatccaggccctgcaggatgagctgcgcatccagagggacctgaaccagctgttccagcaggacagcagcagcaggactggagagccctgtgtggccgagctgacagaggagaacttccagaggctgcacgccgagcacgagcggcaggccaaggagctgttcctgctgaggaagaccctggaggagatggagctgagaattgagacccagaagcagaccctgaatgccagagatgagagcatcaagaagctgctggagatgctgcagagcaagggcctgagcgccaaggccacagaggaggaccacgagaggacccggcggctggccgaggccgagatgcacgtgcaccacctggagagcctgctggagcagaaggagaaggagaacagcatgctgcgggaggagatgcacagaagatttgaaaatgccccagacagcgccaagaccaaggccctgcagaccgtcatcgagatgaaggacagcaagatcagctccatggagcggggcctgcgggacctggaggaggagatccagatgctgaagagcaatggagccctgagcacagaggagcgggaggaggagatgaagcagatggaggtgtaccgcagccacagcaagttcatgaagaacaagattggccaggtgaagcaggagctgagcaggaaggacacagagctgctggccctgcagaccaagctggagaccctgaccaaccagttcagtgacagcaagcagcacatcgaggtgctgaaggagagcctgacagccaaggagcagagagctgccatcctgcagacagaggtggatgccctgcggctgcggctggaggagaaggagaccatgctgaacaagaagaccaagcagatccaggacatggccgaggagaagggcacccaggccggggagatccatgacctgaaggacatgctggatgtgaaggagaggaaggtgaatgtgctgcagaagaagattgagaacctgcaggagcagctgcgggacaaggagaagcagatgagcagcctgaaggagcgggtgaagagcctgcaggccgacaccaccaacacagacacagccctgaccaccctggaggaggccctggccgagaaggagaggaccatcgagcggctgaaggagcagagggacagagatgagcgggagaagcaggaggagattgacaactacaagaaggacctgaaggacctgaaggagaaggtgtccctgctgcagggcgacctgtctgagaaggaggccagcctgctggacctgaaggagcacgccagcagcctggccagcagcggcctgaagaaggacagccggctgaagaccctggagatcgccctggagcagaagaaggaggagtgcctgaagatggagagccagctgaagaaggcccatgaagctgccctggaggcccgggccagccctgagatgtctgaccgcatccagcacctggagcgggagatcacccgctacaaggatgagagcagcaaggcccaggccgaggtggaccggctgctggagatcctgaaggaggtggagaatgagaagaatgacaaggacaagaagattgctgagctggagcggcaggtgaaggaccagaacaagaaggtggccaacctgaagcacaaggagcaggtggagaagaagaagagcgcccagatgctggaggaggcccggcggcgggaggacaacctgaatgacagcagccagcagctgcaggacagcctgaggaagaaggatgacagaattgaggagctggaggaggccctgcgggagagcgtgcagatcacagctgagcgggagatggtgctggcccaggaggagagcgcccggaccaatgctgagaagcaggtggaggagctgctgatggccatggagaaggtgaagcaggagctggagagcatgaaggccaagctgagcagcacccagcagagcctggccgagaaggagacccacctgaccaacctgcgggcagagaggaggaagcacctggaggaggtgctggagatgaagcaggaggccctgctggccgccatcagcgagaaggatgccaacatcgccctgctggagctgagcagcagcaagaagaagacccaggaggaggtggccgccctgaagcgggagaaggaccggctggtgcagcagctgaagcagcagacccagaacaggatgaagctgatggctgacaactatgaagatgaccacttcaagagcagccacagcaaccagaccaaccacaagcccagcccagaccagatcatccagcccctgctggagctggaccagaacagaagcaagctgaagctgtacatcggccacctgaccaccctgtgccacgaccgggaccccctcatcctgcggggcctgaccccaccagccagctacaacctggatgatgaccaggccgcctgggagaatgagctgcagaagatgacccggggccagctgcaggatgagctggagaagggggagcgggacaatgctgagctgcaggagtttgccaatgccatcctgcagcagattgctgaccactgcccagacatcctggagcaggtggtgaatgccctggaggagagcagctag

SEQ ID NO: 22454 - DNA, 1485 bp, synthetic construct
  source 1..1485: mol_type = other DNA; note = Synthetic coding sequence
atgaagctggtgaacctgtacaagggagctgtgctgtacctgctgcggggcaggaagaccttcctgatccctgtgctcttcaacaactacatcacagctgccctgaagctgctggagaagctgtacaaggtgaacctgaaggtgaagcacgtggagtatgacaccttctacatccctgagatcagcaacctggtggacatccaggaggactacctgatgtggttcctgcaccaggccggcatgaaggcccggcccagcatcatccaggacacagtgaccctgtgcagctaccccttcatctttgatgcccaggccaagaccaagatgctgcagacagatgctgagctgcagatgcaggtggccgtgaatggagccaacctgcagaatgtgttcatgctgctgaccctggagcccctgctggcccggagccccttcctggtgctgcacgtgagaagaaacaacctggtgggagatgccctgcgggagctgagcatccacagcgacatcgacctgaagaagcccctgaaggtgatctttgatggagaggaggccgtggatgctggaggagtgaccaaggagttcttcctgctgctgctgaaggagctgctgaaccccatctacggcatgttcacctactaccaggacagcaacctgctgtggttcagtgacacctgctttgtggagcacaactggttccacctgattggcatcacctgtggcctggccatctacaacagcacagtggtggacctgcacttccccctggccctgtacaagaagctgctgaatgtgaagccaggcctggaggacctgaaggagctgagccccacagagggccgcagcctgcaggagctgctggactacccaggagaagatgtggaggagaccttctgcctgaacttcaccatctgccgggagagctatggagtgattgagcagaagaagctgatccctggaggagacaacgtgacagtgtgcaaggacaaccggcaggagtttgtggatgcctacgtgaactacgtgttccagatctctgtgcatgagtggtacacagccttcagcagcggcttcctgaaggtgtgtggcggcaaggtgctggagctgttccagcccagcgagctgcgggccatgatggtgggcaacagcaactacaactgggaggagctggaggagacagccatctacaagggggactacagcgccacccaccccaccgtgaagctgttctgggagaccttccacgagttccccctggagaagaagaagaagttcctgctcttcctgactggaagtgaccgcatccccatctacggcatggccagcctgcagatcgtcatccagagcacagccagcggggaggagtacctgcctgtggcccacacctgctacaacctgctggacctgcccaagtacagcagcaaggagatcctgagcgcccggctgacccaggccctggacaactatgagggcttcagcctggcctag

SEQ ID NO: 22455 - DNA, 2370 bp, synthetic construct
  source 1..2370: mol_type = other DNA; note = Synthetic coding sequence
atgtgccccagcagccagagcccccggccccccctgctgcggcccccctgcagctaccgggaggtgcccagctctgtgcagagccctgcccagcagcaggtgcctgcccggcctggggcccccagcgtgcaggtgcccagccccttcctgctgcagaaccagtatgagcctgtgcagccccactggttctactgcaaggaggtggagtacaagcagctgtggatgcccttctctgtgtttgacagcctgaacctggaggagatctacaacagcgtgcagcctgaccctgagagcgtggtgctgggcacagatggcggccgctatgatgtgtacctgtatgaccgcatcaggaaggccgcctactgggaggaggagcctgctgaggtgcggcgctgcacctggttctacaagggggacacagacagccgcttcatcccctacacagaggagttcagcgagaagctggaggccgagtacaagaaggctgtgaccaccaaccagtggcaccggcggctggagttccccagcggggagaccatcgtgatgcacaaccccaaggtgattgtgcagttccagcccagctctgtgcctgatgagtggggcaccacccaggacggccagacccggccccgggtggtgaagaggggcattgatgacaacctggatgagatcccagatggagagatgccccaggtggaccacctggtgtttgtggtgcacggcatcggccctgtgtgtgacctgcgcttccgcagcatcattgaatgtgtggatgacttccgggtggtgtccctgaagctgctgcggacccacttcaagaagagcctggatgatggcaaggtgtcccgggtggagttcctgcctgtgcactggcacagcagcctgggcggagatgccaccggggtggacaggaacatcaagaagatcaccctgcccagcatcggccgcttccgccacttcaccaatgagaccctgctggacatcctcttctacaacagccccacctactgccagaccatcgtggagaaggtgggcatggagatcaaccacctgcacgccctcttcatgagcaggaacccagacttcaagggcggcgtgtctgtggccggccacagcctgggcagcctcatcctgtttgacatcctgagcaaccagaaggacctgaacctgagcaagtgccccggccccctggccgtggccaatggagtggtgaagcagctgcacttccaggagaagcagatgcctgaggagcccaagctgaccctggatgagagctatgacctggtggtggagaacaaggaggtgctgaccctgcaggagaccctggaggccctgagcctgtctgagtacttcagcacctttgagaaggagaagattgacatggagagcctgctgatgtgcaccgtggatgacctgaaggagatgggcatccccctgggccccaggaagaagatcgccaactttgtggagcacaaggccgccaagctgaagaaggccgccagcgagaagaaggctgtggccgccaccagcaccaagggccaggagcagagcgcccagaagaccaaggacatggccagcctgcccagcgagagcaatgagcccaagaggaagctgcctgtgggcgcctgtgtgtcctctgtgtgtgtgaactatgagagctttgaggtgggcgccggccaggtgtctgtggcctacaacagcctggactttgagcctgagatcttctttgccctgggcagccccatcgccatgttcctgaccatccggggcgtggacagaattgatgagaactacagcctgcccacctgcaagggcttcttcaacatctaccaccccctggaccctgtggcctaccgcctggagcccatgattgtgcctgacctggacctgaaggctgtgctgatcccccaccacaagggcaggaagaggctgcacctggagctgaaggagagcctgagcaggatgggcagtgacctgaagcagggcttcatcagcagcctgaagagcgcctggcagaccctgaatgaatttgcccgggcccacaccagcagcacccagctgcaggaggagctggagaaggtggccaaccagatcaaggaggaggaggagaagcaggtggtggaggccgagaaggtggtggagagcccagacttcagcaaggatgaggactacctgggcaaggtgggcatgctgaatggaggaagaagaattgattatgtgctgcaggagaagcccatcgagagcttcaatgagtacctgtttgccctgcagagccacctgtgctactgggagagcgaggacacagccctgctgctgctgaaggagatctaccgcaccatgaacatcagccctgagcagccccagcactag

SEQ ID NO: 22456 - DNA, 828 bp, synthetic construct; identical to SEQ ID NO: 21402
  source 1..828: mol_type = other DNA; note = Synthetic coding sequence

SEQ ID NO: 22457 - DNA, 240 bp, synthetic construct
  source 1..240: mol_type = other DNA; note = Synthetic coding sequence
atgaatggcaccctggaccacccagaccagcctgacctggatgccatcaagatgtttgtgggccaggtgcccaggacctggagcgagaaggacctgcgggagctgtttgagcagtatggagctgtgtatgagatcaacgtgctgcgggacaggagccagaaccccccccagagcaagggctgctgctttgtgaccttctacaccaggaaggccgccctggaggcccagaatgccctgtag

SEQ ID NO: 22458 - DNA, 738 bp, synthetic construct
  source 1..738: mol_type = other DNA; note = Synthetic coding sequence
atggtgctgctgcacgtgaagagaggagatgagagccagttcctgctgcaggcccctggcagcacagagctggaggagctgactgtgcaggtggcccgggtgtacaacggccgcctgaaggtgcagaggctgtgcagcgagatggaggagctggccgagcacggcatcttcctgccccccaacatgcagggcctgacagatgaccagatcgaggagctgaagctgaaggatgagtggggcgagaagtgtgtgcccagcggcggcgctgtgttcaagaaggatgacatcggcagaagaaatggccaggccccaaatgagaagatgaagcaggtgctgaagaagaccatcgaggaggccaaggccatcatcagcaagaagcaggtggaggccggcgtgtgtgtgaccatggagatggtgaaggatgccctggaccagctgcggggagctgtgatgattgtgtaccccatgggcctgcccccctatgaccccatccgcatggagtttgagaacaaggaggacctgagcggcacccaggccggcctgaatgtcatcaaggaggccgaggcccagctgtggtgggccgccaaggagctgcggaggaccaagaagctgagtgactatgtgggcaagaatgagaagaccaagatcatcgccaagatccagcaggtgtccaccttctgcttcaacgtgtctgtggtgtttgtgatcagcctgcagacagacaagaatgtgcagtag

SEQ ID NO: 22459 - DNA, 396 bp, synthetic construct; identical to SEQ ID NO: 22413
  source 1..396: mol_type = other DNA; note = Synthetic coding sequence

SEQ ID NO: 22460 - DNA, 2517 bp, synthetic construct; identical to SEQ ID NO: 19107
  source 1..2517: mol_type = other DNA; note = Synthetic coding sequence

SEQ ID NO: 22461 - DNA, 1215 bp, synthetic construct
  source 1..1215: mol_type = other DNA; note = Synthetic coding sequence
atggacttcaacatgaagaagctggccagtgatgctggcatcttcttcaccagggctgtgcagttcacagaggagaagtttggccaggccgagaagacagagctggatgcccactttgagaacctgctggcccgggctgacagcaccaagaactggacagagaagatcctgcggcagacagaggtgctgctgcagcccaaccccagcgcccgggtggaggagttcctgtatgagaagctggacaggaaggtgcccagccgggtgaccaacggggagctgctggcccagtacatggctgatgctgccagcgagctgggccccaccaccccctacggcaagaccctcatcaaggtggccgaggccgagaagcagctgggcgctgctgagcgggacttcatccacacagccagcatctccttcctgacccccctgaggaacttcctggagggggactggaagaccatcagcaaggagcggcggctgctgcagaacagaaggctggacctggatgcctgcaaggcccggctgaagaaggccaaggctgctgaggccaaggccacagctgagggccccaccgtgcctgacttccaggagacccggcccaggaactacatcctgagcgccagcgccagcgccctgtggaatgatgaggtggacaaggccgagcaggagctgcgggtggcccagacagaatttgaccggcaggccgaggtgacccggctgctgctggagggcatcagcagcacccacgtgaaccacctgcgctgcctgcacgagtttgtgaagagccagaccacctactatgcccagtgctaccgccacatgctggacctgcagaagcagctgggcagcagccagggcgccatcttccctggcacctttgtgggcaccacagagcccgccagcccccccctgagcagcaccagccccaccacagctgctgccaccatgcctgtggtgcccagcgtggccagcctggcccctcctggagaggccagcctgtgcctggaggaggtggcccccccagccagcggcaccaggaaggcccgggtgctgtatgactatgaagctgctgacagcagcgagctggccctgctggctgatgagctgatcaccgtgtacagcctgcccggcatggaccctgactggctgattggagagcggggcaacaagaagggcaaggtgcctgtgacctacctggagctgctgtcctag

SEQ ID NO: 22462 - DNA, 495 bp, synthetic construct
  source 1..495: mol_type = other DNA; note = Synthetic coding sequence
atgacctgctgccagaccagcttctgtggctaccccagcttcagcatcagcggcacctgtggcagcagctgctgccagcccagctgctgtgagaccagctgctgccagcccaggagctgccagaccagcttctgtggcttccccagcttcagcaccagcggcacctgcagcagcagctgctgccagcccagctgctgtgagaccagctgctgccagcccagctgctgccagatcagcagctgtggcaccggctgcggcattggaggcggcatctcctatggccaggagggcagcagtggagctgtgtccacccgcatccgctggtgcaggccagacagccgggtggagggcacctacctgcccccctgctgcgtggtgtcctgcaccccacccagctgctgccagctgcaccacgcccaggccagctgctgccggcccagctactgcggccagagctgctgcaggcctgtgtgctgctgtgagcccacctgctag

SEQ ID NO: 22463 - DNA, 846 bp, synthetic construct
  source 1..846: mol_type = other DNA; note = Synthetic coding sequence
atgctgaccaagctgcagatcaagcagatgatggaggccgccacccggcagatcgaggagaggaagaagcagctgtccttcatcagcccccccaccccccagcccaagacccccagcagcagccagcctgagcggctgcccatcggcaacaccatccagcccagccaggccgccaccttcatgaatgatgccatcgagaaggccaggaaggctgctgagctgcaggcccgcatccaggcccagctggccctgaagccaggcctgattggaaatgccaacatggtgggcctggccaacctgcacgccatgggcatcgccccacccaaggtggagctgaaggaccagaccaagcccacccccctcatcctggatgagcagggccgcacagtggatgccaccgggaaggagattgagctgacccacaggatgcccaccctgaaggccaacatccgggctgtgaagcgggagcagttcaagcagcagctgaaggagaagcccagcgaggacatggagagcaacaccttctttgacccccgggtgtccatcgcccccagccagaggcagaggaggaccttcaagttccatgacaagggcaagtttgagaagatcgcccagaggctgcggaccaaggcccagctggagaagctgcaggccgagatcagccaggccgccaggaagacaggcatccacaccagcacccggctggccctgattgcccccaagaaggagctgaaggagggggacatccctgagattgagtggtgggacagctacatcatccccaacggctttgacctgggcaagagccaggagcggcggctcttctggaaccacaagagctgctag

SEQ ID NO: 22464 - DNA, 693 bp, synthetic construct
  source 1..693: mol_type = other DNA; note = Synthetic coding sequence
atgaggggccacgagagctctgtgttcagcatctctgtgcacgccagcggcaagtatgccatcaccaccagcagtgacacagcccagctgtgggacctggacaccttccagaggaagaggaagctgaacatccggcagagcgtgggcatccagaaggtgttcttcctgcccctgagcaacaccatcctgagctgcttcaaggacaacagcatctttgcctgggagtgtgacaccctcttctgcaagtaccagctgcctgcccctcctgagagcagcagcatcctgtacaaggtgtttgctgtgaccagagatggccgcatcctggccgccggcggcaagagcaaccacctgcacctgtggtgcctggaggcccggcagctgttccgcatcatccagatgcccaccaaggtgcgggccatccgccacctggagttcctgcctgacagctttgatgctggcagcaaccaggtgctgggcgtgctgagccaggacggcatcatgaggttcatcaacatgcagacctgcaagctgctgtttgaaattggcagcctggatgagggcatcagcagcagcgccatcagcccccacggccgctacatcgccagcatcatggagaatggcagcctgaacatctacagcgtgcaggccctgacccaggagatcaacaaggaggaggtgcgggcccagaactag

SEQ ID NO: 22465 - DNA, 1212 bp, synthetic construct
  source 1..1212: mol_type = other DNA; note = Synthetic coding sequence
atggacagcaccatggatgatgctgtggccggggactttgccctgatcaacaagctggacatccagtgtgacctgaagaccctgagtgatgacatcaaggagagcctggagagcgagggcaagaacagcaagaaggaggagccccaggagctgctgcagagccaggactttgtgggggagaagctgggcagcggggagcccagccacagcgtgaaggtgcacacagtgcccaagccaggaaaaggagctgacctgagcaagccaccctgcaggaaggccaaggagatcaggaaggagaggaagaggctgaagctgatgcagcagaacccagctggggagctggagggcttccaggcccagggccacccccccagcctcttcccccccaaggccaagagcaaccagcccaagagcctggaggacctgatctttgagagcctgcctgaaaatgccagccacaagctggaggtgcgggtggtgcgcagcagcccccccagcagccagttcaaggccaccctgctggagagctaccaggtgtacaagcgctaccagatggtgatccacaagaaccccccagacacccccacagagagccagttcacccgcttcctgtgcagcagccccctggaggccgagaccccacccaacggccctgactgtggctacggcagcttccaccagcagtactggctggatggcaagatcatcgctgtgggcgtgattgacatcctgcccaactgtgtgtcctctgtgtacctgtactatgaccctgactacagcttcctgagcctgggcgtgtacagcgccctgcgggagatcgccttcacccggcagctgcacgagaagaccagccagctgagctactactacatgggcttctacatccacagctgccccaagatgaagtacaagggccagtaccggcccagcgacctgctgtgcccagagacctacgtgtgggtgcccatcgagcagtgcctgcccagcctggagaacagcaagtactgccgcttcaaccaggaccctgaggccgtggatgaagatagaagcacagagccagaccggctgcaggtgttccacaagagggccatcatgccctatggagtgtacaagaagcagcagaaggaccccagcgaggaggccgctgtgctgcagtatgccagcctggtgggccagaagtgcagcgagaggatgctgctcttcaggaactag

SEQ ID NO: 22466 - DNA, 909 bp, synthetic construct
  source 1..909: mol_type = other DNA; note = Synthetic coding sequence
atgcccctgtatgagggcctgggcagcggcggggagaagacagctgtggtgattgacctgggggaggccttcaccaagtgtggctttgctggggagaccggcccccgctgcatcatccccagcgtcatcaagagagctggcatgcccaagcctgtgcgggtggtgcagtacaacatcaacacagaggagctgtacagctacctgaaggagttcatccacatcctgtacttccgccacctgctggtgaacccccgggacagaagagtggtgatcatcgagagcgtgctgtgccccagccacttccgggagaccctgaccagggtgctcttcaagtactttgaggtgcccagcgtgctgctggcccccagccacctgatggccctgctgaccctgggcatcaacagcgccatggtgctggactgtggctaccgggagagcctggtgctgcccatctatgagggcatccctgtgctgaactgctggggcgccctgcccctgggcggcaaggccctgcacaaggagctggagacccagctgctggagcagtgcaccgtggacacctctgtggccaaggagcagagcctgcccagcgtgatgggctctgtgcctgagggcgtgctggaggacatcaaggcccggacctgctttgtgtctgacctgaagaggggcctgaagatccaggccgccaagttcaacattgatggcaacaatgaaagacccagccccccaccaaatgtggactaccccctggatggagagaagatcctgcacatcctgggcagcatccgggacagcgtggtggagatcctgtttgagcaggacaatgaggagcagagcgtggccaccctcatcctggacagcctcatccagtgctgcagctgctgccccggctggagcgccatggcctag

SEQ ID NO: 22467 - DNA, 378 bp, synthetic construct
  source 1..378: mol_type = other DNA; note = Synthetic coding sequence
atgagcagctgtgtgagcagccagcccagcagcaacagagctgccccccaggatgagctgggcggccggggcagcagcagcagcgagagccagaagccctgtgaggccctgcggggcctgagcagcctgagcatccacctgggcatggagagcttcatcgtggtgacagaatgtgagcccggctgtgctgtggacctgggcctggcccgggaccggcccctggaggctgatggccaggaggtgcccctggacaccagcggcagccaggcccggccccacctgagcggcaggaagctgagcctgcaggagaggagccagggcggcctggccgccggcggcagcctggacatgaatggccgctgcatctgccccagctag

SEQ ID NO: 22468 - DNA, 1161 bp, synthetic construct
  source 1..1161: mol_type = other DNA; note = Synthetic coding sequence
atggctgacagcctggagagcacccccctgcccagccctgaggaccggctggccaagctgcaccccagcaaggagctgctggagtactaccagaagaagatggccgagtgtgaggccgagaatgaagacctgctgaagaagctggagctgtacaaggaggcctgtgagggccagcacaagctggagtgtgacctgcagcagcgggaggaggagattgctgagctgcagaaggccctgagtgacatgcaggtgtgcctcttccaggagcgggagcacgtgctgcggctgtacagtgaaaatgaccggctgcgcatccgggagctggaggacaagaagaagatccagaacctgctggccctggtgggcacagatgctggggaggtgacctacttctgcaaggagcccccccacaaggtgaccatcctgcagaagaccatccaggccgtgggagaatgtgagcagagcgagagcagcgccttcaaggctgaccccaagatcagcaagagaagacccagccgggagaggaaggagagcagcgagcactaccagagggacatccagaccctcatcctgcaggtggaggccctgcaggcccagctgggggagcagaccaagctgagccgggagcagatcgagggcctgattgaggaccggcgcatccacctggaggagatccaggtgcagcaccagaggaaccagaacaagatcaaggagctgaccaagaacctgcaccacacccaggagctgctgtatgagagcaccaaggacttcctgcagctgcggtctgagaaccagaacaaggagaagtcctggatgctggagaaggacaacctgatgagcaagatcaagcagtacagagtgcagtgcaagaagaaggaggacaagattggcaaggtgctgcctgtgatgcatgagagccaccacgcccagagcgagtacatcaagagcctgaaggacaagctggtgcaggagaagaagctgagcaacatgtaccaggagcagtgcatcagcctggaggaggagctggcccgcatccgggaggaggagggcatgaggcgggagatcttcaaggacaggaccaacaagatgggcaagaggctgcagatcatgaccaagagatatgaggccctggagcggcggcgcatcctggaggtggagtag

SEQ ID NO: 22469 - DNA, 999 bp, synthetic construct; identical to SEQ ID NO: 22218
  source 1..999: mol_type = other DNA; note = Synthetic coding sequence

SEQ ID NO: 22470 - DNA, 1524 bp, synthetic construct
  source 1..1524: mol_type = other DNA; note = Synthetic coding sequence
atggaggaggtggagcggcaggtgctgcctgaccctgaggtgctggaggccgtgggggaccggcaggacggcctgcgggagcagctgcaggcccctgtgcccccagattctgtgcccagcctgcagaacatgggcctgctgctggacaagctggccaaggagaaccaggacatccggctgctgcaggcccagctgcaggcccagaaggaggagctgcagagcctgatgcaccagcccaagggcctggaggaggagaatgcccagctgcggggggccctgcagcagggcgaggccttccagagggccctggagagcgagctgcagcagctgcgggcccggctgcagggcctggaggccgactgtgtgcggggcccagatggagtgtgcctgagcggcggccggggcccccagggcgacaaggccatccgggagcagggcccccgggagcaggagcctgagctgtccttcctgaagcagaaggagcagctggaggccgaggcccaggccctgcggcaggagctggagcggcagaggcggctgctgggctctgtgcagcaggacctggagaggagcctgcaggatgccagcagaggagaccctgcccatgctggcctggccgagctgggccaccggctggcccagaagctgcagggcctggagaactggggccaggaccccggggtgtctgccaatgccagcaaggcctggcaccagaagagccacttccagaacagccgggagtggagcggcaaggagaagtggtgggatggccagagggacaggaaggccgagcactggaagcacaagaaggaggagagcggccgggagaggaagaagaactggggcggccaggaggaccgggagcccgccggccgctggaaggagggccggccccgggtggaggagagcggcagcaagaaggagggcaagaggcagggccccaaggagccccccaggaagagcggcagcttccacagcagtggagagaagcagaagcagccccgctggagggagggcaccaaggacagccatgaccccctgcccagctgggccgagctgctgcggcccaagtaccgggccccccagggctgcagcggcgtggatgaatgtgcccggcaggagggcctgaccttctttggaacagagctggcccctgtgcggcagcaggagctggccagcctgctgcggacctacctggcccggctgccctgggccggccagctgaccaaggagctgcccctgagccctgccttctttggagaagatggcatcttcagacatgaccggctgcgcttccgggactttgtggatgccctggaggacagcctggaggaggtggccgtgcagcagacaggagatgatgatgaggtggatgactttgaggacttcatcttcagccacttctttggagacaaggccctgaagaagaggtctgggaagaaggacaagcacagccagagccccagggctgctggcccccgggagggccacagccacagccaccaccaccaccaccggggctag

SEQ ID NO: 22471 - DNA, 2472 bp, synthetic construct
  source 1..2472: mol_type = other DNA; note = Synthetic coding sequence
atgaccctgctgagcagccagagcagcagcctggtggcccccagcggctctgtgtctgcagaaaatcctgagcagaggatgctggagaagagggccaaggtgattgaggagctgctgcagacagagcgggactacatccgggacctggagatgtgcatcgagcgcatcatggtgcccatgcagcaggcccaggtgcccaacatcgactttgagggcctgtttggaaacatgcagatggtgatcaaggtgtccaagcagctgctggccgccctggagatcagtgatgctgtgggccctgtgttcctgggccacagagatgagctggagggcacctacaagatctactgccagaaccatgatgaggccatcgccctgctggagatctatgagaaggatgagaagatccagaagcacctgcaggacagcctggccgacctgaagagcctgtacaatgagtggggctgcaccaactacatcaacctgggcagcttcctgatcaagcctgtgcagagggtgatgagataccccctgctgctgatggagctgctgaacagcaccccagagagccacccagacaaggtgcccctgaccaatgctgtgctggccgtgaaggagatcaacgtgaacatcaatgagtacaagaggaggaaggacctggtgctgaagtacagaaaaggagatgaggacagcctgatggagaagatcagcaagctgaacatccacagcatcatcaagaagagcaacagagtgagcagccacctgaagcacctgaccggctttgccccccagatcaaggatgaggtgtttgaggagacagagaagaacttcaggatgcaggagcggctcatcaagagcttcatccgggacctgagcctgtacctgcagcacatccgggagagcgcctgtgtgaaggtggtggccgctgtgtccatgtgggatgtgtgcatggagcggggccaccgggacctggagcagtttgagcgggtgcaccgctacatcagtgaccagctgttcaccaacttcaaggagaggacagagcggctggtgatcagccccctgaaccagctgctgtccatgttcaccggcccccacaagctggtgcagaagagatttgacaagctgctggacttctacaactgcacagagcgggcagagaagctgaaggacaagaagaccctggaggagctgcagagcgccaggaacaactatgaggccctgaatgcccagctgctggatgagctgcccaagttccaccagtatgcccagggcctcttcaccaactgtgtgcacggctatgcagaggcccactgtgactttgtgcaccaggccctggagcagctgaagcccctgctgagcctgctgaaggtggccggccgggagggcaacctgattgccatcttccacgaggagcacagccgggtgctgcagcagctgcaggtgttcaccttcttccctgagagcctgcctgccaccaagaagccctttgagaggaagaccatcgaccggcagagcgccaggaagcccctgctgggcctgcccagctacatgctgcagagcgaggagctgcgggccagcctgctggcccgctacccacctgagaagctgttccaggccgagaggaacttcaatgctgcccaggacctggatgtgtccctgctggagggggacctggtgggcgtcatcaagaagaaggaccccatgggcagccagaaccgctggctgattgacaatggagtgaccaagggctttgtgtacagcagcttcctgaagccctacaaccccaggaggagccacagtgatgcctctgtgggcagccacagcagcacagaaagtgaacatggcagcagcagcccccgcttcccccggcagaacagcggcagcaccctgaccttcaaccccagctccatggctgtgtccttcaccagcggcagctgccagaagcagccccaggatgccagccccccacccaaggaatgtgaccagggcaccctgagcgccagcctgaaccccagcaacagcgagagcagccccagccgctgccccagcgaccctgacagcaccagccagcccaggtctggggacagcgcagatgtggccagagatgtgaagcagcccacagccacccccaggagctacagaaacttccgccaccctgagatcgtgggctacagcgtgcccggcagaaatggccagagccaggacctggtgaagggctgtgccaggacagcccaggccccagaagatagaagcacagagccagatggcagcgaggccgagggcaaccaggtgtactttgctgtgtacaccttcaaggccaggaaccccaatgagctgtctgtgtctgccaaccagaagctgaagatcctggagttcaaggatgtgactggaaacacagagtggtggctggccgaggtgaatggcaagaagggctacgtgcccagcaactacatcaggaagacagagtacacctag

SEQ ID NO: 22472 - DNA, 492 bp, synthetic construct
  source 1..492: mol_type = other DNA; note = Synthetic coding sequence
tgagacaagttccgggccagcccagactgcatcaccatcctgtgcaagcccaacggccaggccatcgcctggtacacccccatccactggaagcaggcctgggagaagctggatgctgatgtggagttcaaccgctgcagcgtggtgagccccaccttcaggaagagggtcttccagtggacagccagcacagccaccatcaccaaggagaagcaggaccagcccaagaaggacatcagcaactaccaggtggagcaggcccaggtgctgctgaagcgggagaaggagatcccccccaccgtcttccccaacagaagcccctggtgccagaacccctacgtgtctgcccacccctactgccccctgattgagccccacaacaccagcacagctgggggccgcctggaccggcagcccaggaccaggagcacccggcccaacagagccagcggcagcaagaagaagaagaccagcgagagccagaagcagtag

SEQ ID NO: 22473 - DNA, 771 bp, synthetic construct; identical to SEQ ID NO: 19189
  source 1..771: mol_type = other DNA; note = Synthetic coding sequence

SEQ ID NO: 22474 - DNA, 2793 bp, synthetic construct
  source 1..2793: mol_type = other DNA; note = Synthetic coding sequence
atgtctgagttccgcatccaccatgatgtgaatgagctgctgagcctgctgcgggtgcacggcggagatggagctgaggtgtacatcgacctgctgcagaagaacagaacaccctacgtgaccaccaccgtgtctgcccacagcgccaaggtgaagattgctgagttcagcaggaccccagaggacttcctgaagaagtatgatgagctgaagagcaagaacaccaggaacctggaccccctggtgtacctgctgagcaagctgacagaggacaaggagaccctgcagtacctgcagcagaatgccaaggagcgggcagagctggccgctgctgctgtgggcagcagcaccaccagcatcaacgtgcctgctgctgccagcaagatctccatgcaggagctggaggagctgaggaagcagctgggctctgtggccaccggcagcaccctgcagcagagcctggagctgaagaggaagatgctgcgggacaagcagaacaagaagaacagcggccagcacctgcccatcttccctgcctgggtgtatgaaagacctgccctgattggagacttcctgattggagctggcatcagcacagacacagccctgcccatcgtgctgctgcgctggaacctggccctgagcccccggctgaagtgcagcggggtcatcagcgcccactgcaacctgcacctgcccggcaccctgcccctggccagccaggagagcgctgtggtggaggacctgctgtatgtgctggtgggcgtggatggccgctacgtgtctgcccagcccctggccggccggcagagcaggaccttcctggtggaccccaacctggacctgagcatccgggagctggtgcaccgcatcctgcctgtggccgccagctacagcgctgtgacccgcttcatcgaggagaagagcagctttgaatatggccaggtgaaccacgccctggccgccgccatgaggaccctggtgaaggagcacctgatcctggtgtcccagctggagcagctgcaccggcagggcctgctgagcctgcagaagctgtggttctacatccagcctgccatgaggaccatggacatcctggccagcctggccacctctgtggacaagggagaatgtctgggcggcagcaccctgagcctgctgcatgaccgctccttctcctacacaggagacagccaggcccaggagctgtgcctgtacctgaccaaggccgccagcgccccctactttgaggtgctggagaagtggatctaccggggcatcatccatgacccctacagcgagttcatggtggaggagcacgagctgaggaaggagcgcatccaggaggactacaatgacaagtactgggaccagcgctacaccatcgtgcagcagcagatccccagcttcctgcagaagatggctgacaagatcctgagcacaggcaagtacctgaatgtggtgcgggagtgtggccatgatgtgacctgccctgtggccaaggagatcatctacaccctgaaggagcgggcctacgtggagcagatcgagaaggccttcaactatgccagcaaggtgctgctggacttcctgatggaggagaaggagctggtggcccacctgcggagcatcaagcgctacttcctgatggaccagggcgacttctttgtgcacttcatggacctggccgaggaggagctgaggaagcctgtggaggacatcaccccaccccggctggaggccctgctggagctggccctgaggatgagcacagccaacacagaccccttcaaggatgacctgaagattgacctgatgcctcatgacctgatcacccagctgctgcgggtgctggccatcgagaccaagcaggagaaggccatggcccatgctgaccccacagagctggccctgagcggcctggaggccttctcctttgactacatcgtgaagtggcccctgagcctcatcatcaacaggaaggccctgacccgctaccagatgctgttccgccacatgttctactgcaagcacgtggagcggcagctgtgcagcgtgtggatcagcaacaagacagccaagcagcacagcctgcacagcgcccagtggtttgctggggccttcaccctgcggcagaggatgctgaactttgtgcagaacatccagtactacatgatgtttgaggtgatggagcccacctggcacatcctggagaagaacctgaagagcgccagcaacattgatgatgtgctgggccaccacacaggcttcctggacacctgcctgaaggactgcatgctgaccaaccctgagctgctgaaggtgttcagcaagctgatgtctgtgtgtgtgatgttcaccaactgcatgcagaagttcacccagagcatgaagctggatggagagctgggcggccagaccctggagcacagcacagtgctgggcctgcctgctggagctgaggagcgggccaggaaggagctggccaggaagcacctggccgagcacgccgacacagtgcagctggtgtctggctttgaggccaccatcaacaagtttgacaagaacttcagcgcccacctgctggacctgctggcccggctgagcatctacagcaccagtgactgtgagcacggcatggccagcgtcatcagccggctggacttcaacggcttctacacagagcggctggagcggctgtctgctgagaggagccagaaggccaccccccaggtgcctgtgctgcggggccccccagccccagccccccgggtggccgtgacagcccagtag

SEQ ID NO: 22475 - DNA, 129 bp, synthetic construct
  source 1..129: mol_type = other DNA; note = Synthetic coding sequence
atgtgcctgctgcccatccgggtgaaggaggccgaggaggtgtgccggcagaagaagggcaagagcctgtacaagatcaagcccaggcatgacagcggcatcaaggccaagatctccatgaagacctag

SEQ ID NO: 22476 - DNA, 456 bp, synthetic construct
  source 1..456: mol_type = other DNA; note = Synthetic coding sequence
atggactgccgggagatggacctgtatgaggactaccagagcccctttgattttgatgctggggtgaacaagagctacctgtacctgagccccagcggcaacagcagccccccaggcagccccaccctgcagaagtttggcctgctgaggacagatcctgtgcctgaggagggagaagatgtggccgccaccatcagcgccacagagaccctgtctgaggaggagcaggaggagctgcggcgggagctggccaaggtggaggaggagatccagaccctgagccaggtgctggccgccaaggagaagcacctggccgagatcaagaggaagctgggcatcaacagcctgcaggagctgaagcagaacatcgccaagggctggcaggatgtgacagccaccagcgcccggagcaagctgctggccgctgagacagagctgctgtgcctgctgtactag

SEQ ID NO: 22477 - DNA, 627 bp, synthetic construct; identical to SEQ ID NO: 18638
  source 1..627: mol_type = other DNA; note = Synthetic coding sequence

SEQ ID NO: 22478 - DNA, 1575 bp, synthetic construct
  source 1..1575: mol_type = other DNA; note = Synthetic coding sequence
atgaagaggagctctgtgagcagcggcggggccggccgcctgtccatgcaggagctgcggagccaggatgtgaacaagcagggcctgtacaccccccagaccaaggagaagcccaccttcggcaagctgagcatcaacaagcccaccagcgagaggaaggtgtccctgtttgggaagaggaccagcggccacggcagcaggaacagccagctgggcatcttcagcagcagcgagaagatcaaggacccccggcccctgaatgacaaggccttcatccagcagtgcatccggcagctgtgtgagttcctgacagaaaatggctacgcccacaacgtgtccatgaagagcctgcaggcccccagcgtgaaggacttcctgaagatcttcaccttcctgtatggcttcctgtgccccagctatgagctgcctgacaccaagtttgaggaggaggtgccccgcatcttcaaggacctgggctacccctttgccctgagcaagagctccatgtacacagtgggcgccccccacacctggccccacatcgtggccgccctggtgtggctgattgactgcatcaagatccacacagccatgaaggagagcagccccctgtttgatgatggccagccctggggcgaggagacagaagatggcatcatgcacaacaagctgttcctggactacaccatcaagtgctatgagagcttcatgtctggagctgacagctttgatgagatgaatgctgagctgcagagcaagctgaaggacctcttcaacgtggatgccttcaagctggagagcctggaggccaagaacagagccctgaatgagcagatcgcccggctggagcaggagcgggagaaggagcccaaccggctggagagcctgaggaagctgaaggccagcctgcagggagatgtgcagaagtaccaggcctacatgagcaacctggagagccacagcgccatcctggaccagaagctgaatggcctgaatgaggagatcgcccgggtggagctggagtgtgagaccatcaagcaggagaacacccggctgcagaacatcatcgacaaccagaagtacagcgtggccgacatcgagcgcatcaaccatgaaagaaatgagctgcagcagaccatcaacaagctgaccaaggacctggaggccgagcagcagaagctgtggaatgaggagctgaagtatgcccggggcaaggaggccatcgagacccagctggccgagtaccacaagctggccaggaagctgaagctgatccccaagggagctgagaacagcaagggctatgactttgagatcaagttcaaccctgaggccggggccaactgcctggtgaagtaccgggcccaggtgtatgtgcccctgaaggagctgctgaatgaaacagaggaggagatcaacaaggccctgaacaagaagatgggcctggaggacaccctggagcagctgaatgccatgatcacagagagcaagaggtctgtgaggaccctgaaggaggaggtgcagaagctggatgacctgtaccagcagaagatcaagaaggagaggaagaagtag

SEQ ID NO: 22479 - DNA, 1248 bp, synthetic construct; identical to SEQ ID NO: 19216
  source 1..1248: mol_type = other DNA; note = Synthetic coding sequence

SEQ ID NO: 22480 - DNA, 1512 bp, synthetic construct
  source 1..1512: mol_type = other DNA; note = Synthetic coding sequence
atggccagcaaccacaagagcagcgctgcccggcctgtgtcccggggcggcgtgggcctgaccggccggccccccagcggcatccggcccctgagcggcaacatccgggtggccacagccatgcctcctggaacagcccggcccggcagccggggctgccccatcggcactggaggagtgctgagcagccagatcaaggtggcccacaggcctgtgacccagcagggcctgaccggcatgaagacaggcaccaagggcccccagaggcagatcctggacaagagctactacctgggcctgctgcggagcaagatcagcgagctgaccacagaggtgaacaagctgcagaagggcatcgagatgtacaaccaggagaacagcgtgtacctgtcctatgagaagagagctgagaccctggccgtggagatcaaggagctgcagggccagctggccgactacaacatgctggtggacaagctgaacaccaacacagagatggaggaggtgatgaatgactacaacatgctgaaggcccagaatgaccgggagacccagagcctggatgtgatcttcacagagcggcaggccaaggagaagcagatccgctctgtggaggaggagattgagcaggagaagcaggccacagatgacatcatcaagaacatgagctttgagaaccaggtgaagtacctggagatgaagaccaccaatgagaagctgctgcaggagctggacaccctgcagcagcagctggacagccagaacatgaagaaggagagcctggaggccgagatcgcccacagccaggtgaagcaggaggccgtgctgctgcacgagaagctgtatgagctggagagccaccgggaccagatgattgctgaggacaagagcatcggcagccccatggaggagcgggagaagctgctgaagcagatcaaggatgacaaccaggagatcgcctccatggagcggcagctgacagacaccaaggagaagatcaaccagttcatcgaggagatccggcagctggacatggacctggaggagcaccagggcgagatgaaccagaagtacaaggagctgaagaagcgggaggagcacatggacaccttcatcgagacctttgaggagaccaagaaccaggagctgaagaggaaggcccagatcgaggccaacatcgtggccctgctggagcactgcagcaggaacatcaacagaattgagcagatcagcagcatcaccaaccaggagctgaagatgatgcaggatgacctgaacttcaagagcacagaggtgcagaagagccagagcacagcccagaacctgaccagtgacatccagaggctgcagctggacctgcagaagatggagctgctggagagcaagatgacagaggagcagcacagcctgaagagcaagatcaagcagatgaccacagacctggagatctacaatgacctgcctgccctgaagagcagtggagagaagaagaagaagaagaagaagaagtag

SEQ ID NO: 22481 - DNA, 1461 bp, synthetic construct; identical to SEQ ID NO: 18684
  source 1..1461: mol_type = other DNA; note = Synthetic coding sequence

SEQ ID NO: 22482 - DNA, 1011 bp, synthetic construct
  source 1..1011: mol_type = other DNA; note = Synthetic coding sequence
atgtgcaccatgcacaaggatgagaaggccaagcgggaggtgtcctcctggacagtggagggggacatcaacacagacccctgggccggctaccgctacaccgggaagctgcggccccactaccccctgatgcccaccaggcctgtgcccagctacatccagaggccagactatgctgaccaccccctgggcatgtctgagagcgagcaggccctgaagggcaccagccagatcaagctgctgagcagcgaggacatcgagggcatgaggctggtgtgccgcctggcccgggaggtgctggatgtggccgccggcatgatcaagccaggagtgaccacagaggagattgaccatgctgtgcacctggcctgcatcgccaggaactgctaccccagccccctgaactactacaacttccccaagagctgctgcacctctgtgaatgaggtgatctgccacggcatcccagaccggcggcccctgcaggagggggacatcgtgaatgtggacatcaccctgtacagaaatggctaccatggagacctgaatgagaccttctttgtgggggaggtggatgatggagccaggaagctggtgcagaccacctatgagtgcctgatgcaggccattgatgctgtgaagccaggagtgcgctaccgggagctgggcaacatcatccagaagcacgcccaggccaacggcttctctgtggtgcgcagctactgcggccacggcatccacaagctgttccacacagccccaaatgtgccccactacgccaagaacaaggctgtgggcgtgatgaagagcggccacgtgttcaccatcgagcccatgatctgtgagggcggctggcaggatgagacctggccagatggctggacagctgtgaccagagatggcaagaggtctgcccagtttgagcacaccctgctggtgacagacaccggctgtgagatcctgacccggcggctggacagcgcccggccccacttcatgagccagttctag

SEQ ID NO: 22483 - DNA, 3102 bp, synthetic construct
  source 1..3102: mol_type = other DNA; note = Synthetic coding sequence
atggccggcatgattgaccgcttcagccctgccaacacaggcatccgctcctgggatgtggaccccggggtgtgcaacctggatgagcagctgaaggtgtttgtgagccgccacagcgccaccttcagcagcatcgtgaagggccagaggagcctgcaccacagaggagacaacctggagaccctggtgctgctgaaccccagcgacaagagcctgtatgatgagctgaggaacctgctgctggaccctgccagccacaagctgctggtgctggccggcccctgcctggaggagactggagagctgctgctgcagacaggaggcttcagcccccaccacttcctgcaggtgctgaaggaccgggagatccgggacatcctggccaccaccccacctcctgtgcagccccccatcctgaccatcacctgccccaccttcggggactgggcccagctggccccagctgtgcccggcctgcagggcgccctgcggctgcagctgcggctgaaccccccagcccagctgcccaacagcgagggcctgtgtgagttcctggagtatgtggccgagagcctggagccccccagcccctttgagctgctggagccccccaccagcggcggcttcctgcggctgggccggccctgctgctacatcttccctgggggcctgggagatgctgccttctttgctgtgaatggcttcaccgtgctggtgaatggaggcagcaaccccaagagcagcttctggaagctggtgcgccacctggacagagtggatgctgtgctggtgacccaccctggagctgacagcctgcccggcctgaacagcctgctgcggaggaagctggccgagaggtctgaggtggccgccggcggcggctcctgggatgaccggctgcggcggctcatcagccccaacctgggcgtggtgttcttcaatgcctgtgaggccgccagccggctggcccggggggaggatgaagctgagctggccctgagcctgctggcccagctgggcatcacccccctgcccctgagccggggccctgtgcctgccaagcccaccgtgctgtttgagaagatgggcgtgggccgcctggacatgtatgtgctgcacccccccagcgctggagctgagaggaccctggcctctgtgtgtgccctgctggtgtggcaccctgctggccctggagagaaggtggtgcgggtgctcttccctggctgcaccccaccagcctgcctgctggatggcctggtgcggctgcagcacctgcgcttcctgcgggagcctgtggtgaccccccaggacctggagggccctggccgggcagagagcaaggagagcgtgggcagccgggacagcagcaagcgggagggcctgctggccacccacccccggcccggccaggagaggcctggggtggccaggaaggagcccgcccgggcagaggcccccaggaagacagagaaggaggccaagaccccccgggagctgaagaaggaccccaagcccagcgtgtccaggacccagccccgggaggtgcggcgggccgccagctctgtgcccaacctgaagaagaccaatgcccaggccgcccccaagcccaggaaggcccccagcaccagccacagcggcttcccccctgtggccaacggccccaggagcccccccagcctgcgctgtggggaggccagccccccatctgctgcctgtggcagccctgccagccagctggtggccacccccagcctggagctgggccccatcccagctggggaggagaaggccctggagctgcccctggccgccagcagcatcccccggcccaggacccccagccctgagagccacaggagccctgctgagggcagcgagcggctgagcctgagccccctgcggggcggggaggccggcccagatgccagccccaccgtgaccacccccaccgtgaccacccccagcctgcctgctgaggtgggcagcccccacagcacagaggtggatgagagcctgtctgtgtcctttgagcaggtgctgcccccatctgcccccaccagcgaggccggcctgagcctgcccctgcggggcccccgggccaggagaagtgccagcccccatgatgtggacctgtgcctggtgagcccctgtgaatttgagcacaggaaggctgtgcccatggccccagccccagccagccctggcagcagcaatgacagcagcgcccggagccaggagcgggccggcggcctgggcgctgaggagaccccacccacctctgtgtctgagagcctgcccaccctgagtgacagcgaccctgtgcccctggcccctggagctgctgacagtgatgaggacacagagggcttcggcgtgcccaggcatgaccccctgcctgaccccctgaaggtgcccccacccctgcctgaccccagcagcatctgcatggtggaccctgagatgctgccccccaagacagcccggcagacagaaaatgtgtccaggaccaggaagcccctggcccggcccaacagcagagctgctgcccccaaggccacccctgtggccgccgccaagaccaagggcctggccggcggggaccgggccagccggcccctgagcgcccggtctgagcccagcgagaagggcggccgggcccccctgagcaggaagagcagcacccccaagacagccacccggggccccagcggcagcgccagcagcaggcctggggtgtctgccaccccacccaagagccctgtgtacctggacctggcctacctgcccagcggcagcagcgcccacctggtggatgaggagttcttccagagggtgcgggccctgtgctacgtgatcagcggccaggaccagaggaaggaggagggcatgagagctgtgctggatgccctgctggccagcaagcagcactgggaccgggacctgcaggtgaccctcatccccacctttgattctgtggccatgcacacctggtatgcagagacccacgcccggcaccaggccctgggcatcaccgtgctgggcagcaacagcatggtgtccatgcaggatgatgccttccctgcctgcaaggtggagttctag

SEQ ID NO: 22484 - DNA, 2223 bp, synthetic construct
  source 1..2223: mol_type = other DNA; note = Synthetic coding sequence
atgagggacctggagggctaccgggagacccgctaccagctgctgcagctgcggcctgcccagagggcctcctggattggctacgccatcgcctaccacctgctggaggactatgagatggccgccaagatcctggaggagttcaggaagacccagcagaccagcccagacaaggtggactatgagtacagcgagctgctgctgtaccagaaccaggtgctgcgggaggccggcctgtaccgggaggccctggagcacctgtgcacctatgagaagcagatctgtgacaagctggccgtggaggagaccaagggggagctgctgctgcagctgtgccgcctggaggatgctgctgatgtgtaccggggcctgcaggagagaaatcctgagaactgggcctactacaagggcctggagaaggccctgaagccagccaacatgctggagcggctgaagatctatgaggaggcctggaccaagtacccccggggcctggtgccccggcggctgcccctgaacttcctgagcggggagaagttcaaggagtgcctggacaagttcctgaggatgaacttcagcaagggctgcccccctgtgttcaacaccctgcggagcctgtacaaggacaaggagaaggtggccatcatcgaggagctggtggtgggctatgagaccagcctgaagagctgccgcctcttcaaccccaatgatgatggcaaggaggagccccccaccaccctgctgtgggtgcagtactacctggcccagcactatgacaagattggccagcccagcatcgccctggagtacatcaacacagccatcgagagcacccccaccctcatcgagctgttcctggtgaaggccaagatctacaagcatgctggcaacatcaaggaggccgcccgctggatggatgaggcccaggccctggacacagctgaccgcttcatcaacagcaaatgtgccaagtacatgctgaaggccaacctgatcaaggaggccgaggagatgtgcagcaagttcacccgggagggcaccagcgctgtggagaacctgaatgagatgcagtgcatgtggttccagacagaatgtgcccaggcctacaaggccatgaacaagtttggagaggccctgaagaagtgccatgaaattgagcggcacttcatcgagatcacagatgaccagtttgacttccacacctactgcatgaggaagatcaccctgcggagctatgtggacctgctgaagctggaggatgtgctgcggcagcaccccttctacttcaaggccgcccgcatcgccatcgagatctacctgaagctgcatgacaaccccctgacagatgagaacaaggagcacgaggccgacacagccaacatgtctgacaaggagctgaagaagctgaggaacaagcagaggcgggcccagaagaaggcccagatcgaggaggagaagaagaatgctgagaaggagaagcagcagaggaaccagaagaagaagaaggatgatgatgatgaggagattggaggccccaaggaggagctgatccctgagaagctggccaaggtggagacccccctggaggaggccatcaagttcctgacccccctgaagaacctggtgaagaacaagattgagacccacctgtttgcctttgagatctacttcaggaaggagaagttcctgctgatgctgcagagcgtgaagagggcctttgccatcgacagcagccacccctggctgcacgagtgcatgatccgcctcttcaacacagctgtgtgtgagagcaaggacctgagtgacacagtgaggacagtgctgaagcaggagatgaacagactctttggagccaccaaccccaagaacttcaatgagaccttcctgaagaggaacagcgacagcctgccccaccggctgtctgctgccaagatggtgtactacctggaccccagcagccagaagagggccatcgagctggccaccaccctggatgagagcctgaccaacagaaacctgcagacctgcatggaggtgctggaggccctgtatgatggcagcctgggggactgcaaggaggccgctgagatctaccgggccaactgccacaagctgttcccctatgccctggccttcatgcctcctggctatgaggaggacatgaagatcaccgtgaatggagacagcagcgctgaggccgaggagctggccaatgagatctag

SEQ ID NO: 22485 - DNA, 183 bp, synthetic construct
  source 1..183: mol_type = other DNA; note = Synthetic coding sequence
atgagctgcaccatcgagaaggccctggctgatgccaaggccctggtggagcggctgcgggaccatgatgatgctgctgagagcctcatcgagcagaccacagccctgaacaagagggtggaggccatgaagcagtaccaggaggagatccaggagctgaatgaggtggcccggcacaggtag

SEQ ID NO: 22486 - DNA, 1419 bp, synthetic construct
  source 1..1419: mol_type = other DNA; note = Synthetic coding sequence
atgggcaaggagcaggagctgctggaggccgccaggacaggccacctgcctgctgtggagaagctgctgagcggcaagaggctgagcagcggctttggaggcggcggcggcggcggcagcggcggcggcggcggcggcagcggcggcggcggcggcggcctgggcagcagcagccaccccctgagcagcctgctgtccatgtggaggggccccaacgtgaactgtgtggacagcacaggctacacccccctgcaccacgccgccctgaatggccacaaggatgtggtggaggtgctgctgagaaatgatgccctgaccaacgtggccgacagcaagggctgctaccccctgcacctggccgcctggaagggagatgcccagatcgtgcggctgctgatccaccagggccccagccacaccagggtgaatgagcagaacaatgacaatgaaacagccctgcactgtgccgcccagtatggccacacagaggtggtgaaggtgctgctggaggagctgacagaccccaccatgaggaacaacaagtttgagacccccctggacctggccgccctgtatggccgcctggaggtggtgaagatgctgctgaatgcccaccccaacctgctgagctgcaacaccaagaagcacacccccctgcacctggccgccagaaatggccacaaggctgtggtgcaggtgctgctggatgctggcatggacagcaactaccagacagagatgggcagcgccctgcacgaggccgccctgtttgggaagacagatgtggtgcagatcctgctggccgccggcacagatgtgaacatcaaggacaaccacggcctgacagccctggacacagtgcgggagctgcccagccagaagagccagcagattgctgccctgattgaggaccacatgaccgggaagaggagcaccaaggaggtggacaagaccccaccaccccagcccccactcatcagctccatggacagcatcagccagaagagccagggagatgtggagaaggctgtgacagagctgatcatcgactttgatgccaatgctgaggaggagggcccctatgaggccctgtacaatgccatcagctgccacagcctggacagcatggccagcggccgcagcagtgaccaggacagcaccaacaaggaggccgaggccgccggcgtgaagccagctggggtgcggccccgggagaggcctcctcctccagccaagcccccaccagatgaggaggaggaggaccacatcgacaagaagtacttccccctgacagccagcgaggtgctgtccatgaggccccgcatccacggcagcgctgcccgggaggaggatgagcacccctatgagctgctgctgacagctgagaccaagaagaagaagaagaagaagaagaagtag

SEQ ID NO: 22487 - DNA, 1392 bp, synthetic construct
  source 1..1392: mol_type = other DNA; note = Synthetic coding sequence
atgtctgggggcaccccctacatcggcagcaagatcagcctcatcagcaaggccgagatccgctatgagggcatcctgtacaccatcgacacagagaacagcacagtggccctggccaaggtgcgcagctttggaacagaagatcggcccacagaccggcccatccccccaagagatgaggtgtttgagtacatcatcttccggggcagtgacatcaaggacctgactgtgtgtgagccccccaagccccagtgcagcctgccccaggaccctgccatcgtgcagagcagcctgggcagcagcaccagcagcttccagagcatgggcagctatggccccttcggccgcatgcccacctacagccagttcagccccagcagcctggtgggccagcagtttggagctgtgggcgtggccggcagcagcctgaccagctttggaacagagaccagcaacagcggcaccctgccccagagcagcgctgtgggcagcgccttcacccaggacaccaggagcctgaagacccagctgagccagggccgcagcagcccccagctggaccccctgaggaagagccccaccatggagcaggccgtgcagacagccagcgcccacctgcctgccccagctgctgtgggccgccgcagccctgtgtccacccggcccctgcccagcgccagccagaaggccggggagaaccaggagcacagaagagctgaggtgcacaaggtgtccaggccagaaaatgagcagctgagaaatgacaacaagaggcaggtggcccctggggcccccagcgccccccggcggggccggggcggccacagaggaggccggggccgcttcggcatcagaagagatggccccatgaagtttgagaaggactttgattttgagagcgccaatgcccagttcaacaaggaggagattgaccgggagttccacaacaagctgaagctgaaggaggacaagctggagaagcaggagaagcctgtgaatggagaagataaaggagacagcggcgtggacacccagaacagcgagggcaatgctgatgaggaggaccccctgggccccaactgctactatgacaagaccaagagcttctttgacaacatcagctgtgatgacaaccgggagcggcggcccacctgggccgaggagcggcggctgaatgctgagaccttcggcatccccctgcggcccaacagaggccggggcggctaccggggccggggcggcctgggcttccggggcggccggggccggggcggcggccggggcggcaccttcaccgccccccggggcttccggggcggcttccggggcggccggggcggccgggagtttgctgactttgagtacaggaaggacaacaaggtggccgcctag

SEQ ID NO: 22488 - DNA, 1287 bp, synthetic construct
  source 1..1287: mol_type = other DNA; note = Synthetic coding sequence
atgggcggcggcgtgggcgccagcagcagcggcggcggccctgggggcagcggcggcggcggcagcggcggccctggagctggcaccagcttccccccacctggggtgaagctgggccgggacagcggcaaggtgaccaccgtggtggccaccctgggccagggccctgagaggagccaggaggtggcctacacagacatcaaggtgattggaaatggcagctttggagtggtgtaccaggcccggctggccgagacccgggagctggtggccatcaagaaggtgctgcaggacaagcgcttcaagaaccgggagctgcagatcatgaggaagctggaccactgcaacatcgtgcggctgcgctacttcttctacagcagtggagagaagaaggatgagctgtacctgaacctggtgctggagtatgtgcctgagaccgtgtacagagtggcccggcacttcaccaaggccaagctgaccatccccatcctgtatgtgaaggtgtacatgtaccagctgttccgcagcctggcctacatccacagccagggcgtgtgccaccgggacatcaagccccagaacctgctggtggaccctgacacagctgtgctgaagctgtgtgactttggaagtgccaagcagctggtgcggggggagcccaacgtgtcctacatctgcagccgctactaccgggcccctgagctgatctttggagccacagactacaccagcagcattgatgtgtggagcgctggctgtgtgctggccgagctgctgctgggccagcccatcttccctggggacagcggcgtggaccagctggtggagatcatcaaggtgctgggcacccccacccgggagcagatccgggagatgaaccccaactacacagagttcaagttcccccagatcaaggcccacccctggaccaaggtgttcaagagcaggaccccacctgaggccatcgccctgtgcagcagcctgctggagtacacccccagcagccggctgagccccctggaggcctgtgcccacagcttctttgatgagctgcgctgcctgggcacccagctgcccaacaaccggcccctgcccccactcttcaacttctctgctggggagctgagcatccagcccagcctgaatgccatcctgatccccccccacctgcggagccctgctggcaccaccaccctgacccccagcagccaggccctgacagagacccccaccagcagtgactggcagagcacagatgccacccccaccctgaccaacagcagctag

SEQ ID NO: 22489 - DNA, 657 bp, synthetic construct
  source 1..657: mol_type = other DNA; note = Synthetic coding sequence
atggatgctgagcaccctgagctgcggagctatgcccagagccagggctggtggacaggagagggggagttcaacttcagcgaggtgttcagccctgtggaggaccacctggactgtggggccggcaaggacagcctggagaagcaggaggagagcatcaccgtgcagaccatgatgaacaccctgcgggacaaggccagcggcgtgtgcattgattctgagttcttcctgaccacagccagcggcgtgtctgtgctgccccagaacagaagcagcccctgcatccactacttcaccggcaccccagaccccagccgcagcatcttcaagcccttcatctttgtggatgatgtgaagctggtgcccaagacccagagcccctgctttggagatgatgatcctgccaagaaggagccccgcttccaggagaagccagacagaagacatgagctgtacaaggcccacgagtgggcccgggccatcatcgagagtgaccaggagcagggcaggaagctgcggagcaccatgctggagctggagaagcagggcctggaggccatggaggagatcctgaccagcagcgagcccctggaccctgctgaggtgggggacctcttctatgactgtgtggacacagagatcaagttcttcaagtag

SEQ ID NO: 22490 - DNA, 573 bp, synthetic construct
  source 1..573: mol_type = other DNA; note = Synthetic coding sequence
atggccctgctggccgagcacctgctgaagcccctgcctgctgacaagcagatcgagaccggccccttcctggaggccgtgagccacctgccccccttctttgactgcctgggcagccctgtgttcacccccatcaaggctgacatcagcggcaacatcaccaagatcaaggctgtgtatgacaccaacccagccaagttccgcaccctgcagaacatcctggaggtggagaaggagatcggcctgcgcttcatccaggtgttcctgcagagcatctgtgatggagagagagatgagaaccaccccaacctgatccgggtgaatgccaccaaggcctatgagatggccctgaagaagtaccacggctggatcgtgcagaagatcttccaggccgccctgtatgctgccccctacaagagtgacttcctgaaggccctgagcaagggccagaatgtgacagaggaggagtgcctggagaagatccgcctcttcctggtgaactacacagccaccattgatgtgatctatgagatgtacacccagatgaatgctgagctgaactacaaggtgtag

SEQ ID NO: 22491 - DNA, 762 bp, synthetic construct
  source 1..762: mol_type = other DNA; note = Synthetic coding sequence
atgagcatctgcagcagcctggccaggaagttccccaagctgaccatcattggagaggaggacctgcccagcgaggaggtggaccaggagctgattgaggacagccagtgggaggagatcctgaagcagccctgccccagccagtacagcgccatcaaggaggaggacctggtggtgtgggtggaccccctggatggcaccaaggagtacacagagggcctgctggacaacgtgacagtgctgattggcatcgcctatgagggcaaggccatcgccggggtcatcaaccagccctactacaactatgaggccggcccagatgctgtgctgggccgcaccatctggggcgtgctgggcctgggcgccttcggcttccagctgaaggaggtgcctgctgggaagcacatcatcaccaccaccaggagccacagcaacaagctggtgacagactgtgtggccgccatgaacccagatgctgtgctgcgggtgggcggggccggcaacaagatcatccagctgattgagggcaaggccagcgcctacgtgtttgccagccctggctgcaagaagtgggacacctgtgcccctgaggtgatcctgcatgctgtgggcggcaagctgacagacatccatggaaatgtgctgcagtaccacaaggatgtgaagcacatgaacagcgctggggtgctggccaccctgaggaactatgactactatgccagccgggtgcctgagagcatcaagaatgccctggtgccctag

SEQ ID NO: 22492 - DNA, 1590 bp, synthetic construct
  source 1..1590: mol_type = other DNA; note = Synthetic coding sequence
atgggcgcctacctgagccagcccaacacagtgaagtgcagcggagatggagtgggcgtgtccatggaggatgcccacaactgcatccctgagctggacagcgagacagccatgttttctgtgtatgatggccatggaggagaggaggtggccctgtactgtgccaagtacctgcctgacatcatcaaggaccagaaggcctacaaggagggcaagctgcagaaggccctggaggatgccttcctggccattgatgccaagctgaccacagaggaggtgatcaaggagctggcccagattgctggccggcccacagaagatgaagatgagaaggagaaggtggctgatgaagatgatgtggacaatgaggaggccgccctgctgcacgaggaggccaccatgaccatcgaggagctgctgaccaggtatggccagaactgccacaagggccccccccacagcaagagcggcggcggcaccggggaggagcccggcagccagggcctgaatggagaggccggccctgaggacagcacccgggagacccccagccaggagaatggccccacagccaaggcctacacaggcttcagcagcaacagcgagcggggcacagaagctggccaggtgggggagcccggcatccccactggagaggccggccccagctgcagcagcgccagtgacaagctgccccgggtggccaagagcaagttctttgaagattctgaagatgaaagtgatgaggccgaggaggaggaggaggacagtgaagaatgttctgaggaggaggatggctacagcagcgaggaggctgaaaatgaggaggatgaagatgacacagaggaggccgaggaggatgatgaggaggaggaggaggagatgatggtgcccggcatggagggcaaggaggagcccggcagtgacagcggcaccacagctgtggtggccctgatccggggcaagcagctgattgtggccaatgctggggacagccgctgtgtggtgtctgaggccggcaaggccctggacatgtcctatgaccacaagccagaagatgaggtggagctggcccgcatcaagaatgccggcggcaaggtgaccatggatggccgggtgaatggaggcctgaacctgagccgggccatcggggaccacttctacaagaggaacaagaacctgcccccagaggagcagatgatcagcgccctgcctgacatcaaggtgctgaccctgacagatgaccacgagttcatggtgattgcctgtgatggcatctggaatgtgatgagcagccaggaggtggtggacttcatccagagcaagatcagccagagagatgaaaatggagagctgcggctgctgagcagcatcgtggaggagctgctggaccagtgcctggccccagacaccagcggagatggcaccggctgtgacaacatgacctgcatcatcatctgcttcaagcccaggaacacagctgagctgcagcctgagagcggcaagaggaagctggaggaggtgctgagcacagaaggagctgaggagaatggaaacagcgacaagaagaagaaggccaagagggactag

SEQ ID NO: 22493 - DNA, 1293 bp, synthetic construct
  source 1..1293: mol_type = other DNA; note = Synthetic coding sequence
atgacctttgagctgtatgatgagtggatccaggccagcaatgtgcaggagcaggacaagaagctgcaggccctgtggaatgcctgtgagaagctgcccaaggccaaccacaacaacatccgctacctgatcaagttcctgagcaagctgtctgagtaccaggatgtgaacaagatgacccccagcaacatggccatcgtgctgggccccaacctgctgtggccccaggccgagggcaacatcacagagatgatgaccaccgtgtccctgcagatcgtgggcatcatcgagcccatcatccagcacgccgactggttcttccctggagaaattgagttcaacatcaccggcaactacggcagccctgtgcacgtgaaccacaatgccaactacagctccatgcccagcccagacatggaccctgctgaccggcggcagcctgagcaggcccggcggcccctgtctgtggccacagacaacatgatgctggagttctacaagaaggatggcatgggcgtgcgggtgatggacaccaactgggtggcccggcggggcagcagcgctggcaggaaggtgtcctgtgccccacccagcatgcagcccccagcccccccagctgagctggccgcccccctgcccagccccctgcctgagcagcccctggacagccctgctgccccagccctgagccccagcggcctgggcctgcagcccggccctgagaggaccagcaccaccaagagcaaggagctgagccctggcagcgcccagaagggcagccctggcagcagccagggcacagcctgtgccggcacccagcccggggcccagcccggggcccagcccggggccagccccagccccagccagcccccagctgaccagagcccccacaccctgaggaaggtgtccaagaagctggcccccatcccccccaaggtgcccttcggccagcccggggccatggctgaccagagcgctggccagcccagccctgtgtccctgagccccaccccacccagcacccccagcccctacggcctgagctacccccagggctacagcctggccagcggccagctgagccctgctgctgccccacccctggccagccccagcgtcttcaccagcaccctgagcaagagccggcccacccccaagccccggcagaggcccaccctgcccccaccccagcccccaacagtgaacctgagcgccagcagcccccagagcacagaggcccccatgctggatggcatgagccctggagagagcatgagcacagctgtgtag

SEQ ID NO: 22494 - DNA, 846 bp, synthetic construct
  source 1..846: mol_type = other DNA; note = Synthetic coding sequence
atgcctggcccccggcggctgcggagccctgggggcagcggctgcagcagccggggcagcggcccccggctgagcacccggcgctggaggccctgctgctactgcggcggcagcggcgtgtggctgctgcggaccccacccagccccagcgcctggccagcccggcgctgccccaggcacagatttgagttctgtgagcccgcctttgtggtgggcaactgcctgcagatcgccagtgacagccaccagtatgaccgcatctactgtggggccggcgtgcagaaggaccacgagaactacatgaagatcctgctgaaggtgggcggcatcctggtgatgcccatcgaggaccagctgacccagatcatgaggacaggccagaacacctgggagagcaagaacatcctggccgtgtcctttgcccccctggtgcagcccagcaagaatgacaatggcaagccagacagcgtgggcctgcccccctgtgctgtgaggaacctgcaggacctggcccgcatctacatccggaggaccctgaggaacttcatcaatgatgagatgcaggccaagggcatcccccagagggccccacccaagaggaagaggaagagggtgaagcagaggatcaacacctacgtgtttgtgggcaaccagctgatcccccagcccctggacagcgaggaggatgagaagatggaggaggacaacaaggaggaggaggagaaggaccacaatgaggccatgaagccagaggagcccccccagaacctgctgcgggagaagatcatgaagctgcccctgcctgagagcctgaaggcctacctgacctacttccgggacaagtag

SEQ ID NO: 22495 - DNA, 1251 bp, synthetic construct
  source 1..1251: mol_type = other DNA; note = Synthetic coding sequence
atgagccctgccatgctgtctgtgctggtgaagatgatgctggcccaggcccaggagagcgtgtttgagaagatcagcctgcccggcatcagaaatgagttcttcatgctggtgaaggtggcccaggaggccgccaaggtgggggaggtgtaccagcagctgcacgccgccatgagccaggcccctgtgaaggagaacatcccctacagctgggccagcctggcctgtgtgaaggcccaccactatgctgccctggcccactacttcaccgccatcctgctgattgaccaccaggtgaagccaggcacagacctggaccaccaggagaagtgcctgagccagctgtatgaccacatgcctgagggcctgacccccctggccaccctgaagaatgaccagcagaggcggcagctgggcaagagccacctgcggcgggccatggcccaccacgaggagagcgtgcgggaggccagcctgtgcaagaagctgcggagcattgaggtgctgcagaaggtgctgtgtgccgcccaggagaggagccggctgacctacgcccagcaccaggaggaggatgacctgctgaacctgattgatgcccccagcgtggtggccaagacagagcaggaggtggacatcatcctgccccagttcagcaagctgactgtgacagacttcttccagaagctgggccccctgtctgtgttcagcgccaacaagcgctggaccccacccaggagcatccgcttcaccgctgaggagggggacctgggcttcaccctgcggggaaatgcccctgtgcaggtgcacttcctggacccctactgcagcgcctctgtggccggggcccgggagggggactacatcgtgtccatccagctggtggactgcaagtggctgaccctgtctgaggtgatgaagctgctgaagagctttggagaagatgaaattgagatgaaggtggtgtccctgctggacagcaccagctccatgcacaacaagagcgccacctacagcgtgggcatgcagaagacctacagcatgatctgcctggccattgatgatgatgacaagacagacaagaccaagaagatcagcaagaagctgtccttcctgtcctggggcaccaacaagaaccggcagaagagcgccagcaccctgtgcctgcccagcgtgggcgccgcccggccccaggtgaagaagaagctgcccagccccttcagcctgctgaacagcgacagctcctggtactag

SEQ ID NO: 22496 - DNA, 6201 bp, synthetic construct
  source 1..6201: mol_type = other DNA; note = Synthetic coding sequence
atgtgcagcaccccaggcatgcctgcccctggggccagcctggccctgcgggtgtcctttgtggatgtgcacccagatgtgattcctgtgcagctgtggggcctggtgggggagaggagaggagagtacctgcggctgagccgggagatccaggaggccgccgccacccggggccagtgggccctgggcagcgccagcgccagccctggagagctgtgcctggtgcaggtgggcctgctgtggcaccgctgccgggtggtgtcccggcaggcccaggagagcagggtcttcctgctggatgagggccgcaccatcacagctggagctggcagcctggcccctggccggcgggagttcttcaacctgcccagcgaggtgctgggctgtgtgctggccggcctggtgcctgctggctgtggggccggcagcggggagcccccccagcactggccagcagatgctgtggacttcctgagcaacctgcagggcaaggaggtgcacggctgtgtgctggatgtgctgctgctgcaccggctggtgctgctggaggtgcctgatgtgttccagcagatgagggagctgggcctggcccggcgggtgcctgacagcctcttccgcagcctgctggagcgctacctgacagctgccacagcctctgtgggcagcggcgtgcctgtgctgagccgggtgcccctgaagcagaagcagcccggcctggactacttctacccccagctgcagctgggcgtgacagaagctgtggtgatcacccaggtgtgccacccccaccgcatccactgccagctgcggtctgtgtcccaggagatccaccggctgtctgagagcatggcccaggtgtaccggggcagcactggaactggagatgagaacagcaccagcgccacctgggaggagcgggaggagagcccagacaagccaggcagcccctgtgccagctgtggcctggatggccactggtaccgggccctgctgctggagaccttccggccccagagatgtgcccaggtgctgcacgtggactatggcaggaaggagctggtgtcctgcagcagcctgcgctacctgctgcctgagtacttcaggatgcctgtggtgacctacccctgtgccctgtatggcctgtgggatggcggccggggctggagccgcagccaggtgggggacctgaagaccctcatcctgggcaaggctgtgaatgccaagattgagttctactgcagctttgaacatgtgtactacgtgtccctgtatggagaagatggcatcaacctgaacagagtgtttggagtgcagagctgctgcctggccgacagagtgctgcagagccaggccacagaggaggaggagcctgagaccagccagagccagagccctgctgaggaggtggatgaggagatcagcctgcctgccctgcggagcatccggctgaagatgaatgccttctatgatgcccaggtggagtttgtgaagaaccccagcgagttctggatccggctgaggaagcacaacgtgaccttcagcaagctgatgaggaggatgtgtggcttctacagcagcgccagcaagctggatggagtggtgctgaagccagagccagatgacctgtgctgcgtgaagtggaaggaaaatggctactaccgggccatcgtgaccaagctggatgacaagtctgtggatgtgttcctggtggaccggggcaacagtgaaaatgtggactggtatgatgtgaggatgctgctgccccagttccggcagctgcccatcctggccgtgaagtgcaccctggccgacatctggcccctgggcaagacctggagccaggaggccgtgtccttcttcaagaagacagtgctgcacaaggagctggtgatccacatcctggacaagcaggaccaccagtatgtgattgagatcctggatgagagcaggactggagaggagaacatcagcaaggtgattgcccaggccggctacgccaagtaccaggagtttgagaccaaggagaacatcctggtgaatgcccacagccctggccacgtgagcaaccacttcaccacagagagcaacaagatcccctttgccaagacaggagagggggagcagaaggccaagcgggagaacaagaccacctctgtgtccaaggccctgagtgacaccaccgtggtgaccaacggcagcacagagctggtggtgcaggagaaggtgaagagggcctctgtgtacttccccctgatgcagaactgcctggagatcaagccaggcagcagcagcaaaggagagctggaggtgggcagcacagtggaggtgcgggtgtcctatgtggagaaccctggctacttctggtgccagctgaccaggaacatccagggcctgaagaccctgatgtctgacatccagtactactgcaagaacacagctgccccccaccagaggaacaccctggcctgcctggccaagaggacagtgaaccggcagtggagccgggccctgatcagcggcatccagagcgtggagcacgtgaatgtgacctttgtggactatggagaccgggagatggtgtctgtgaagaacatctacagcatcagcgaggagttcctgaaggtgaaggcccaggccttccgctgcagcctgtacaacctgatccagcctgtgggccagaacccctttgtgtgggatgtgaaggccatccaggccttcaatgagttcatcgacaatgcctggcagaagaacctggagctgaagtgcaccatctttgccctggccagcatcaatgaggagctgttcaacatcgtggacctgctgacccccttccagagcgcctgccacttcctggtggagaagaggctggcccggcctgtgaagctgcagaagcccctggagagctctgtgcagctgcacagctacttctacagcacccatgacatgaagattggcagcgaggagctggtgtacatcacccacattgatgacccctggaccttctactgccagctggccagaaatgccaacatcctggagcagctgagctgcagcatcacccagctgagcaaggtgctgctgaacctgaagaccagccccctgaaccctggcaccctgtgcctggccaagtacacagatggcaactggtaccggggcatcgtgattgagaaggagcccaagaaggtgttctttgtggactttggaaacatctacgtggtgaccagtgatgacctgctgcccatccccagtgatgcctatgatgtgctgctgctgcccatgcaggccgtgcgctgcagcctgagtgacatcccagaccacatccctgaggaggtggtggtgtggttccaggagaccatcctggacaagagcctgaaggccctggtggtggccaaggaccctgatggcaccctcatcatcgagctgtatggagacaacatccagatcagcgccagcatcaacaagaagctgggcctgctgagctacaaggaccgcatcaggaagaaggagagcgaggtgctgtgcagcaccacagagaccctggaggagaagaatgaaaacatgaagctgccctgcacagagtacctgagcaagtctgtgggctacaagctgcccaacaaggagatcctggaggagagctacaagccccagatcaacagcagctacaaggagctgaagctgctgcagagcctgaccaagaccaacctggtgacccagtaccaggacagcgtgggcaacaagaacagccaggtgttccccctgaccacagagaagaaggaggagatctctgctgagacccccctgaagacagcccgggtggaggccaccctgtctgagaggaagattggagacagctgtgacaaggacctgcccctgaagttctgtgagttcccccagaagaccatcatgcctggcttcaagaccaccgtgtatgtgagccacatcaatgacctgagtgacttctacgtgcagctgattgaagatgaagctgagatcagccacctgtctgagcggctgaacagcgtgaagaccaggcctgagtactacgtgggcccccccctgcagagaggagacatgatctgtgctgtgtttcctgaggacaacctgtggtaccgggccgtcatcaaggagcagcagcccaatgacctgctgtctgtgcagttcatcgactatggaaatgtgtctgtggtgcacaccaacaagattggccgcctggacctggtgaatgccatcctgcccggcctgtgcatccactgcagcctgcagggctttgaggtgcctgacaacaagaacagcaagaagatgatgcactacttcagccagaggaccagcgaggccgccatccgctgtgaatttgtgaagttccaggaccgctgggaggtgatcctggctgatgagcacggcatcatcgcagatgacatgatcagccgctatgccctgtctgagaagagccaggtggagctgagcacccaggtgatcaagagcgccagcagcaagtctgtgaacaagagtgacatcgacaccagcgtcttcctgaactggtacaaccctgagaagaagatgatccgggcctatgccaccgtgattgatggccctgagtacttctggtgccagtttgctgacacagagaagctgcagtgcctggaggtggaggtgcagacagctggggagcaggtggccgacagaagaaactgcatcccctgcccctacatcggggacccctgcatcgtgcgctaccgggaggatggccactactaccgggccctgatcaccaacatctgtgaggactacctggtgtctgtgcggctggtggactttggaaatattgaggactgtgtggaccccaaggccctgtgggccatccccagcgagctgctgtctgtgcccatgcaggccttcccctgctgcctgagcggcttcaacatcagcgagggcctgtgcagccaggagggcaatgactacttctatgagatcatcacagaagatgtgctggagatcaccatcctggagatcagaagagatgtgtgtgacatccccctggccatcgtggacctgaagagcaagggcaagagcatcaatgagaagatggagaagtacagcaagacaggcatcaagagcgccctgccctatgagaacatcgacagcgagatcaagcagaccctgggcagctacaacctggatgtgggcctgaagaagctgagcaacaaggctgtgcagaacaagatctacatggagcagcagacagatgagctggccgagatcacagagaaggatgtgaacatcatcggcaccaagcccagcaacttccgggaccccaagacagacaacatctgtgagggctttgagaacccctgcaaggacaagattgacacagaggagctggagggggagctggagtgccacctggtggacaaggccgagtttgatgacaagtacctgatcaccggcttcaacaccctgctgccccacgccaatgagaccaaggagatcctggagctgaacagcctggaggtgcccctgagcccagatgatgagagcaaggagttcctggagctggagagcattgagctgcagaacagcctggtggtggatgaggagaagggggagctgagccctgtgcccccaaatgtgcccctgagccaggagtgtgtgaccaagggggccatggagctgttcaccctgcagctgcccctgagctgtgaggccgagaagcagcctgagctggagctgcccacagcccagctgcccctggatgacaagatggaccccctgagcctgggcgtgtcccagaaggcccaggagagcatgtgcacagaggacatgaggaagagcagctgtgtggagagctttgatgaccagaggaggatgagcctgcacctgcacggggctgactgtgaccccaagacccagaatgagatgaacatctgtgaggaggagtttgtggagtacaagaacagagatgccatcagcgccctgatgcccctcttcagcgaggaggagagcagtgatggcagcaagcacaacaacggcctgcctgaccacatcagcgcccagctgcagaacacctacaccctgaaggccttcaccgtgggcagcaaatgtgtggtgtggagcagcctgaggaacacctggagcaaatgtgagatcctggagacagctgaggagggcaccaggaagaggggcctggaggtgatggagatctag

SEQ ID NO: 22497 - DNA, 264 bp, synthetic construct
  source 1..264: mol_type = other DNA; note = Synthetic coding sequence
atgagcagctgtgtgagcagccagcccagcagcaacagagctgccccccaggatgagctgggcggccggggcagcagcagcagcgagagccagaagccctgtgaggccctgcggggcctgagcagcctgagcatccacctgggcatggagagcttcatcgtggtgacagaatgtgagcccggctgtgctgtggacctgggcctggcccgggaccggcccctggaggctgatggccaggaggtgcccctggacaccagcggctag

SEQ ID NO: 22498 - DNA, 2469 bp, synthetic construct
  source 1..2469: mol_type = other DNA; note = Synthetic coding sequence
atggctgctgagggggaccctgagtggggccccaccccacccagcaccagcgccaccacagctgccaggagagctgtgaacaaggtggtgtatgatgaccacgagagcgaggaggaggaggaggaggaggacatggtgtctgaggaggaggaggaggaggatggagatgctgaggagacccaggacagtgaagatgatgaggaggatgagatggaggaggatgatgatgacagcgactacccagaggagatggaggatgatgatgatgatgccagctactgcacagagagcagcttccgcagccacagcacctacagcagcaccccaggaagaaggaagccccgggtgcaccggcccaggagccccatcctggaggagaaggacatcccccccctggagttccccaagagcagcgaggacctgatggtgcccaatgagcacatcatgaatgtcatcgccatctatgaggtgctgaggaactttggaacagtgctgcggctgagccccttccgctttgaggacttctgtgccgccctggtgtcccaggagcagtgcaccctgatggccgagatgcacgtggtgctgctgaaggctgtgctgcgggaggaggacaccagcaacaccaccttcggccctgctgacctgaaggacagcgtgaacagcaccctgtacttcattgatggcatgacctggccagaggtgctgcgggtgtactgtgagagtgacaaggagtaccaccacgtgctgccctaccaggaggccgaggactacccctacggccctgtggagaacaagatcaaggtgctgcagttcctggtggaccagttcctgaccaccaacatcgcccgggaggagctgatgtctgagggcgtcatccagtatgatgaccactgccgggtgtgccacaagctgggggacctgctgtgctgtgagacctgcagcgctgtgtaccacctggagtgtgtgaagccacccctggaggaggtgcctgaagatgagtggcagtgtgaggtgtgtgtggcccacaaggtgcctggggtgacagactgtgtggccgagatccagaagaacaagccctacatcagacatgagcccatcggctatgacaggagcaggaggaagtactggttcctgaacagaagactcatcatcgaggaggacacagaaaatgaaaatgagaagaagatctggtactacagcaccaaggtgcagctggccgagctgattgactgcctggacaaggactactgggaggccgagctgtgcaagatcctggaggagatgagggaggagatccaccgccacatggacatcacagaggacctgaccaacaaggcccggggcagcaacaagagcttcctggccgccgccaatgaggagatcctggagagcatccgggccaagaagggggacatcgacaacgtgaagagccctgaggagacagagaaggacaagaatgaaacagaaaatgacagcaaggatgctgagaagaaccgggaggagtttgaggaccagagcctggagaaggacagtgatgacaagaccccagatgatgatcctgagcagggcaagtctgaggagcccacagaggtgggggacaagggcaacagcgtgtctgccaacctgggggacaacaccaccaatgccaccagcgaggagaccagccccagcgagggccgcagccctgtgggctgcctgtctgagaccccagacagcagcaacatggccgagaagaaggtggccagcgagctgccccaggatgtgcctgaggagcccaacaagacctgtgagagcagcaacaccagcgccaccaccaccagcatccagcccaacctggagaacagcaacagcagcagcgagctgaacagcagccagagcgagagcgccaaggccgcagatgatcctgaaaatggagagcgggagagccacacccctgtgtccatccaggaggagatcgtgggggacttcaagtctgagaagagcaatggagagctgtctgagagccctggagctggaaaaggagccagcggcagcacccgcatcatcacccggctgaggaacccagacagcaagctgagccagctgaagagccagcaggtggccgctgctgcccacgaggccaacaagctgttcaaggagggcaaggaggtgctggtggtgaacagccagggcgagatcagccggctgagcaccaagaaggaggtgatcatgaagggcaacatcaacaactacttcaagctgggccaggagggcaagtacagagtgtaccacaaccagtacagcaccaacagctttgccctgaacaagcaccagcaccgggaggaccatgacaagagaagacacctggcccacaagttctgcctgaccccagctggggagttcaagtggaatggatctgtgcacggcagcaaggtgctgaccatcagcaccctgcggctgaccatcacccagtacggggagaacctgtag

SEQ ID NO: 22499 - DNA, 552 bp, synthetic construct
  source 1..552: mol_type = other DNA; note = Synthetic coding sequence
atgctgcagcagacctggaccagccgctgcctgatgaagttctatgctgtggtggccaccagccctgcctcctgggagagccacaagattgctgagcgcatcgagcagaggatcctgaacagcaaccctgtgatggaggcctttggaaatgcctgcaccctgaggaacaacaacagcagcagatttgggaagttcatccagctgcagctgaacagagcccagcagatgactggagctgctgtgcagacctacctgctggagaagaccagggtggcctgccaggccagcagcgagaggaacttccacatcttctaccagatctgcaagggggcctctgaagatgagcggctgcagtggcacctgcctgagggcgccgccttctcctggctgcccaaccctgagaggagcctggaggaggactgctttgaggtgacccgggaggccatgctgcacctgggcatcgacacccccacccagaacaacatcttcaaggtgcggaggaaggccacccccctgaagtttggaagagatgatggccagccctttgcctag

SEQ ID NO: 22500 - DNA, 744 bp, synthetic construct; identical to SEQ ID NO: 20004
  source 1..744: mol_type = other DNA; note = Synthetic coding sequence

SEQ ID NO: 22501 - DNA, 981 bp, synthetic construct
  source 1..981: mol_type = other DNA; note = Synthetic coding sequence
atgctgggcggcgtgggggaggagaatgagaagctgtggagcttcaccaagaaggccagccacatccagctggacagcctgcctgaggtgcccctgctggtggatgtgccctgcctgagcgcccagctggatgacagcatcctgaacatcgtgaaggaccacatcttcaagcacggcaccgtggccagcaggcctcctgtgcagatcgaggagctgattgagaagccaggcggcatcatcgtgcgctggtgcaaggtggatgatgacttcaccgcccaggactaccgcctgcagttcaggaagtgcaccagcaaccactttgaagatgtgtatgtgggcagcgagacagagttcatcgtgctgcacatcgaccccaacgtggactaccagttccgggtgtgtgcccggggagatggccggcaggagtggagcccctggagcgtgccccagatcggccacagcaccctggtgccccatgagtggacagctggctttgagggctacagcctgagcagcagaagaaacatcgccctgagaaatgacagcgagagcagtggagtgctgtacagccgggcccccacctacttctgtggccagaccctgaccttccgggtggagaccgtgggccagcctgacagaagagacagcattggagtgtgtgccgagaagcaggacggctatgacagcctgcagagggaccaggccgtgtgcatcagcaccaatggagctgtgtttgtgaatggcaaggagatgaccaaccagctgcctgctgtgaccagcggcagcacagtgacctttgacatcgaggccgtgaccctgggcaccaccagcaacaatgaaggaggccacttcaagctgcgggtgaccatcagcagcaacaaccgggaggtggtgtttgactggctgctggaccagagctgtggcagcctgtacttcggctgcagcttcttctacccaggctggaaggtgctggtgttctag

SEQ ID NO: 22502 - DNA, 2436 bp, synthetic construct
  source 1..2436: mol_type = other DNA; note = Synthetic coding sequence
atggtgtctgaggaggaggaggaggaggatggagatgctgaggagacccaggacagtgaagatgatgaggaggatgagatggaggaggatgatgatgacagcgactacccagaggagatggaggatgatgatgatgatgccagctactgcacagagagcagcttccgcagccacagcacctacagcagcaccccaggaagaaggaagccccgggtgcaccggcccaggagccccatcctggaggagaaggacatcccccccctggagttccccaagagcagcgaggacctgatggtgcccaatgagcacatcatgaatgtcatcgccatctatgaggtgctgaggaactttggaacagtgctgcggctgagccccttccgctttgaggacttctgtgccgccctggtgtcccaggagcagtgcaccctgatggccgagatgcacgtggtgctgctgaaggctgtgctgcgggaggaggacaccagcaacaccaccttcggccctgctgacctgaaggacagcgtgaacagcaccctgtacttcattgatggcatgacctggccagaggtgctgcgggtgtactgtgagagtgacaaggagtaccaccacgtgctgccctaccaggaggccgaggactacccctacggccctgtggagaacaagatcaaggtgctgcagttcctggtggaccagttcctgaccaccaacatcgcccgggaggagctgatgtctgagggcgtcatccagtatgatgaccactgccgggtgtgccacaagctgggggacctgctgtgctgtgagacctgcagcgctgtgtaccacctggagtgtgtgaagccacccctggaggaggtgcctgaagatgagtggcagtgtgaggtgtgtgtggcccacaaggtgcctggggtgacagactgtgtggccgagatccagaagaacaagccctacatcagacatgagcccatcggctatgacaggagcaggaggaagtactggttcctgaacagaagactcatcatcgaggaggacacagaaaatgaaaatgagaagaagatctggtactacagcaccaaggtgcagctggccgagctgattgactgcctggacaaggactactgggaggccgagctgtgcaagatcctggaggagatgagggaggagatccaccgccacatggacatcacagaggacctgaccaacaaggcccggggcagcaacaagagcttcctggccgccgccaatgaggagatcctggagagcatccgggccaagaagggggacatcgacaacgtgaagagccctgaggagacagagaaggacaagaatgaaacagaaaatgacagcaaggatgctgagaagaaccgggaggagtttgaggaccagagcctggagaaggacagtgatgacaagaccccagatgatgatcctgagcagggcaagtctgaggagcccacagaggtgggggacaagggcaacagcgtgtctgccaacctgggggacaacaccaccaatgccaccagcgaggagaccagccccagcgagggccgcagccctgtgggctgcctgtctgagaccccagacagcagcaacatggccgagaagaaggtggccagcgagctgccccaggatgtgcctgtgggggacttcaagtctgagaagagcaatggagagctgtctgagagccctggggccggcaagggggccagcggcagcacccgcatcatcacccggctgagaaatccagacagcaagctgagccagctgaagagccagcaggtggccgccgccgcccacgaggccaacaagctgttcaaggagggcaaggaggtgctggtggtgaacagccagggcgagatcagccggctgagcaccaagaaggaggtgatcatgaagggcaacatcaacaactacttcaagctgggccaggagggcaagtacagagtgtaccacaaccagtacagcaccaacagctttgccctgaacaagcaccagcacagagaagatcatgacaagaggaggcacctggcccacaagttctgcctgaccccagctggggagttcaagtggaatggatctgtgcacggcagcaaggtgctgaccatcagcaccctgcggctgaccatcacccagctggagaacaacatccccagcagcttcctgcaccccaactgggccagccaccgggccaactggatcaaggctgtgcagatgtgcagcaagccccgggagtttgccctggccctggccatcctggagtgtgctgtgaagcctgtggtgatgctgcccatctggagggagagcctgggccacacccggctgcacaggatgaccagcattgagcgggaggagaaggagaaggtgaagaagcgggaggagactggaagaagaagaaatgatgctgccagtgacatgggcaagatccacatcagcagctag

SEQ ID NO: 22503 - DNA, 1752 bp, synthetic construct
  source 1..1752: mol_type = other DNA; note = Synthetic coding sequence
atggcccctgagctgaccccagaggaggagcaggccaccaagcagttcctggaggagatcaacaagtggacagtgcagtacaacgtgagccccctgtcctggaatgtggccgtgaagttcctgatggccaggaagtttgatgtgctgcgggccatcgagctgttccacagctaccgggagaccaggaggaaggagggcatcgtgaagctgaagccccatgaggagcccctgcggtctgagatcctgagcggcaagttcaccatcctgaatgtgcgggaccccactggagccagcatcgccctcttcaccgcccggctgcaccacccccacaagtctgtgcagcacgtggtgctgcaggccctcttctacctgctggacagagctgtggacagctttgagacccagagaaatggcctggtgttcatctatgacatgtgtggcagcaactatgccaactttgagctggacctgggcaagaaggtgctgaacctgctgaagggggccttccctgcccggctgaagaaggtgctgattgtgggcgcccccatctggttccgggtgccctacagcatcatcagcctgctgctgaaggacaaggtgcgggagcgcatccagatcctgaagaccagcgaggtgacccagcacctgcccagagaatgtctgcctgagaacctgggcggctacgtgaagattgacctggccacctggaacttccagttcctgccccaggtgaatggccacccagacccctttgatgagatcatcctcttcagcctgcccccagccctggactgggacagcgtgcacgtgcccggcccccacgccatgaccatccaggagctggtggactatgtgaatgcccggcagaagcagggcatctatgaggagtatgaggacatcagaagagaaaatcctgtgggcaccttccactgcagcatgagccctggcaacctggagaagaacagatatggagatgtgccctgcctggaccagaccagggtgaagctgaccaagaggagcggccacacccagacagactacatcaatgccagcttcatggatggctacaagcagaagaatgcctacatcggcacccagggccccctggagaacacctacagagacttctggctgatggtgtgggagcagaaggtgctggtgattgtgatgaccaccaggtttgaggagggcggcagaagaaaatgtggccagtactggcccctggagaaggacagccgcatccgcttcggcttcctgactgtgaccaacctgggcgtggagaacatgaaccactacaagaagaccaccctggagatccacaacacagaggagcggcagaagaggcaggtgacccacttccagttcctgtcctggccagactatggagtgcccagcagcgctgccagcctgattgacttcctgcgggtggtgaggaaccagcagagcctggccgtgagcaacatgggcgcccggagcaagggccagtgcccagagccccccatcgtggtgcactgcagcgctggcattggaagaacaggcaccttctgcagcctggacatctgcctggcccagctggaggagctgggcaccctgaatgtgttccagacagtgtccaggatgaggacccagagggccttcagcatccagaccccagagcagtactacttctgctacaaggccatcctggagtttgctgagaaggagggcatggtgagcagcggccagaacctgctggccgtggagagccagtag

SEQ ID NO: 22504 - DNA, 396 bp, synthetic construct; identical to SEQ ID NO: 22413
  source 1..396: mol_type = other DNA; note = Synthetic coding sequence

SEQ ID NO: 22505 - DNA, 435 bp, synthetic construct
  source 1..435: mol_type = other DNA; note = Synthetic coding sequence
atggcctctgtggccgccgcccgggctgtgcctgtgggcagcggcctgcggggcctgcagaggaccctgcccctggtggtgatcctgggcgccaccggcaccgggaagagcaccctggccctgcagctgggccagaggctgggcggggagatcgtgtctgctgacagcatgcaggtgtatgagggcctggacatcatcaccaacaaggtgtctgcccaggagcagaggatctgccgccaccacatgatcagctttgtggaccccctggtgaccaactacacagtggtggacttcaggaacagagccacagccctgattgaggacatctttgcccgggacaagatccccatcgtggtgggcggcaccaactactacatcgagagcctgctgtggaaggtgctggtgaacaccaaggtgtccctggtgcacagctag

SEQ ID NO: 22506 - DNA, 1386 bp, synthetic construct
  source 1..1386: mol_type = other DNA; note = Synthetic coding sequence
atggccgccagcagcctggagcagaagctgagccggctggaggccaagctgaagcaggagaaccgggaggcccggaggagaattgacctgaacctggacatcagcccccagaggccccggcccaccctgcagctgcccctggccaatgatggcggcagccgcagccccagcagcgagagcagcccccagcaccccaccccaccagcccggcccaggcacatgctgggcctgcccagcaccctcttcacccccaggtccatggagagcattgaaattgaccagaagctgcaggagatcatgaagcagacaggctacctgaccatcggcggccaggtgccccccagcctgtggagaggagagggcggcggccctgcccggctggaccccagctgggagcggcagtggggcgccggcggcggcggccggcccggcaccctgcagcccagcctgagcagccagcgctaccaggccgagatcaatgacctggagaacctgggggagatgggcagcggcacctgtggccaggtgtggaagatgaggttcaggaagacaggccacgtgattgctgtgaagcagatgaggaggagcggcaacaaggaggagaacaagaggatcctgatggacctggatgtggtgctgaagagccatgactgcccctacatcgtgcagtgcttcggcaccttcatcaccaacacagatgtgttcatcgccatggagctgatgggcacctgtgccgagaagctgaagaagaggatgcagggccccatccctgagcgcatcctgggcaagatgacagtggccatcgtgaaggccctgtactacctgaaggagaagcatggagtcatccacagagatgtgaagcccagcaacatcctgctggatgagcggggccagatcaagctgtgtgactttggcatcagcggccgcctggtggacagcaaggccaagaccaggtctgctggctgtgccgcctacatggcccctgagagaattgatcctccagaccccaccaagccagactatgacatccgggcagatgtgtggagcctgggcatcagcctggtggagctggccaccggccagttcccctacaagaactgcaagacagactttgaggtgctgaccaaggtgctgcaggaggagccccccctgctgcccggccacatgggcttcagcggggacttccagagctttgtgaaggactgcctgaccaaggaccacaggaagaggcccaagtacaacaagctgctggagcacagcttcatcaagagatatgagaccctggaggtggatgtggcctcctggttcaaggatgtgatggccaagacagagagccccaggaccagcggcgtgctgagccagccccacctgcccttcttcagatag

SEQ ID NO: 22507 - DNA, 1611 bp, synthetic construct
  source 1..1611: mol_type = other DNA; note = Synthetic coding sequence
atggagaccagtgacatccagatcttctaccaggaggaccctgagtgccagaacctgtctgagaacagctgccccccatctgaggtgtctgacaccaacctgtacagccccttcaagcccaggaactaccagctggagctggccctgcctgccatgaagggcaagaacaccatcatctgtgcccccaccggctgcggcaagacctttgtgtccctgctgatctgtgagcaccacctgaagaagttcccccagggccagaagggcaaggtggtgttctttgccaaccagatccctgtgtatgagcagcagaagtctgtgttcagcaagtactttgagcggcacggctacagagtgacaggcatcagcggggccacagcagaaaatgtgcctgtggagcagatcgtggagaacaatgacatcatcatcctgaccccccagatcctggtgaacaacctgaagaagggcaccatccccagcctgagcatcttcaccctgatgatctttgatgagtgccacaacaccagcaagcagcacccctacaacatgatcatgttcaactacctggaccagaagctgggcggcagcagcggccccctgccccaggtgattggcctgacagcctctgtgggcgtgggagatgccaagaacacagatgaggccctggactacatctgcaagctgtgtgccagcctggatgccagcgtcatcgccaccgtgaagcacaacctggaggagctggagcaggtggtgtacaagccccagaagttcttcaggaaggtggagagccgcatcagtgacaagttcaagtacatcatcgcccagctgatgagggacacagagagcctggccaagaggatctgcaaggacctggagaacctgagccagatccagaaccgggagtttggcacccagaagtatgagcagtggatcgtgacagtgcagaaggcctgcatggtgttccagatgccagacaaggatgaggagagccgcatctgcaaggccctcttcctgtacaccagccacctgaggaagtacaatgatgccctgatcatcagcgagcacgccaggatgaaggatgccctggactacctgaaggacttcttcagcaatgtgcgggccgccggctttgatgaaattgagcaggacctgacccagagatttgaggagaagctgcaggagctggagagcgtgtcccgggaccccagcaatgaaaaccccaagctggaggacctgtgcttcatcctgcaggaggagtaccacctgaaccctgagaccatcaccatcctgtttgtgaagacccgggccctggtggatgccctgaagaactggattgagggcaaccccaagctgtccttcctgaagccaggcatcctgaccggccggggcaagaccaaccagaacacaggcatgaccctgcctgcccagaagtgcatcctggatgccttcaaggccagcggggaccacaacatcctgattgccacctctgtggctgatgagggcattgatattgcccagtgcaacctggtgatcctgtatgaatatgtgggcaatgtcatcaagatgatccagacccgggaggaggagcaggaggtggccagcgccagcttctag

SEQ ID NO: 22508 - DNA, 2883 bp, synthetic construct; identical to SEQ ID NO: 18452
  source 1..2883: mol_type = other DNA; note = Synthetic coding sequence

SEQ ID NO: 22509 - DNA, 666 bp, synthetic construct
  source 1..666: mol_type = other DNA; note = Synthetic coding sequence
atgctggccgccggcctgctggaggagctgcgggacttccaccggcgctacaaccagaagaatgtgtctgagaacagccaggactaccagcacggcatcttccagagcatcggcttcaaggagttccacgagtacctgatcacagagggcaagtgcaccctggagaccagcaaccagctgctgaagaagggcatcgaggccctgaagcaggtgaccaagagatatgccaggaagcagaaccgctgggtgaagaaccgcttcctgagcaggcctggccccatcgtgccccctgtgtatggcctggaggtgtctgatgtgtccaagtgggaggagagcgtgctggagcccgccctggagatcgtgcagagcttcatccagggccacaagcccacagccacccccatcaagatgccctacaatgaagctgagaacaagaggagctaccacctgtgtgacctgtgtgaccgcatcatcattggagaccgggagtgggccgcccacatcaagagcaagagccacctgaaccagctgaagaagagaagaaggctggacagtgatgctgtgaacaccatcgagagccagagcgtgtccccagaccacaacaaggagcccaaggagaagggcagccctggccagaatgaccaggagctgaagtgcagcgtgtag

SEQ ID NO: 22510 - DNA, 2649 bp, synthetic construct
  source 1..2649: mol_type = other DNA; note = Synthetic coding sequence
atgccccgggtgaagcccaagctggagaagcagctgcagaaggacaaggagaaggtggaggagttcaagagcatcccagccaagagcaacaacatcatcaatgagaccaccaccagaaataatgccctggagaaggagaaggagaaggaggagaagaagctgaaggaggtgatggacagcctgaagcaggagacccagggcctgcagaaggagaaggagagccgggagaaggagctgatgggcttcagcaagtctgtgaatgaggcccggagcaagatggatgtggcccagagcgagctggacatctacctgagccgccacaacacagctgtgtcccagctgaccaaggccaaggaggccctgattgctgccagcgagaccctgaaggagaggaaggccgccatccgggacatcgagggcaagctgccccagacagagcaggagctgaaggagaaggagaaggagctgcagaagctgacccaggaggagaccaacttcaagagcctggtgcatgacctcttccagaaggtggaggaggccaagagcagcctggccatgaacagaagccggggcaaggtgctggatgccatcatccaggagaagaagagcggccgcatccctggcatctacggccgcctgggggacctgggcgccattgatgagaagtatgatgtggccatcagcagctgctgccacgccctggactacatcgtggtggacagcattgacatcgcccaggagtgtgtgaacttcctgaagaggcagaacattggagtggccaccttcatcggcctggacaagatggctgtgtgggccaagaagatgacagagatccagaccccagagaacaccccccggctgtttgacctggtgaaggtgaaggatgagaagatccggcaggccttctactttgccctgcgggacaccctggtggccgacaacctggaccaggccaccagggtggcctaccagaaggaccggcgctggagggtggtgaccctgcagggccagatcatcgagcagagcggcaccatgactggaggcggcagcaaggtgatgaagggccgcatgggcagcagcctggtgattgagatcagcgaggaggaggtgaacaagatggagagccagctgcagaatgacagcaagaaggccatgcagatccaggagcagaaggtgcagctggaggagcgggtggtgaagctgcggcacagcgagcgggagatgaggaacaccctggagaagttcaccgccagcatccagaggctgattgagcaggaggagtacctgaatgtgcaggtgaaggagctggaggccaacgtgctggccacagccccagacaagaagaagcagaagctgctggaggagaatgtgtctgccttcaagacagaatatgatgctgtggccgagaaggccggcaaggtggaggccgaggtgaagaggctgcacaacaccatcgtggagatcaacaaccacaagctgaaggcccagcaggacaagctggacaagatcaacaagcagctggatgaatgtgccagcgccatcaccaaggcccaggtggccatcaagacagctgacaggaacctgcagaaggcccaggacagcgtgctgaggacagagaaggagatcaaggacacagagaaggaggtggatgacctgacagctgagctgaagagcctggaggacaaggctgctgaggtggtgaagaacaccaatgctgctgaggagagcctgcctgagatccagaaggagcacaggaacctgctgcaggagctgaaggtgatccaggagaatgaacatgccctgcagaaggatgccctgagcatcaagctgaagctggagcagattgatggccacatcgccgagcacaacagcaagatcaagtactggcacaaggagatcagcaagatcagcctgcaccccatcgaggacaaccccatcgaggagatctctgtgctgagccctgaggacctggaggccatcaagaacccagacagcatcaccaaccagatcgccctgctggaggcccgctgccacgagatgaagcccaacctgggcgccatcgccgagtacaagaagaaggaggagctgtacctgcagagggtggccgagctggacaagatcacctatgagcgggacagcttccggcaggcctatgaggacctgaggaagcagaggctgaatgagttcatggccggcttctacatcatcaccaacaagctgaaggagaactaccagatgctgaccctgggcggagatgctgagctggagctggtggacagcctggaccccttcagcgagggcatcatgttttctgtgcggccccccaagaagtcctggaagaagatcttcaacctgagcggcggggagaagaccctgagcagcctggccctggtgtttgccctgcaccactacaagcccacccccctgtacttcatggatgaaattgatgctgccctggacttcaagaatgtgtccatcgtggccttctacatctatgagcagaccaagaatgcccagttcatcatcatcagcctgaggaacaacatgtttgagatcagtgaccggctgattggcatctacaagacctacaacatcaccaagtctgtggccgtgaaccccaaggagatcgccagcaagggcctgtgctag

SEQ ID NO: 22511 - DNA, 1038 bp, synthetic construct
  source 1..1038: mol_type = other DNA; note = Synthetic coding sequence
atgttcctgacccggcccaaggtgtgtgtggacctgaacagaagagtgaccctgtatggagtcttcaccatccacttcagccccaacgtgcccagccgctgcctgctgctggagctgctggatgtgtctgtgtctgagctgctgctgtacagcagccaccagggctgcagcatgtggatgatccagcactgtgccagagatgtgctggaggccctggccttcctgcaccacgagggctacgtgcatgctgacctgaagcccaggaacatcctgtggagcgcagaaaatgaatgcttcaagctgattgactttggcctgtccttcaaggagggcaaccaggatgtgaagtacatccagacagatggctaccgggcccctgaggccgagctgcagaactgcctggcccaggccggcctgcagagcgacacagagtgcaccagcgctgtggacctgtggagcctgggcatcatcctgctggagatgttttctggcatgaagctgaagcacacagtgcgcagccaggagtggaaggccaacagcagcgccatcatcgaccacatctttgccagcaaggctgtggtgaatgctgccatcccagcctaccacctgcgggacctgatcaagtccatgctgcatgatgaccccagccgccgcatcccagctgagatggccctgtgcagccccttcttcagcatcccctttgccccccacatcgaggacctggtgatgctgcccacccctgtgctgcggctgctgaatgtgctggatgatgactacctggagaatgaggaggagtatgaagatgtggtggaggatgtgaaggaggagtgccagaagtatggccctgtggtgtccctgctggtgcccaaggaaaatcctggccggggccaggtgtttgtggagtatgccaatgctggggacagcaaggccgcccagaagctgctgaccggccgcatgtttgatggcaagtttgtggtggccaccttctaccccctgagcgcctacaagaggggctacctgtaccagaccctgctgtag

SEQ ID NO: 22512 - DNA, 954 bp, synthetic construct
  source 1..954: mol_type = other DNA; note = Synthetic coding sequence
atgtggctggcccgggagggcatcgtggcccccctgcctggagagtggaagccctgccaggacatcactggagacatctactacttcaactttgccaacggccagagcatgtgggaccacccctgtgatgagcactaccgcagcctggtgatccaggagcgggccaagctgagcaccagcggggccatcaagaagaagaagaagaagaaggagaagaaggacaagaaggaccgggacccccccaagagcagcctggagacccagcctgaggagggcctgctgccccccagcagcttcctgtgcagcctgagccccccatctgcccctggcctggccgacctggacctggaccaggagatgcaggccatcagcgagggcagctacaacaagggcaagagccctggcatgctgggggacaccccctggaggttcatgggcgccctgcccaggaagctgcagcccctgagcaagggccagcccagccagatccaccaggtgtttgctgacatggagaagatcctgggccgggccccagcccagtgccggcgggagctgggggaccagcagggcctggagaagctgcagaaggccacagagaagatctacctgggcttcagtgaccctgagacagaggagctggagatgaggagccggcagcagaagctgggcaccccagccccccagaacacaggcctgctgcagaacatgcaggatgtggtggagagcaggaaccaggcctctgtgcacagcaagctgtctgaggccatcaagggcctgcccctgaagggggagcagcacagccacagcctggccaagctgagccccaccggccctggaggagacaagggccagagccccatccccatgtggatctgctgccgcctgcgggccagcaactgcaggaacaccagcgctgcctggaggctgaagctgaagaggagcagcacctgctag

SEQ ID NO: 22513 - DNA, 162 bp, synthetic construct
  source 1..162: mol_type = other DNA; note = Synthetic coding sequence
atgggcaacagcgacagccagtacaccctgcagggcagcaagaaccacagcaacaccatcactggagccaagcagatcccctgcagcctgaagatccggggcatccacgccaaggaggagaagagcctgcacggctggggccacggcagcaatggagcctag

SEQ ID NO: 22514 - DNA, 1203 bp, synthetic construct
  source 1..1203: mol_type = other DNA; note = Synthetic coding sequence
gcctggctgcagagcgctggggagctgcccagtgatggcggctgcagccggctgcgctggcaggcccacctggagttcacccacaaccatgatgtgggggacctgacctgggacaagattgctgtgtccctgcccaggtctgagaagctgcggagcctggtgctggccggcatcccccacggcatgaggccccagctgtggatgaggctgagcggggccctgcagaagaagaggaacagcgagctgagctaccgggagatcgtgaagaacagcagcaatgatgagaccatcgccgccaagcagatcgagaaggacctgctgcggaccatgcccagcaatgcctgctttgcctccatgggcagcattggagtgccccggctgcggcgggtgctgcgggccctggcctggctgtacccagaaattggctactgccagggcaccggcatggtggccgcctgcctgctgctcttcctggaggaggaggatgccttctggatgatgtctgccatcatcgaggacctgctgcctgccagctacttcagcaccaccctgctgggcgtgcagacagaccagagggtgctgcggcacctgattgtgcagtacctgccccggctggacaagctgctgcaggagcatgacatcgagctgagcctcatcaccctgcactggttcctgacagcctttgcctctgtggtggacatcaagctgctgctgcgcatctgggacctcttcttctatgagggcagccgggtgctcttccagctgaccctgggcatgctgcacctgaaggaggaggagctgatccagagtgaaaattctgccagcatcttcaacaccctgagtgacatccccagccagatggaggatgctgagctgctgctgggcgtggccatgaggctggccggcagcctgacagatgtggccgtggagacccagaggaggaagcacctggcctacctgattgctgaccagggccagctgctgggcgccggcaccctgaccaacctgagccaggtggcccaggacggcggcccccacctggacccccagcacacaggccggcggggccacctggaggtgcagagcgctggagctgctgagaacaagccagccctgcctgccctgccccccagcctggcccagagcgaccacagctgtggggtcatccaggccagcagcggctttgtgcacctgcgcttctag

SEQ ID NO: 22515 - DNA, 294 bp, synthetic construct
  source 1..294: mol_type = other DNA; note = Synthetic coding sequence
atgctgcggggcaccaaggagatggacaacatgagcccccggctgcgggccttcctgtctgagcccatcggggagaaggatgtgtgctgggtggatggcatcagccatgagctggccatcaacctggtgaccaagggcatcaacaaggcctacatcctgctgggccagttcctgctgatgcacaagaatgaagctgagttccagcgctggctgatctgctgctttggagccacagaatgtgaggcccagcagaccagccactgcctgaaggagtggtgtgcctgcttcctgtag

SEQ ID NO: 22516 - DNA, 1011 bp, synthetic construct
  source 1..1011: mol_type = other DNA; note = Synthetic coding sequence
atggagtacctgggcggcggcagcgccctggacctgctgaagccaggccccctggaggagacctacatcgccaccatcctgcgggagatcctgaagggcctggactacctgcacagcgagaggaagatccaccgggacatcaaggccgccaacgtgctgctgtctgagcagggagatgtgaagctggccgactttggagtggccggccagctgacagacacccagatcaagaggaacacctttgtgggcacccccttctggatggcccctgaggtgatcaagcagagcgcctatgacttcaaggctgacatctggagcctgggcatcacagccatcgagctggccaagggggagccccccaacagcgacctgcaccccatgagggtgctcttcctgatccccaagaacagcccccccaccctggagggccagcacagcaagcccttcaaggagtttgtggaggcctgcctgaacaaggacccccgcttccggcccacagccaaggagctgctgaagcacaagttcatcacccgctacaccaagaagaccagcttcctgacagagctgattgaccgctacaagcgctggaagtctgagggccatggagaggagagcagcagcgaggacagcgacattgatggagaggctgaagatggagagcagggccccatctggaccttcccccccaccatccggcccagcccccacagcaagctgcacaagggcacagccctgcacagcagccagaagccagctgagcctgtgaagaggcagcccaggagccagtgcctgagcaccctggtgcggcctgtgtttggagaggtgttcagccagctgaaggagaagcacaagcagagcggcggctctgtgggcgccctggaggagctggagaatgccttcagcctggccgaggagagctgccccggcatcagtgacaagctgatggtgcacctggtggagcgggtgcagcgcttcagccacaacagaaaccacctgaccagcaccaggtag

SEQ ID NO: 22517 - DNA, 1455 bp, synthetic construct
  source 1..1455: mol_type = other DNA; note = Synthetic coding sequence
atggtgcatgagaccagctacagcgcccagttcaagggggaggccagcaagcccaccacagctgacaacaaggtgattgacagaagacgcatccgcagcctgtacagcgagcccttcaaggagccccccaaggtggagaagcccagcgtgcagagcagcaagcccaagaagaccagcgccagccacaagcccaccaggaaggccaaggacaagcaggccgtgtctggccaggccgccaagaagaagtctgctgagggccccagcaccaccaagccagatgacaaggagcagagcaaggagatgaacaacaagctggccgaggccaaggagagcctggcccagcctgtgtctgacagcagcaagacccagggccctgtggccacagagccagacaaggaccagggctctgtggtgcccggcctgctgaagggccagggccccatggtgcaggagcccctgaagaagcagggctctgtggtgcccggcccccccaaggacctgggccccatgatccccctgcctgtgaaggaccaggaccacacagtgcctgagcccctgaagaatgaaagccctgtgatcagcgcccctgtgaaggaccagggccccagcgtgcctgtgccccccaagaaccagagccccatggtgcctgccaaggtgaaggaccagggctctgtggtgcctgagagcctgaaggaccagggcccccgcatccctgagcctgtgaagaaccaggcccccatggtgcctgcccctgtgaaggatgagggccccatggtgtctgcctctgtgaaggaccagggccccatggtgtctgcccctgtgaaggaccagggccccatcgtgcctgcccctgtgaagggggagggccccatcgtgcctgcccctgtgaaggatgagggccccatggtgtctgcccccatcaaggaccaggaccccatggtgcctgagcaccccaaggatgagagcgccatggccacagcccccatcaagaaccagggctccatggtgtctgagcctgtgaagaaccagggcctggtggtgtctggccctgtgaaggaccaggatgtggtggtgcctgagcacgccaaggtgcatgattctgctgtggtggcccctgtgaagaaccagggccctgtggtgcctgagagcgtgaagaaccaggaccccatcctgcctgtgctggtgaaggaccagggccccaccgtgctgcagccccccaagaaccagggccgcatcgtgcctgagcccctgaagaaccaggtgcccatcgtgcctgtgcccctgaaggaccaggaccccctggtgcctgtgcctgccaaggaccagggccctgctgtgcctgagcccctgaagacccagggcccccgggacccccagctgcccaccgtgagccccctgccccgggtgatgatccccacagccccccacacagagtacatcgagagcagcccctag

SEQ ID NO: 22518 - DNA, 2103 bp, synthetic construct
  source 1..2103: mol_type = other DNA; note = Synthetic coding sequence
atggccctgggggaggagaaggccgaggccgaggccagcgaggacaccaaggcccagagctatggccggggcagctgccgggagcagcccccccggctggaggccgagggcggcctcatcagccctgtgtggggcgctgagggcatcccagcccccacctgctggattggaacagaccccggcggccccagccgggcccaccagccccaggccagtgatgccaaccgggagcctgtggccgagaggtctgagcccgccctgagcggcctgcccccagccaccatgggcagcggggacctgctgctgtctggagagagccaggtggagaagaccaagctgagcagcagcgaggagttcccccagaccctgagcctgcccaggaccaccaccatctgcagcggccatgatgctgacacagaagatgaccccagcctggccgacctgccccaggccctggacctgagccagcagccccacagcagcggcctgagctgcctgagccagtggaagtctgtgctgagccctggcagcgctgcccagcccagcagctgcagcatcagcgccagcagcacaggcagcagcctgcagggccaccaggagcgggcagagccccggggcggcagcctggccaaggtgagcagcagcctggagcctgtggtgccccaggagcccagctctgtggtgggcctgggcccccggccccagtggagcccccagcccgtcttctctggaggagatgccagcggcctgggcagaagaaggctgtccttccaggccgagtactgggcctgtgtgctgcctgacagcctgccccccagcccagacagacacagccccctgtggaaccccaacaaggagtatgaggacctgctggactacacctaccccctgcggcccggcccccagctgcccaagcacctggacagccgggtgcctgctgaccctgtgctgcaggacagcggcgtggacctggacagcttctctgtgtccccagccagcaccctgaagagccccaccaacgtgagccccaactgccccccagctgaggccacagccctgcccttcagcggcccccgggagcccagcctgaagcagtggcccagccgggtgccccagaagcagggcggcatgggcctggcctcctggagccagctggccagcaccccccgggcccctggcagcagagatgcccgctgggagcggcgggagcccgccctgcggggggccaaggaccggctgaccatcggcaagcacctggacatgggcagcccccagctgcggacccgggaccggggctggcccagccccaggcctgagcgggagaagaggaccagccagagcgcccggcggcccacctgcacagagagccgctggaagtctgaggaggaggtggagagtgatgatgagtacctggccctgcctgcccggctgacccaggtgagcagcctggtgtcctacctgggcagcatcagcaccctggtgaccctgcccaccggggacatcaagggccagagccccctggaggtgtctgacagtgatggccctgccagcttccccagcagcagcagccagagccagctgcccccaggagctgccctgcagggcagcggggaccctgagggccagaacccctgcttcctgcggagctttgtgcgggcccatgacagcgctggggagggcagcctgggcagcagccaggccctgggcgtgagcagcggcctgctgaagacccggcccagcctgcctgcccggctggaccgctggcccttcagtgaccctgatgtggagggccagctgcccaggaagggcggggagcagggcaaggagagcctggtgcagtgtgtgaagaccttctgctgccagctggaggagctgatctgctggctgtacaacgtggctgatgtgacagaccacggcacagctgcccggagcaacctgaccagcctgaagagcagcctgcagctgtacagagtcatctgtggccctggcagcggcctcttcccccacaagtctgtggccaagctgctggactacaaggtgaagagccagatcaccaacgtgtggtacgtgattgcccagctgaccatcatccctgagatctag

SEQ ID NO: 22519 - DNA, 1626 bp, synthetic construct
  source 1..1626: mol_type = other DNA; note = Synthetic coding sequence
atgaagagctatgtgtctgagaccatggccagccctgggaaggacaactacaggatgaagagctacaagaacaatgccctgaaccctgaggagatgagaagaagaagagaggaggagggcatccagctgaggaagcagaagcgggagcagcagctgttcaagagaagaaatgtggagctgatcaatgaggaggccgccatgtttgacagcctgctgatggacagctatgtgagcagcaccactggagagagcgtcatcacccgggagatggtggagatgctgttcagtgatgacagcgacctgcagctggccaccacccagaagttcaggaagctgctgagcaaggagcccagcccccccattgatgaggtgatcaacaccccccgggtggtggacagatttgtggagttcctgaagagaaatgaaaactgcaccctgcagtttgaggccgcctgggccctgaccaacatcgccagcggcaccagccagcagaccaagatcgtgattgaagctggagctgtgcccatcttcatcgagctgctgaacagcgactttgaagatgtgcaggagcaggccgtgtgggccctgggcaacattgctggggacagctctgtgtgccgggactatgtgctgaactgcagcatcctgaaccccctgctgaccctgctgaccaagagcacccggctgaccatgaccagaaatgctgtgtgggccctgagcaacctgtgccggggcaagaaccccccacctgagtttgccaaggtgagcccctgcctgcctgtgctgagccggctgctcttcagcagtgacagcgacctgctggctgatgcctgctgggccctgagctacctgagtgatggccccaatgagaagatccaggccgtcatcgacagcggcgtgtgccggcggctggtggagctgctgatgcacaatgactacaaggtggccagccctgccctgcgggctgtgggcaacatcgtgactggagatgacatccagacccaggtgatcctgaactgcagcgccctgccctgcctgctgcacctgctgagcagccccaaggagagcatcaggaaggaggcctgctggaccatcagcaacatcacagctggcaacagagcccagatccaggccgtgattgatgccaacatcttccctgtgctgattgagatcctgcagaaggccgagttccgcaccaggaaggaggccgcctgggccatcaccaatgccaccagcggcggcaccccagagcagatccgctacctggtgtccctgggctgcatcaagcccctgtgtgacctgctgactgtgatggacagcaagatcgtgcaggtggccctgaatggcctggagaacatcctgcggctgggggagcaggagggcaagaggagcggcagcggcgtgaacccctactgcggcctgattgaggaggcctacggcctggacaagattgagttcctgcagagccatgagaaccaggagatctaccagaaggcctttgacctgattgagcactactttggagtggaggatgatgacagcagcctggccccccaggtggatgagacccagcagcagttcatcttccagcagcctgaggcccccatggagggcttccagctgtag

SEQ ID NO: 22520 - DNA, 1716 bp, synthetic construct
  source 1..1716: mol_type = other DNA; note = Synthetic coding sequence
atgctggactgtggcatgcacatgggcttcaatgatgaccggcgcttcccagacttctcctacatcacccagaatggccgcctgacagacttcctggactgtgtgatcatcagccacttccacctggaccactgtggggccctgccctacttcagcgagatggtgggctatgatggccccatctacatgacccaccccacccaggccatctgccccatcctgctggaggactacaggaagattgctgtggacaagaagggggaggccaacttcttcaccagccagatgatcaaggactgcatgaagaaggtggtggccgtgcacctgcaccagacagtgcaggtggatgatgagctggagatcaaggcctactatgccggccacgtgctgggcgccgccatgttccagatcaaggtgggcagcgagagcgtggtgtacacaggagactacaacatgaccccagacagacacctgggcgccgcctggattgacaagtgccggcccaacctgctgatcacagagagcacctacgccaccaccatccgggacagcaagcgctgccgggagcgggacttcctgaagaaggtgcatgaaacagtggagcggggcggcaaggtgctgatccctgtgtttgccctgggccgggcccaggagctgtgcatcctgctggagaccttctgggagaggatgaacctgaaggtgcccatctacttcagcacaggcctgacagagaaggccaaccactactacaagctgttcatcccctggaccaaccagaagatcaggaagacctttgtgcagaggaacatgtttgagttcaagcacatcaaggcctttgaccgggcctttgctgacaaccctggccccatggtggtgtttgccaccccaggcatgctgcatgctggccagagcctgcagatcttcaggaagtgggccggaaatgagaagaacatggtgatcatgcctggctactgtgtgcagggcaccgtgggccacaagatcctgagcggccagaggaagctggagatggagggccggcaggtgctggaggtgaagatgcaggtggagtacatgtccttcagcgcccacgcagatgccaagggcatcatgcagctggtgggccaggccgagcctgagagcgtgctgctggtgcatggagaggccaagaagatggagttcctgaagcagaagattgagcaggagctgcgggtgaactgctacatgcctgccaatggagagaccgtgaccctgcccaccagccccagcatccctgtgggcatcagcctgggcctgctgaagcgggagatggcccagggcctgctgcctgaggccaagaagccccggctgctgcacggcaccctcatcatgaaggacagcaacttccggctggtgagcagcgagcaggccctgaaggagctgggcctggccgagcaccagctgcgcttcacctgccgggtgcacctgcatgacaccaggaaggagcaggagacagccctgcgggtgtacagccacctgaagtctgtgctgaaggaccactgtgtgcagcacctgcctgatggctctgtgacagtggagagcgtgctgctgcaggccgccgcccccagcgaggaccccggcaccaaggtgctgctggtgtcctggacctaccaggatgaggagctgggcagcttcctgaccagcctgctgaagaagggcctgccccaggcccccagctag

SEQ ID NO: 22521 - DNA, 2232 bp, synthetic construct
  source 1..2232: mol_type = other DNA; note = Synthetic coding sequence
atggaggccgctgctgtgacagtgaccaggtctgccaccaggagaagaagacggcagctgcagggcctggccgcccctgaggccggcacccaggaggagcaggaggaccaggagccccggcccaggagaagaagacctggccgcagcatcaaggatgaggaggaggagaccgtcttccgggaggtggtgtccttctccccagaccccctgcctgtgcgctactatgacaaggacaccaccaagcccatctccttctacctgagcagcctggaggagctgctggcctggaagccccggctggaggatggcttcaacgtggccctggagcccctggcctgccggcagccccccctgagcagccagaggcccaggaccctgctgtgccacgacatgatgggcggctacctggatgaccgcttcatccagggctctgtggtgcagaccccctatgccttctaccactggcagtgcattgatgtgtttgtgtacttcagccaccacacagtgaccatcccccctgtgggctggaccaacacagcccacagacatggagtgtgtgtgctgggcaccttcatcacagagtggaatgaaggaggccgcctgtgtgaggccttcctggccggagatgagaggagctaccaggccgtggccgaccggctggtgcagatcacccagttcttccgctttgatggctggctgatcaacatcgagaacagcctgagcctggccgctgtgggcaacatgccacccttcctgcgctacctgaccacccagctgcaccggcaggtgcctgggggcctggtgctgtggtatgattctgtggtgcagagcggccagctgaagtggcaggatgagctgaaccagcacaacagagtcttctttgacagctgtgatggcttcttcaccaactacaactggagggaggagcacctggagaggatgctgggccaggccggggagaggagagcagatgtgtatgtgggcgtggatgtgtttgcccggggaaatgtggtgggcggccgctttgacacagacaagagcctggagctgatcaggaagcacggcttctctgtggccctgtttgcccctggctgggtgtatgagtgcctggagaagaaggacttcttccagaaccaggacaagttctggggccgcctggagcgctacctgcccacccacagcatctgcagcctgccctttgtgaccagcttctgcctgggcatgggcgccaggagagtgtgctacggccaggaggaggccgtgggcccctggtaccacctgagcgcccaggagatccagcccctgtttggagagcaccggctgggcggagatggccggggctgggtgaggacccactgctgcctggaggatgcctggcacggcggcagcagcctgctggtgcggggcgtcatccccccagaggtgggcaatgtggccgtgcggctcttcagcctgcaggcccctgtgccccccaagatctacctgtccatggtgtacaagctggagggccccacagatgtgacagtggccctggagctgaccactggagatgctggcagctgccacatcggcggcatctctgtgctgaatgctgagaccagcagccgccacagcctgcggcccctgcgggtgccccccaccaagctggcccgctgggtgggccgctgtggccggcagctgagcggcggctgggtgcagcactgctatgaggtgtccctgcggggctgcctgctgctggacctgctggtgtgcttcagccggcccccaggcagccgggaggaggagagcttcacctgccgcctgggggagatccaggtggtggatgctgccagcctgctggcccccctgccccaggtgcaggccgtgaccatcagccacatccgctggcagcccagcgccagcgagcgggagggccccccagccctgctgcagctgagctgcaccctgcactggagcttcctgctgagccaggtgcgctgcttccgcatccactgctggggcggcatgtctgatgacagccctggccgggagctgcccaggcctgagatgcccatgttcctgggcctggcctttgccacccagtacagaattgtggacctgctggtggaggccgccggccctggccaggacaggaggatggagttcctggtggagcctgtgcccaaggagggcttccgggtgccccaggccgagtggggccgggctgtgctgctgtacagcgccccagcctag

SEQ ID NO: 22522 - DNA, 396 bp, synthetic construct
  source 1..396: mol_type = other DNA; note = Synthetic coding sequence
atggagctgcgggtgcacatggtgagccacactggagagatgccctacaaggtgcggctgggcctgagccctggccctggcctgggcggcccccgcatcctgcctgctgagcccttcacctggggcgctgtgcgccacctgccccacagcagctgccagggcgcctgcctgccctgcctgccctgcctgagcagcgcccccctgagccggcagggcctgtctgctgccagcccccccaggagcctgctgggcccctgcttcttcccctggaggacaggcctggccagcagcggccagctgagccctgaggccctgctgtgcaccatcctgcacaccaggtctggagtgctgcctgagagcagccaccggggcctgcccctggtgcctgccctgtag

SEQ ID NO: 22523 - DNA, 909 bp, synthetic construct
  source 1..909: mol_type = other DNA; note = Synthetic coding sequence
atggagcacggcatcgtgaaggactggaatgacatggagcgcatctggcagtatgtgtacagcaaggaccagctgcagaccttcagcgaggagcaccctgtgctgctgacagaggcccccctgaaccccaggaagaaccgggagagagctgctgaggtgttctttgagaccttcaacgtgcctgccctcttcatctccatgcaggccgtgctgagcctgtatgccaccggccgcaccaccggggtggtgctggacagcggagatggagtgacccatgctgtgcccatctatgagggctttgccatgccccacagcatcatgagaattgatattgctggaagagatgtgagccgcttcctgcggctgtacctgaggaaggagggctatgacttccacagcagcagcgagtttgaaattgtgaaggccatcaaggagcgggcctgctacctgagcatcaacccccagaaggatgagaccctggagacagagaaggcccagtactacctgcctgatggcagcaccattgaaattggccccagccgcttccgggcccctgagctgctcttccggccagacctgattggagaggagagcgagggcatccacgaggtgctggtgtttgccatccagaagagtgacatggacctgcggaggaccctcttcagcaacatcgtgctgagcggcggcagcaccctcttcaagggctttggagaccggctgctgtctgaggtgaagaagctggcccccaaggatgtgaagatccgcatcagcgccccccaggagcggctgtacagcacctggattggaggcagcatcctggccagcctggacaccttcaagaagatgtgggtgtccaagaaggagtatgaagaagatggagcccggagcatccacaggaagaccttctag

SEQ ID NO: 22524 - DNA, 780 bp, synthetic construct
  source 1..780: mol_type = other DNA; note = Synthetic coding sequence
atgctgcgctgtggccagatgatgctggcccaggccctgatctgccgccacctgggccgggactggagctgggagaagcagaaggagcagcccaaggagtaccagaggatcctgcagtgcttcctggacaggaaggactgctgctacagcatccaccagatggcccagatgggcgtgggggagggcaagagcattggagagtggtttggccccaacacagtggcccaggtgctgaagaagctggccctgtttgatgagtggaacagcctggccgtgtatgtgtccatggacaacacagtggtgattgaggacatcaagaagatgtgccgggtgctgcccctgtctgctgacacagctggggaccggcccccagacagcctgacagccagcaaccagagtgatgagctgatcttcctggacccccacaccacccagacctttgtggacacagaggagaatggaacagtgaatgaccagaccttccactgcctgcagagcccccagaggatgaacatcctgaacctggaccccagcgtggccctgggcttcttctgcaaggaggagaaggactttgacaactggtgcagcctggtgcagaaggagatcctgaaggagaacctgaggatgtttgagctggtgcagaagcaccccagccactggcccccatttgtgcccccagccaagccagaggtgaccaccaccggggctgagttcatcgacagcacagagcagctggaggagtttgacctggaggaggactttgagatcctgtctgtgtag

SEQ ID NO: 22525 - DNA, 957 bp, synthetic construct
  source 1..957: mol_type = other DNA; note = Synthetic coding sequence
atgagggcccagagtgatgagctggagaagattgagaagcacggccgcagcagcaaggacaaggaaaatgccaagagcctggacaagccagagcagttcctgtatgagctgagcctcatccccaacttcagcgagagggtcttctgcatcctcttccagagcaccttcagcgagagcatctgcagcatccggaggaagctggagctgctgcagaagctgtgtgagaccctgaagaatggacctggggtgatgcaggtgctgggcctggtgctggcctttggaaactacatgaatggaggcaacaagacccggggccaggctgatggcttcggcctggacatcctgcccaagctgaaggatgtgaagagcagtgacaacagccgcagcctgctgagctacatcgtgtcctactacctgaggaactttgatgaagatgctgggaaggagcagtgcctcttccccctgcctgagccccaggacctcttccaggccagccagatgaagtttgaggacttccagaaggacctgaggaagctgaagaaggacctgaaggcctgtgaggtggaggccggcaaggtgtaccaggtgagcagcaaggagcacatgcagcccttcaaggagaacatggagcagttcatcatccaggccaagattgaccaggaggccgaggagaacagcctgacagagacccacaagtgcttcctggagaccacagcctacttcttcatgaagcccaagctgggggagaaggaggtgagccccaatgccttcttcagcatctggcatgagttcagcagtgacttcaaggacttctggaagaaggagaacaagctgctgctgcaggagcgggtgaaggaggccgaggaggtgtgccggcagaagaagggcaagagcctgtacaagatcaagcccaggcatgacagcggcatcaaggccaagatctccatgaagacctag

SEQ ID NO: 22526 - DNA, 345 bp, synthetic construct
  source 1..345: mol_type = other DNA; note = Synthetic coding sequence
atgagcagctccatgtggtacatcatgcagagcatccagagcaagtacagcctgtctgagcggctcatccgcaccatcgccgccatccgctccttcccccatgacaacgtggaggacctgatccggggcggcgcagatgtgaactgcacccacggcaccctgaagcccctgcactgtgcctgcatggtgtctgatgctgactgtgtggagctgctgctggagaagggagctgaggtgaatgccctggatggctacaacagaacagccctgcactatgctgctgagaaggatgaggcctgtgtggaggtgctgctggagtatggagccaaccccaatgccctgtag

SEQ ID NO: 22527 - DNA, 1365 bp, synthetic construct; identical to SEQ ID NO: 18754
  source 1..1365: mol_type = other DNA; note = Synthetic coding sequence

SEQ ID NO: 22528 - DNA, 1047 bp, synthetic construct; identical to SEQ ID NO: 18886
  source 1..1047: mol_type = other DNA; note = Synthetic coding sequence

SEQ ID NO: 22529 - DNA, 2163 bp, synthetic construct
  source 1..2163: mol_type = other DNA; note = Synthetic coding sequence
atgtatggcagcgcccggtctgtgggcaaggtggagcccagcagccagagccctggccgcagcccccggctgcccaggagcccccggctgggccacaggaggaccaacagcactggaggcagcagcggcagctctgtgggcggcggcagcggcaagaccctgtccatggagaacatccagagcctgaatgctgcctatgccaccagcggccccatgtacctgagtgaccatgaaaatgtgggcagcgagacccccaagagcaccatgaccctgggccgcagcggcggccgcctgccctacggcgtgaggatgacagccatgggcagcagccccaacatcgccagcagcggcgtggccagtgacaccatcgcctttggagagcaccacctgccccctgtgtccatggccagcacagtgccccacagcctgcggcaggcccgggacaacaccatcatggacctgcagacccagctgaaggaggtgctgcgggagaatgacctgctgaggaaggatgtggaggtgaaggagagcaagctgagcagctccatgaacagcatcaagaccttctggagccctgagctgaagaaggagcgggccctgaggaaggatgaggccagcaagatcaccatctggaaggagcagtacagagtggtgcaggaggagaaccaggtggatgccctgcggctgcggctggaggagaaggagaccatgctgaacaagaagaccaagcagatccaggacatggccgaggagaagggcacccaggccggggagatccatgacctgaaggacatgctggatgtgaaggagaggaaggtgaatgtgctgcagaagaagattgagaacctgcaggagcagctgcgggacaaggagaagcagatgagcagcctgaaggagcgggtgaagagcctgcaggccgacaccaccaacacagacacagccctgaccaccctggaggaggccctggccgagaaggagaggaccatcgagcggctgaaggagcagagggacagagatgagcgggagaagcaggaggagattgacaactacaagaaggacctgaaggacctgaaggagaaggtgtccctgctgcagggcgacctgtctgagaaggaggccagcctgctggacctgaaggagcacgccagcagcctggccagcagcggcctgaagaaggacagccggctgaagaccctggagatcgccctggagcagaagaaggaggagtgcctgaagatggagagccagctgaagaaggcccatgaagctgccctggaggcccgggccagccctgagatgtctgaccgcatccagcacctggagcgggagatcacccgctacaaggatgagagcagcaaggcccaggccgaggtggaccggctgctggagatcctgaaggaggtggagaatgagaagaatgacaaggacaagaagattgctgagctggagagcctgaccagccggcaggtgaaggaccagaacaagaaggtggccaacctgaagcacaaggagcaggtggagaagaagaagagcgcccagatgctggaggaggcccggcggcgggaggacaacctgaatgacagcagccagcagctgcaggacagcctgaggaagaaggatgacagaattgaggagctggaggaggccctgcgggagagcgtgcagatcacagctgagcgggagatggtgctggcccaggaggagagcgcccggaccaatgctgagaagcaggtggaggagctgctgatggccatggagaaggtgaagcaggagctggagagcatgaaggccaagctgagcagcacccagcagagcctggccgagaaggagacccacctgaccaacctgcgggcagagaggaggaagcacctggaggaggtgctggagatgaagcaggaggccctgctggccgccatcagcgagaaggatgccaacatcgccctgctggagctgagcagcagcaagaagaagacccaggaggaggtggccgccctgaagcgggagaaggaccggctggtgcagcagctgaagcagcagacccagaacaggatgaagctgatggctgacaactatgaagatgaccacttcaagagcagccacagcaaccagaccaaccacaagcccagcccagaccaggatgaggaggagggcatctgggcctag

SEQ ID NO: 22530 - DNA, 768 bp, synthetic construct
  source 1..768: mol_type = other DNA; note = Synthetic coding sequence
atggccgccagcaccatgtctgtgtgcagcagcgcctgcagcgacagctggcaggtggatgcctgcccagagagctgctgtgagccccactgctgtgccctgagctgctgtgccccagccccctgcctgaccctggtgtgcacccctgtgtcccgggtgagcagcccctgctgccaggccgcctgtgagcccagcccctgccagagcggctgcaccagcagctgcacccccagctgctgccagcagagcagctgccagcctgcctgctgcaccagcagcccctgccagcaggcctgctgcgtgcctgtgtgctgcaagcctgtgtgctgcctgcccacctgcagcaaggacagcagcagctgctgccagcagagcagctgccagcccacctgctgtgccagcagcagcagccagcagagctgctgcgtgcctgtgtgctgcaagcctgtgtgctacgtgcccacctgcagcgaggacagcagcagctgctgccagcagagcagctgccacccagcctgctgcaccagcagcccctgccagcaggcctgctgcgtgcctgtgcgctgcaagcctgtgtgctgcaagcccatctgctgcgtgcctgtgtgcagcggggccagcaccagctgctgccagcagagcagctgccagcctgcctgctgcaccaccagctgctgccggcccagcagctctgtgtccctgctgtgcaggcctgtgtgcaggcctgcctgctgcagcctgtgcagcggccaggagagcagctgctag

SEQ ID NO: 22531 - DNA, 2562 bp, synthetic construct
  source 1..2562: mol_type = other DNA; note = Synthetic coding sequence
atgtctgagaaggtggactggctgcagagccagaatggagtgtgcaaggtggatgtgtacagccctggggacaaccaggcccaggactggaagatggacaccagcacagatcctgtgcgggtgctgtcctggctgcggcgggacctggagaagagcacagctgagttccaggatgtgcgcttcaagccaggagagagctttggaggagagaccagcaacagcggggacccccacaagggcttctctgtggactactacaacaccaccaccaagggcaccccagagcggctgcactttgagatgacccacaaggagatcccctgccagggcccccgggcccagctgggcaatggcagctctgtggatgaggtgtccttctacgccaaccggctgaccaacctggtgattgccatggccaggaaggagatcaatgagaagattgatggctctgaaaataaatgtgtgtaccagagcctgtacatgggaaatgagcccacccccaccaagagcctgagcaagatcgccagcgagctggtgaatgagaccgtgtctgcctgcagcagaaatgctgccccagacaaggcccctggcagcggggacagagtgtctggcagcagccagagcccccccaacctgaagtacaagagcaccctgaagatcaaggagagcaccaaggagcggcagggcccagatgacaagccacccagcaagaagagcttcttctacaaggaggtgtttgagagcagaaatggagactatgcccgggagggcggccgcttcttcccccgggagaggaagcgcttccggggccaggagaggccagatgacttcaccgcctctgtgtctgagggcatcatgacctacgccaacagcgtggtgtctgacatgatggtgtccatcatgaagaccctgaagatccaggtgaaggacaccaccatcgccaccatcctgctgaagaaggtgctgctgaagcacgccaaggaggtggtgtctgacctgattgacagcttcctgaggaacctgcacagcgtgacaggcaccctgatgacagacacccagtttgtgtctgctgtgaagaggacagtgttcagccacggcagccagaaggccacagacatcatggatgccatgctgaggaagctgtacaacgtgatgtttgccaagaaggtgcctgagcacgtgaggaaggcccaggacaaggccgagagctacagcctcatctccatgaagggcatgggagaccccaagaacagaaatgtgaactttgccatgaagtctgagaccaagctgcgggagaagatgtacagcgagcccaagtctgaggaggagacctgtgccaagaccctgggggagcacatcatcaaggagggcctgaccctgtggcacaagacccagcagaaggagtgcaagagcctgggcttccagcacgccgcctttgaggcccccaacacccagaggaagccagccagtgacatcagctttgagtacccagaggacatcggcaacctgagcctgcccccctacccacctgagaagccagagaacttcatgtatgacagcgacagctgggccgaggacctgattgtgtctgccctgctgctgatccagtaccacctggcccagggcggcagaagagatgcccggagctttgtggaggccgccggcaccaccaacttccctgccaatgagccccctgtggccccagatgagagctgcctgaagagcgcccccatcgtgggggaccaggagcaggccgagaagaaggacctgcggagcgtcttcttcaacttcatccggaacctgctgtctgagaccatcttcaagagggaccagagccctgagcccaaggtgcctgagcagcctgtgaaggaggacaggaagctgtgtgagcggcccctggccagcagccccccccggctgtatgaagatgatgagacccctggggccctgagcggcctgaccaagatggctgtgtcccagattgatggccacatgagcggccagatggtggagcacctgatgaacagcgtgatgaagctgtgtgtgatcatcgccaagagctgtgatgccagcctggccgagctgggagatgacaagtctggagatgccagccggctgaccagcgccttcccagacagcctgtatgagtgcctgcctgccaagggcactggatctgctgaggccgtgctgcagaatgcctaccaggccatccacaatgagatgaggggcaccagcggccagcccccagagggctgtgccgcccccaccgtcatcgtgagcaaccacaacctgacagacacagtgcagaacaagcagctgcaggccgtgctgcagtgggtggccgccagcgagctgaatgtgcccatcctgtactttgctggagatgatgagggcatccaggagaagctgctgcagctgtctgctgctgctgtggacaagggctgcagcgtgggggaggtgctgcagagcgtgctgcgctatgagaaggagcggcagctgaatgaggccgtgggcaatgtgacccccctgcagctgctggactggctgatggtgaacctgtag

SEQ ID NO: 22532 - DNA, 1263 bp, synthetic construct
  source 1..1263: mol_type = other DNA; note = Synthetic coding sequence
atggtgcacggcaggaaggccaatgcccaggtgatggagagcgaggagttcatgctgctgcctgccaaccagctgattgacatcatcagcagtgatgagctgaatgtgcgctctgaggagcaggtgttcaatgctgtgatggcctgggtgaagtacagcatccaggagcggcggccccagctgccccaggtgctgcagcacgtgcggctgcccctgctgagccccaagttcctggtgggcaccgtgggcagtgaccccctcatcaagagtgatgaagaatgtcgggacctggtggatgaggccaagaactacctgctgctgccccaggagcggcccctgatgcagggccccaggacccggcccaggaagcccatccgctgtggggaggtgctgtttgctgtgggcggctggtgcagcggagatgccatcagctctgtggagagatatgacccccagaccaatgagtggaggatggtggcctccatgagcaagagaagatgtggggtgggcgtgtctgtgctggatgacctgctgtatgctgtgggcggccatgatggcagcagctacctgaacagcgtggagagatatgaccccaagaccaaccagtggagcagtgatgtggcccccaccagcacctgcaggacctctgtgggcgtggccgtgctgggcggcttcctgtatgctgtgggcggccaggatggagtgtcctgcctgaacatcgtggagagatatgaccccaaggagaacaagtggaccagggtggcctccatgagcacccggcggctgggcgtggccgtggccgtgctgggcggcttcctgtatgctgtgggcggcagtgatggcaccagccccctgaacacagtggagcgctacaacccccaggagaaccgctggcacaccatcgcccccatgggcaccaggaggaagcacctgggctgtgctgtgtaccaggacatgatctatgctgtgggcggcagagatgacaccacagagctgagcagcgctgagcgctacaaccccaggaccaaccagtggagccctgtggtggccatgaccagccgccgcagcggcgtgggcctggccgtggtgaatggccagctgatggctgtgggcggctttgatggcaccacctacctgaagaccatcgaggtgtttgatcctgatgccaacacctggaggctgtatggaggcatgaactacagaaggctgggcggcggcgtgggcgtcatcaagatgacccactgtgagagccacatctggtag

SEQ ID NO: 22533 - DNA, 519 bp, synthetic construct
  source 1..519: mol_type = other DNA; note = Synthetic coding sequence
atgagctgcaccatcgagaaggccctggctgatgccaaggccctggtggagcggctgcgggaccatgatgatgctgctgagagcctcatcgagcagaccacagccctgaacaagagggtggaggccatgaagcagtaccaggaggagatccaggagctgaatgaggtggcccggcaccggcccaggagcaccctggtgatgggcatccagcaggagaaccggcagatccgggagctgcagcaggagaacaaggagctgcggaccagcctggaggagcaccagagcgccctggagctgatcatgagcaagtaccgggagcagatgttccggctgctgatggccagcaagaaggatgaccccggcatcatcatgaagctgaaggagcagcacagcaagattgacatggtgcacaggaacaagtctgagggcttcttcctggatgccagccgccacatcctggaggccccccagcacggcctggagcggcggcacctggaggccaaccagaatgtgcactag

SEQ ID NO: 22534 - DNA, 813 bp, synthetic construct
  source 1..813: mol_type = other DNA; note = Synthetic coding sequence
atgctgttcatcttccccctgagcctgccctggaggcccagctgctggaaggagagctgcagcacaggccagaggcaggccggccgcagccgggaggacagcgtgaccccaccacccagcagcccctggcccaccccacctgctggggccatgagcaccaagcaggaggccaggagagatgaaggagaggcccggacccggggccaggaggcccagctgcgggaccgggcccacctgagcctgcacaaggacagcgctgacctgctgcccctggacagcctgaagaggctgggcaccagcaaggacctgcagcccaggagcgtcatccagaggcggctggtggagggcaaccccaactggctgcagggcgagccccccaggatgcaggacctgattcatggccaggagagcaggaggaagaccagcaggacagagatcccagccctgctggtgaactgcaagtgccaggaccagctgctgcgggtggccgtggacaccggcacccagtacaaccgcatctctgctggctgcctgagccggctgggcctggagaagagggtgctgaaggccagcgctggggacctggcccctggcccccccacccaggtggagcagctggagctgcagctgggccaggagaccgtggtgtgcagcgcccaggtggtggatgctgagagccctgagttctgcctgggcctgcagaccctgctgagcctgaagtgctgcatcgacctggagcacggcgtgctgcggctgaaggcccccttcagcgagctgcccttcctgcccctgtaccaggagcccggccagtag

SEQ ID NO: 22535 - DNA, 243 bp, synthetic construct
  source 1..243: mol_type = other DNA; note = Synthetic coding sequence
accagctgctgccggcccagcagctctgtgtccctgctgtgccaccctgtgtgcagctgcagccctgcctgccagcccacctgctgcatccacagcccctgccaggccagctgctacgtgcctgtgtcctgccagcccatcatctacgtgacccccagctgccagagcagcggctgctgccagcccccctgcaccacagccctgtgccggcccatcagctgcagcacccccagctgctgctag

SEQ ID NO: 22536 - DNA, 2013 bp, synthetic construct
  source 1..2013: mol_type = other DNA; note = Synthetic coding sequence
atggccctgggggaggagaaggccgaggccgaggccagcgaggacaccaaggcccagagctatggccggggcagctgccgggagcgggagctggacatccctggccccatgtctggagagcagcccccccggctggaggccgagggcggcctcatcagccctgtgtggggcgctgagggcatcccagcccccacctgctggattggaacagaccccggcggccccagccgggcccaccagccccaggccagtgatgccaaccgggagcctgtggccgagaggtctgagcccgccctgagcggcctgcccccagccaccatgggcagcggggacctgctgctgtctggagagagccaggtggagaagaccaagctgagcagcagcgaggagttcccccagaccctgagcctgcccaggaccaccaccatctgcagcggccatgatgctgacacagaagatgaccccagcctggccgacctgccccaggccctggacctgagccagcagccccacagcagcggcctgagctgcctgagccagtggaagtctgtgctgagccctggcagcgctgcccagcccagcagctgcagcatcagcgccagcagcacaggcagcagcctgcagggccaccaggagcgggcagagccccggggcggcagcctggccaaggtgagcagcagcctggagcctgtggtgccccaggagcccagctctgtggtgggcctgggcccccggccccagtggagcccccagcccgtcttctctggaggagatgccagcggcctgggcagaagaaggctgtccttccaggccgagtactgggcctgtgtgctgcctgacagcctgccccccagcccagacagacacagccccctgtggaaccccaacaaggagtatgaggacctgctggactacacctaccccctgcggcccggcccccagctgcccaagcacctggacagccgggtgcctgctgaccctgtgctgcaggacagcggcgtggacctggacagcttctctgtgtccccagccagcaccctgaagagccccaccaacgtgagccccaactgccccccagctgaggccacagccctgcccttcagcggcccccgggagcccagcctgaagcagtggcccagccgggtgccccagaagcagggcggcatgggcctggcctcctggagccagctggccagcaccccccgggcccctggcagcagagatgcccgctgggagcggcgggagcccgccctgcggggggccaaggaccggctgaccatcggcaagcacctggacatgggcagcccccagctgcggacccgggaccggggctggcccagccccaggcctgagcgggagaagaggaccagccagagcgcccggcggcccacctgcacagagagccgctggaagtctgaggaggaggtggagagtgatgatgagtacctggccctgcctgcccggctgacccaggtgagcagcctggtgtcctacctgggcagcatcagcaccctggtgaccctgcccaccggggacatcaagggccagagccccctggaggtgtctgacagtgatggccctgccagcttccccagcagcagcagccagagccagctgcccccaggagctgccctgcagggcagcggggaccctgagggccagaacccctgcttcctgcggagctttgtgcgggcccatgacagcgctggggagggcagcctgggcagcagccaggccctgggcgtgagcagcggcctgctgaagacccggcccagcctgcctgcccggctggaccgctggcccttcagtgaccctgatgtggagggccagctgcccaggaagggcggggagcagggcaaggagagcctggtgcagtgtgtgaagaccttctgctgccagctggaggagctgatctgctggctgtacaacgtggctgatgtgacagaccacggcacagctgcccggagcaacctgaccagcctgaagagcagcctgcagctgtaccgcttctag

SEQ ID NO: 22537 - DNA, 702 bp, synthetic construct
  source 1..702: mol_type = other DNA; note = Synthetic coding sequence
atgaagcagctgattgaggacacagagaagaacaaggtgtatgtggccatggtgacagattatggagccttcatcaagatccctggctgcaggaagcagggcctggtgcacaggacccacatgagcagctgccgggtggacaagcccagcgagatcgtggatgtgggggacaaggtgtgggtgaagctgattggccgggagatgaagaatgaccgcatcaaggtgtccctgtccatgaaggtggtgaaccagggcaccgggaaggacctggaccccaacaacgtcatcatcgagcaggaggagaggagaagaagaagcttccaggactacacaggccagaagatcaccctggaggccgtgctgaacaccacctgcaagaagtgtggctgcaagggccactttgccaaggactgcttcatgcagcccggcggcaccaagtacagcctcatcccagatgaggaggaggagaaggaggaggccaagtctgctgagtttgagaagccagaccccaccaggaaccccagcaggaagaggaagaaggagaagaagaagaagaagcaccgggacaggaagagcagtgacagcgacagcagtgacagcgagagtgacaccgggaagagggcccggcacaccagcaaggacagcaaggccgccaagaagaagaagaagaagaagaagcacaagaagaagcacaaggagtag

SEQ ID NO: 22538 - DNA, 492 bp, synthetic construct
  source 1..492: mol_type = other DNA; note = Synthetic coding sequence
atgggctggaggctgctgacccaggatgagggccctgccctggtgcctgggggccgcctgggggacctgtgggactaccaccagcaccgctacctgcagggcgtgcctgagggcgtgcgggacctgcccccaggagtggccctgcccctggagagcaacctggccttcatgaatggagtgtccttcaccaagggctgctacatcggccaggagctgacagcccggacccaccacatgggcgtcatcaggaagaggctcttccctgtgcgcttcctggaccccctgcccaccagcggcatcacccctggggccaccgtgctgacagccagcggccagacagtgggcaagttccgggccggccagggcaatgtgggcctggccctgctgtggagcgagaagatcaagggccccctgcacatccgggccagcgagggcgcccaggtggccctggccgcctctgtgcctgactggtggcccaccgtgtccaagtag

SEQ ID NO: 22539 - DNA, 804 bp, synthetic construct
  source 1..804: mol_type = other DNA; note = Synthetic coding sequence
atggccatggagatgaggctgcctgtggccaggaagcccctgtctgagcggctgggccgggacaccaagaagcacctggtggtgcctggggacaccatcaccacagacaccggcttcatgaggggccacggcacctacatgggagaggagaagctgattgcctctgtggccggctctgtggagcgggtgaacaagctgatctgtgtgaaggccctgaagacccgctacatcggggaggtgggggacatcgtggtgggccgcatcacagaggtgcagcagaagcgctggaaggtggagaccaacagccggctggacagcgtgctgctgctgagctccatgaacctgcccggcggggagctgcggcggcgctctgcagaagatgagctggccatgaggggcttcctgcaggagggggacctgatcagcggcgtgctggtgcaggtgagccccagcctggtgaagaggcagaagacccacttccatgacctgccctgtggggccagcgtcatcctgggcaacaacggcttcatctggatctaccccaccccagagcacaaggaggaggaggccggcggcttcatcgccaacctggagcctgtgtccctggccgaccgggaggtgatcagccggctgaggaactgcatcatcagcctggtgacccagaggatgatgctgtatgacaccagcatcctgtactgctatgaggccagcctgccccaccagatcaaggacatcctgaagccagagatcatggaggagatcgtgatggagacccggcagaggctgctggagcaggagggctag

SEQ ID NO: 22540 - DNA, 3111 bp, synthetic construct
  source 1..3111: mol_type = other DNA; note = Synthetic coding sequence
atgcctgtgttcaaggaggtgaaggtgcacctgctggaggatgctggcatcgagaaggatgctgtgacccaggagacccgcatcagccccagcggcattgattctgccaccaccgtggccgccgccacagctgctgccatcgccacagctgcccccctcatcaaggtgcagagcgacctggaggccaaggtgaacagcgtgacagagctgctgagcaagctgcaggagacagacaagcacctgcagagggtgacagagcagcagaccagcatccagaggaagcaggagaagctgcactgccacgaccacgagaagcagatgaatgtgttcatggagcagcacatccgccacctggagaagctgcagcagcagcagattgacatccagacccacttcatctctgctgccctgaagaccagcagcttccagcctgtgtccatgcccagcagcagagctgtggagaagtacagcgtgaagccagagcaccccaacctgggcagctgcaaccccagcctgtacaacacctttgccagcaagcaggcccccctgaaggaggtggaggacaccagctttgacaagcagaagagccccctggagaccccagcccccaggagatttgcccctgtgcctgtgtccagagatgatgagctgagcaagcgggagaacctgctggaggagaaggagaacatggaggtgtcctgccacagaggaaatgtgcggctgctggagcagatcctgaacaacaatgacagcctgaccaggaagtctgagagcagcaacaccaccagcctgaccaggagcaagattggctggaccccagagaagaccaaccgcttccccagctgtgaggagctggagaccaccaaggtgaccatgcagaagagtgatgatgtgctgcatgacctgggccagaaggagaaggagaccaacagcatggtgcagcccaaggagagcctgtccatgctgaagctgcctgacctgccccagaacagcgtgaagctgcagaccaccaacaccaccaggtctgtgctgaaggatgctgagaagatcctgcggggcgtgcagaacaacaagaaggtgctggaggagaacctggaggccatcatccgggccaaggatggagctgccatgtacagcctcatcaatgccctgagcaccaaccgggagatgtctgagaagatccgcatcaggaagacagtggatgagtggatcaagaccatctctgctgagatccaggatgagctgagcaggacagattatgagcagaagagatttgaccagaagaaccagaggaccaagaagggccagaacatgaccaaggacatccgcaccaacacccaggacaagacagtgaacaagagcgtcatccccaggaagcacagccagaagcagatcgaggagcacttcaggaacctgcccatgaggggcatgcctgccagcagcctgcagaaggagaggaaggagggcctgctgaaggccaccaccgtcatccaggatgaggactacatgctgcaggtgtatggcaagcctgtgtaccagggccacaggagcaccctgaagaagggcccctacctgcgcttcaacagccccagccccaagagccggccccagaggcccaaggtgattgaaagagtgaagggcaccaaggtgaagagcatccgcacccagacagacttctacgccaccaagcccaagaagatggacagcaagatgaagcacagcgtgcctgtgctgccccacggggaccagcagtacctgttcagccccagccgggagatgcccaccttcagcggcaccctggagggccacctgatccccatggccatcctgctgggccagacccagagcaacagcgacaccatgcccccagctggggtgattgtgtccaagccccaccctgtgacagtgaccaccagcatcccccccagcagcaggaaggtggagactggagtgaagaagcccaacatcgccatcgtggagatgaagtctgagaagaaggaccccccccagctgactgtgcaggtgctgcccagcgtggacatcgacagcatcagcaacagcagcgcagatgtgctgagccccctgagcagccccaaggaggccagcctgccccctgtgcagacctggatcaagaccccagagatcatgaaggtggatgaggaggaggtgaagtttcctggcaccaactttgatgagatcattgatgtgatccaggaggaggagaagtgtgatgagatcccagattctgagcccatcctggagttcaacagatctgtgaaggctgacagcaccaagtacaatggaccacccttcccccctgtggccagcaccttccagcccacagctgacatcctggacaaggtgattgaaaggaaggagaccctggagaacagcctcatccagtgggtggagcaggagatcatgagccgcatcatcagcggcctcttccctgtgcagcagcagatcgcccccagcatctctgtgtctgtgtctgagaccagcgagcccctgaccagtgacatcgtggagggcaccagcagcggggccctgcagctgtttgtggatgctggggtgcctgtgaacagcaatgtcatcaagcactttgtgaatgaggccctggccgagaccatcgctgtgatgctgggggaccgggaggccaagaagcagggccctgtggccaccggggtgtctggagatgccagcaccaatgagacctacctgcctgcccgggtgtgcacccccctgcccaccccccagcccaccccaccctgcagccccagcagccctgccaaggaatgtgtgctggtgaagaccccagacagcagcccctgtgacagcgaccatgacatggccttccctgtgaaggagatctgtgccgagaagggagatgacatgcctgccatcatgctggtgaacacccccaccgtgacccccaccaccaccccacctcctgctgctgctgtgttcacccccaccctgagtgacatcagcattgacaagctgaaggtgagcagccctgagctgcccaagccctggggagatggagacctgcccctggaggaggagaaccccaacagcccccaggaggagctgcacccccgggccatgtag

SEQ ID NO: 22541 - DNA, 3351 bp, synthetic construct; identical to SEQ ID NO: 19573
  source 1..3351: mol_type = other DNA; note = Synthetic coding sequence

SEQ ID NO: 22542 - DNA, 816 bp, synthetic construct
  source 1..816: mol_type = other DNA; note = Synthetic coding sequence
atgaggcagctgcaccctgaggccatcgccgccatccagagcaaggccctcttcagcaaggccgaggagcagctgctgagcaaggtgggcagcaccagccagcccaccctggagaccttccaggacctgctgcaccgccacccagatgccttctacctggccaggacagccaaggccctgcaggcccactggcagctgatgaagcagtactacctgctggaggaccagacagtgcagcccctgcccaagggggaccaggtgctgaacttcagtgatgctgaggacctgattgatgacagcaagctgaaggacatgagagatgaggtgctggagcacgagctgatggtggccgaccggcggcagaagcgggagatccggcagctggagcaggagctgcacaagtggcaggtgctggtggacagcatcaccggcatgagcagcccagactttgacaaccagaccctggccgtgctgcggggccgcatggtgcgctacctgatgaggagccgggagatcaccctgggccgggccaccaaggacaaccagattgatgtggacctgagcctggagggccctgcctggaagatcagcaggaagcagggcgtcatcaagctgaagaacaacggggacttcttcatcgccaatgaaggccggcggcccatctacattgatggccggcctgtgctgtgtggcagcaagtggaggctgagcaacaacagcgtggtggagatcgccagcctgcgctttgtgttcctgatcaaccaggacctgattgccctgatccgggcagaggccgccaagatcaccccccagtag

SEQ ID NO: 22543 - DNA, 2751 bp, synthetic construct
  source 1..2751: mol_type = other DNA; note = Synthetic coding sequence
atggagatgcccctgcccccagatgaccaggagctgagaaatgtcatcgacaagctggcccagtttgtggccagaaatggacctgagtttgagaagatgaccatggagaagcagaaggacaaccccaagttctccttcctgtttggaggagagttctacagctactacaagtgcaagctggccctggagcagcagcagctgatctgcaagcagcagaccccagagctggagcctgctgccaccatgccacccctgccccagccccccctggccccagctgcccccatccccccagcccagggcgcccccagcatggatgagctgatccagcagagccagtggaacctgcagcagcaggagcagcacctgctggccctgcggcaggagcaggtgacagctgctgtggcccatgctgtggagcagcagatgcagaagctgctggaggagacccagctggacatgaatgaatttgacaacctgctgcagcccatcatcgacacctgcaccaaggatgccatctctgctgggaagaactggatgttcagcaatgccaagagccccccccactgtgagctgatggccggccacctgaggaaccgcatcacagcagatggagcccactttgagctgcggctgcacctgatctacctgatcaatgatgtgctgcaccactgccagaggaagcaggcccgggagctgctggccgccctgcagaaggtggtggtgcccatctactgcaccagcttcctggccgtggaggaggacaagcagcagaagatcgcccggctgctgcagctgtgggagaagaatggctactttgatgacagcatcatccagcagctgcagagccctgccctgggcctgggccagtaccaggccaccctcatcaatgagtacagctctgtggtgcagcctgtgcagctggccttccagcagcagatccagaccctgaagacccagcacgaggagtttgtgaccagcctggcccagcagcagcagcagcagcagcagcagcagcagcagctgcagatgccccagatggaggccgaggtgaaggccaccccacctcctccagcccctcctccagccccagccccagccccagccatcccccccaccacccagccagatgacagcaagccacccatccagatgcctggcagcagtgaatatgaggcccctgggggcgtgcaggaccctgctgctgctggcccccggggccctggcccccatgaccagatcccccccaacaagccaccctggtttgaccagccccaccctgtggccccctggggccagcagcagcccccagagcagcccccctacccccaccaccagggcggccccccccactgccccccctggaacaacagccatgagggcatgtggggcgagcagagaggagaccccggctggaatggccagagagatgccccctggaacaaccagccagatgctgcctggaacagccagtttgagggcccctggaacagccagcacgagcagcccccctggggcggcggccagcgggagccccccttcaggatgcagaggcctccccacttccggggccccttccccccccaccagcagcacccccagttcaaccagcccccccacccccacaacttcaaccgcttccccccacgcttcatgcaggatgacttccccccaagacacccctttgagaggcctccctacccccacagatttgactacccccagggcgacttccctgctgagatgggccccccccaccaccaccctggccacaggatgccccaccctggcatcaatgagcaccccccctgggccggcccccagcacccagactttggccccccacctcatggcttcaacggccagcccccccacatgaggcggcagggccccccccacatcaaccatgatgaccccagcctggtgcccaacgtgccctactttgacctgcctgctggcctgatggcccccctggtgaagctggaggaccacgagtacaagcccctggaccccaaggacatccggctgcccccacccatgcctccttctgagcggctgctggccgctgtggaggccttctacagcccccccagccatgaccggcccagaaattctgagggctgggagcagaatggcctgtatgagttcttccgggccaagatgagggcccggcggaggaagggccaggagaagaggaacagcggccccagccgcagccgcagccgcagcaagagccggggccgcagcagcagccgcagcaacagccgcagcagcaagagcagcggcagctacagccgcagccgcagccgcagctgcagccgcagctacagccgcagccgcagccgcagccgcagccgcagccgcagcagccgcagccgcagccgcagccagagccgcagccgcagcaagagctacagccctggaagaagaagaagaagccgcagccgcagccccaccccacccagcagcgctggcctgggcagcaacagcgccccacccatcccagacagccggctgggggaggagaacaagggccaccagatgctggtgaagatgggctggagcggcagcggcggcctgggcgccaaggagcagggcatccaggaccccatcaagggaggagatgtgcgggacaagtgggaccagtacaagggcgtgggcgtggccctggatgacccctatgagaactacagaagaaacaagagctacagcttcatcgccaggatgaaggccagagatgagtgcaagtag

SEQ ID NO: 22544 - DNA, 963 bp, synthetic construct
  source 1..963: mol_type = other DNA; note = Synthetic coding sequence
atgagcaagtctgagagccccaaggagcctgagcagctgaggaagctgttcatcggcggcctgagctttgagaccacagatgagagcctgcggagccactttgagcagtggggcaccctgacagactgtgtggtgatgagggaccccaacaccaagaggagccggggctttggatttgtgacctacgccaccgtggaggaggtggatgctgccatgaatgcccggccccacaaggtggatggccgggtggtggagcccaagagagctgtgtcccgggaggacagccagaggcctggggcccacctgactgtgaagaagatctttgtgggcggcatcaaggaggacacagaggagcaccacctgcgggactactttgagcagtatggcaagattgaagtcatcgagatcatgacagaccggggcagcggcaagaagaggggctttgcctttgtgacctttgatgaccatgacagcgtggacaagatcgtcatccagaagtaccacacagtgaatggccacaactgtgaggtgaggaaggccctgagcaagcaggagatggccagcgccagcagcagccagaggggccgcagcggcagcggcaactttggaggcggccggggcggcggctttggaggaaatgacaactttggccggggcggcaacttcagcggccggggcggctttggaggcagcagaggaggcggcggctatggaggcagcggagatggctacaatggatttggaaatgatggcagcaactttggaggcggcggcagctacaatgactttggaaactacaacaaccagagcagcaactttggccccatgaagggcggcaactttggaggccgcagcagcggcccctatggaggcggcggccagtactttgccaagcccaggaaccagggcggctatggaggcagcagcagcagcagcagctatggcagcggccgccgcttctag

SEQ ID NO: 22545 - DNA, 735 bp, synthetic construct; identical to SEQ ID NO: 19104
  source 1..735: mol_type = other DNA; note = Synthetic coding sequence

SEQ ID NO: 22546 - DNA, 4125 bp, synthetic construct
  source 1..4125: mol_type = other DNA; note = Synthetic coding sequence
atgaccagcgctgctgagatcaagaagccccctgtggcccccaagcccaagtttgtggtggccaacaacaagccagcccccccacccatcgcccccaagccagacatcgtcatcagctctgtgccccagagcaccaagaagatgaagccagccatcgcccccaagcccaaggtgctgaagaccagccctgtgcgggagatcggccagagccccagcaggaagatcatgctgaacctggagggccacaagcaggagctggccgagagcacagacaacttcaactgcaagtatgagggcaaccagagcaatgactacatcagccccatgtgcagctgcagcagcgagtgcatccacaagctgggccaccgggagaacctgtgtgtgaagcagctggtgctggagcccctggagatgaatgaaaacctggagaacagcaagattgatgagaccctgaccatcaagaccaggagcaaatgtgacctgtatggagagaaggccaagaaccagggcggcgtggtgctgaaggcctctgtgctggaggaggagctgaaggatgccctgatccaccagatgccacccttcatcagcgcccagaagcaccggcccacagacagccctgagatgaatggaggctgcaacagcaatggccagttccgcatcgagtttgctgacctgagccccagccccagcagctttgagaaggtgcctgaccaccacagctgccacctgcagctgcccagtgatgaatgtgagcactttgagacctgccaggatgacagcgagaagagcaacaactgcttccagagcagcgagctggaggccctggagaatggcaagaggagcaccctcatcagcagtgatggagtgtccaagaagtctgaggtgaaggacctgggccccctggagatccacctggtgccctacacccccaagttccccacccccaagcccaggaagaccaggacagcccggctgctgcggcagaagtgtgtggacaccccatctgagagcacagaggagcccggcaacagcgacagcagcagcagctgcctgacagagaacagcctgaagatcaacaagatctctgtgctgcaccagaatgtgctgtgcaagcaggagcaggtggacaagatgaagctgggcaacaagtctgagctgaacatggagagcaacagtgatgcccaggacctggtgaacagccagaaggccatgtgcaatgagaccaccagctttgagaagatggcccccagctttgacaaggacagcaacctgagcagtgacagcaccaccgtggatggcagctccatgagcctggccgtggatgagggcaccggcttcatccgctgcaccgtgtccatgagcctgcccaagcagctgaagctgacctgcaatgagcacctgcagagcggcaggaacctgggcgtgtctgccccccagatgcagaaggagagcgtcatcaaggaggagaacagcctgcgcatcgtgcccaagaagccccagaggcacagcctgcctgccactggagtgctgaagaaggccgccagcgaggagctgctggagaagagcagctaccccagcagcgaggagaagagcagcgagaagagcctggagaggaaccacctgcagcacctgtgtgcccagaacagaggagtgagcagcagctttgacatgcccaagagggccagcgagaagcctgtgtggaagctgccccaccccatcctgcccttcagcggcaaccctgagttcctgaagtctgtgacagtgagcagcaacagcgagcccagcacagccctgaccaagccccgggccaagagcctgagcgccatggatgtggagaagtgcaccaagccctgcaaggacagcaccaagaagaacagcttcaagaagctgctgtccatgaagctgagcatctgcttcatgaagagtgacttccagaagttctggagcaagagcagccagctgggggacaccaccaccggccacctgagcagcggggagcagaagggcatcgagagtgactggcagggcctgctggtgggggaggagaagaggagcaagcccatcaaggcctacagcacagagaactacagcctggagagccagaagaagaggaagaagagccggggccagaccagcgctgccaacggcctgcgggcagagagcctggatgaccagatgctgagccgggagagcagcagccaggccccctacaagtctgtgaccagcctgtgtgccccagaatatgagaacatccgccactatgaggagatcccagaatatgagaacctgcccttcatcatggccatcaggaagacccaggagctggagtggcagaacagcagctccatggaggatgctgatgccaacgtgtatgaggtggaggagccctatgaggccccagatggccagctgcagctgggccccaggcaccagcacagcagcagcggggccagccaggaggagcagaatgacctgggcctgggggacctgcccagtgatgaggaggagatcatcaacagcagtgatgaagatgatgtgagcagcgagagcagcaagggggagccagaccccctggaggacaagcaggatgaggacaatggcatgaagagcaaggtgcaccacatcgccaaggagatcatgagcagcgagaaggtgtttgtggatgtgctgaagctgctgcacatcgacttcagagatgctgtggcccacgccagccggcagctgggcaagcctgtgattgaggaccgcatcctgaaccagatcctgtactacctgccccagctgtatgagctgaacagagacctgctgaaggagctggaggagaggatgctgcactggacagagcagcagagaattgctgacatctttgtgaagaagggcccctacctgaagatgtacagcacctacatcaaggagtttgacaagaacatcgccctgctggatgagcagtgcaagaagaaccctggctttgctgctgtggtgcgggagtttgagatgagcccccgctgtgccaacctggccctgaagcactacctgctgaagcctgtgcagaggatcccccagtaccgcctgctgctgacagactacctgaagaacctgattgaagatgctggggactacagagacacccaggatgccctggccgtggtgattgaggtggccaaccacgccaatgacaccatgaagcagggcgacaacttccagaagctgatgcagatccagtacagcctgaatggccaccatgaaattgtgcagcccggccgggtcttcctgaaggagggcatcctgatgaagctgagcaggaaggtgatgcagcccaggatgttcttcctgttcaatgatgccctgctgtacaccacccctgtgcagagcggcatgtacaagctgaacaacatgctgagcctggccggcatgaaggtgaggaagcccacccaggaggcctaccagaatgagctgaagattgagagcgtggagaggagcttcatcctgagcgccagcagcgccacagaaagagatgagtggctggaggccatcagccgggccatcgaggagtatgccaagaagaggatcaccttctgccccagccgcagcctggatgaagctgacagcgagaacaaggaggaggtgagccccctgggcagcaaggcccccatctggatcccagacacccgggccaccatgtgcatgatctgcaccagcgagttcaccctgacctggaggaggcaccactgccgggcctgtgggaagatcgtgtgccaggcctgcagcagcaacaagtatggcctggactacctgaagaaccagcctgcccgggtgtgtgagcactgcttccaggagctgcagaagctggaccaccagcacagccccagaattggcagccctggcaaccacaagagccccagcagcgccctgagctctgtgctgcacagcatccccagcggcaggaagcagaagaagatcccagctgccctgaaggaggtgtctgccaacacagaggacagctccatgagcggctacctgtaccgcagcaagggcaacaagaagccctggaagcacttctggtttgtgatcaagaacaaggtgctgtacacctacgccgccagcgaggtgcgctctgagatctag

SEQ ID NO: 22547 - DNA, 1446 bp, synthetic construct; identical to SEQ ID NO: 20055
  source 1..1446: mol_type = other DNA; note = Synthetic coding sequence

SEQ ID NO: 22548 - DNA, 468 bp, synthetic construct
  source 1..468: mol_type = other DNA; note = Synthetic coding sequence
atggacaccatgatgctgaatgtgaggaacctgtttgagcagctggtgagaagagtggagatcctgtctgagggcaatgaggtgcagttcatccagctggccaaggactttgaggacttcaggaagaagtggcagaggacagaccacgagctgggcaagtacaaggacctgctgatgaaggccgagacagagaggtctgccctggatgtgaagctgaagcacgccaggaaccaggtggatgtggagatcaagaggcggcagagagctgaggccgactgtgagaagctggagcggcagatccagctgatccgggagatgctgatgtgtgacaccagcggcagcatccagctgtctgaggagcagaagagcgccctggccttcctgaacagaggccagcccagcagcagcaatgccggcaacaagaggctgagcaccattgatgaaagtggcagcatcctgagtgactag

SEQ ID NO: 22549 - DNA, 420 bp, synthetic construct
  source 1..420: mol_type = other DNA; note = Synthetic coding sequence
atggacaccatgatgctgaatgtgaggaacctgtttgagcagctggtgagaagagtggagatcctgtctgagggcaatgaggtgcagttcatccagctggccaaggactttgaggacttcaggaagaagtggcagaggacagaccacgagctgggcaagtacaaggacctgctgatgaaggccgagacagagaggtctgccctggatgtgaagctgaagcacgccaggaaccaggtggatgtggagatcaagaggcggcagagagctgaggccgactgtgagaagctggagcggcagatccagctgatccgggagatgctgatgtgtgacaccagcggcagcatccagctgtctgaggagcagaagagcgccctggccttcctgaacagaggccagcccagcagcagcaatgccggctag

SEQ ID NO: 22550 - DNA, 3282 bp, synthetic construct
  source 1..3282: mol_type = other DNA; note = Synthetic coding sequence
atgggcggcaaggcctggccccggcgggctgtgggcacagctgggggcccctgtgccgagcagatcagcgcccccttccagaccctgctgatgccccacctgcccctggccagcttccggccccccttctggggcctgcggcacagccggggcctgccccgcttccacagcgtgtccacccagagcgagccccacggcagccccatcagcagaagaaaccgggaggccaagcagaagaggctgcgggagaagcaggccaccctggaggccgagattgctggggagagcaagagccctgctgagagcatcaaggcctggaggcccaaggagctggtgctgtatgagatccccaccaagccaggagagaagaaggatgtgtctggccccctgcccccagcctacagcccccgctacgtggaggccgcctggtacccctggtgggtgcgggagggcttcttcaagccagagtaccaggcccggctgccccaggccactggagagaccttctccatgtgcatccccccaccaaatgtgacaggcagcctgcacatcggccacgccctgactgtggccatccaggatgccctggtgcgctggcacaggatgagaggagaccaggtgctgtgggtgcccggcagtgaccacgccggcatcgccacccaggccgtggtggagaagcagctgtggaaggagcggggcgtgagaagacatgagctgagccgggaggccttcctgcgggaggtgtggcagtggaaggaggccaagggcggggagatctgtgagcagctgcgggccctgggcgccagcctggactgggaccgggagtgcttcaccatggatgtgggcagctctgtggccgtgacagaggcctttgtgcggctgtacaaggccggcctgctgtacagaaaccaccagctggtgaactggagctgtgccctgcggagcgccatcagtgacatcgaggtggagaaccggcccctgcccggccacacccagctgcggctgcccggctgccccacccctgtgtcctttggcctgctcttctctgtggccttccctgtggatggagagccagatgctgaggtggtggtgggcaccaccaggcctgagaccctgcctggagatgtggccgtggccgtgcacccagatgacagccgctacacccacctgcacggccggcagctgcggcaccccctgatgggccagcccctgcccctcatcacagattatgctgtgcagccccacgtgggcaccggggctgtgaaggtgaccccagcccacagccctgcagatgctgagatgggcgcccggcacggcctgagccccctgaatgtgattgctgaagatggcaccatgaccagcctgtgtggggactggctgcagggcctgcacagatttgtggcccgggagaagatcatgtctgtgctgtctgagtggggcctcttccggggcctgcagaaccaccccatggtgctgcccatctgcagccgctctggagatgtgattgagtacctgctgaagaaccagtggtttgtgcgctgccaggagatgggcgcccgggccgccaaggctgtggagagcggggccctggagctgagccccagcttccaccagaagaactggcagcactggttcagccacatcggggactggtgtgtgtcccggcagctgtggtggggccaccagatcccagcctacctggtggtggaggaccacgcccagggcgaggaggactgctgggtggtgggccgctctgaggccgaggcccgggaggtggccgctgagctgaccggccggcctggagctgagctgaccctggagcgggaccctgatgtgctggacacctggttcagcagcgccctcttccccttcagcgccctgggctggccccaggagaccccagacctggcccgcttctaccccctgagcctgctggagactggaagtgacctgctgctcttctgggtgggccgcatggtgatgctgggcacccagctgaccggccagctgcccttcagcaaggtgctgctgcaccccatggtgcgggaccggcagggcaggaagatgagcaagagcctgggcaatgtgctggacccccgggacatcatcagcggcgtggagatgcaggtgctgcaggagaagctgcggagcggcaacctggaccctgctgagctggccatcgtggccgccgcccagaagaaggacttcccccacggcatcccagaatgtggcacagatgccctgcgcttcaccctgtgcagccatggagtgcaggccggggacctgcacctgtctgtgtctgaggtgcagagctgccgccacttctgcaacaagatctggaatgccctgcgcttcatcctgaatgccctgggggagaagtttgtgccccagcctgctgaggagctgagccccagcagccccatggatgcctggatcctgagccggctggccctggccgcccaggagtgtgagcggggcttcctgacccgggagctgagcctggtgacccacgccctgcaccacttctggctgcacaacctgtgtgatgtgtacctggaggccgtgaagcctgtgctgtggcacagcccccggcccctgggccccccccaggtgctcttcagctgtgccgacctgggcctgcggctgctggcccccctgatgcccttcctggccgaggagctgtggcagaggctgcccccccggcccggctgccccccagcccccagcatctctgtggccccctaccccagcgcctgcagcctggagcactggaggcagcctgagctggagcggcgcttcagccgggtgcaggaggtggtgcaggtgctgcgggccctgcgggccacctaccagctgaccaaggcccggccccgggtgctgctgcagagcagcgagcccggggaccagggcctgtttgaggccttcctggagcccctgggcaccctgggctactgtggggctgtgggcctgctgcccccaggagctgctgcccccagcggctgggcccaggcccccctgagtgacacagcccaggtgtacatggagctgcagggcctggtggacccccagatccagctgcccctgctggccgcccggcgctacaagctgcagaagcagctggacagcctgacagcccggaccccatctgagggggaggccggcacccagaggcagcagaagctgagcagcctgcagctggagctgagcaagctggacaaggccgccagccacctgcggcagctgatggatgagcccccagcccctggcagccctgagctgtag

SEQ ID NO: 22551 - DNA, 231 bp, synthetic construct
  source 1..231: mol_type = other DNA; note = Synthetic coding sequence
atgaacagcgtgggggaggcctgcacagacatgaagcgggagtatgaccagtgcttcaaccgctggtttgctgagaagttcctgaagggggacagcagcggggacccctgcacagacctcttcaagcgctaccagcagtgtgtgcagaaggccatcaaggagaaggagatccccatcgagggcctggagttcatgggccacggcaaggagaagccagagaacagcagctag

SEQ ID NO: 22552 - DNA, 735 bp, synthetic construct; identical to SEQ ID NO: 19104
  source 1..735: mol_type = other DNA; note = Synthetic coding sequence

SEQ ID NO: 22553 - DNA, 774 bp, synthetic construct
  source 1..774: mol_type = other DNA; note = Synthetic coding sequence
atgccccacctgcccctggccagcttccggccccccttctggggcctgcggcacagccggggcctgccccgcttccacagcgtgtccacccagagcgagccccacggcagccccatcagcagaagaaaccgggaggccaagcagaagaggctgcgggagaagcaggccaccctggaggccgagattgctggggagagcaagagccctgctgagagcatcaaggcctggaggcccaaggagctggtgctgtatgagatccccaccaagccaggagagaagaaggatgtgtctggccccctgcccccagcctacagcccccgctacgtggaggccgcctggtacccctggtgggtgcgggagggcttcttcaagccagagtaccaggcccggctgccccaggccactggagagaccttctccatgtgcatccccccaccaaatgtgacaggcagcctgcacatcggccacgccctgactgtggccatccaggatgccctggtgcgctggcacaggatgagaggagaccaggtgctgtgggtgcccggcagtgaccacgccggcatcgccacccaggccgtggtggagaagcagctgtggaaggagcggggcgtgagaagacatgagctgagccgggaggccttcctgcgggaggtgtggcagtggaaggaggccaagggcggggagatctgtgagcagctgcgggccctgggcgccagcctggactgggacagagtcttctaccacggctgctggctgctgagcggctgtgactag

SEQ ID NO: 22554 - DNA, 804 bp, synthetic construct
  source 1..804: mol_type = other DNA; note = Synthetic coding sequence
atgagcaagtctgagagccccaaggagcctgagcagctgaggaagctgttcatcggcggcctgagctttgagaccacagatgagagcctgcggagccactttgagcagtggggcaccctgacagactgtgtggtgatgagggaccccaacaccaagaggagccggggctttggatttgtgacctacgccaccgtggaggaggtggatgctgccatgaatgcccggccccacaaggtggatggccgggtggtggagcccaagagagctgtgtcccgggaggacagccagaggcctggggcccacctgactgtgaagaagatctttgtgggcggcatcaaggaggacacagaggagcaccacctgcgggactactttgagcagtatggcaagattgaagtcatcgagatcatgacagaccggggcagcggcaagaagaggggctttgcctttgtgacctttgatgaccatgacagcgtggacaagatcgtcatccagaagtaccacacagtgaatggccacaactgtgaggtgaggaaggccctgagcaagcaggagatggccagcgccagcagcagccagaggggccgcagcggcagcggcaactttggaggcggcagctacaatgactttggaaactacaacaaccagagcagcaactttggccccatgaagggcggcaactttggaggccgcagcagcggcccctacggcggcggcggccagtactttgccaagcccaggaaccagggcggctacggcggcagcagcagcagcagcagctatggcagcggccgccgcttctag

SEQ ID NO: 22555 - DNA, 531 bp, synthetic construct
  source 1..531: mol_type = other DNA; note = Synthetic coding sequence
atgaatgaaagcaagccaggggacagccagaacctggcctgtgtgttctgcaggaagcatgatgactgccccaacaagtatggagagaagaagaccaaggagaagtggaacctgactgtgcactactactgcctgctgatgagcagcggcatctggcagaggggcaaggaggaggagggcgtgtatggcttcctgattgaggacatcaggaaggaggtgaacagagccagcaagctgaagtgctgcgtgtgcaagaagaatggagccagcatcggctgtgtggccccccgctgcaagaggagctaccacttcccctgtggcctgcagcgggagtgcatcttccagttcaccggcaactttgccagcttctgctgggaccacaggcctgtgcagatcatcaccagcaacaactaccgggagagcctgccctgcaccatctgcctggagttcatcgagcccatccccagctacaacatcctgcggagcccctgctgcaagaatgcctggttccaccgggactgcctgcagtag

SEQ ID NO: 22556 - DNA, 3171 bp, synthetic construct
  source 1..3171: mol_type = other DNA; note = Synthetic coding sequence
atgctgtctgtggtggagaatggcctggacccccaggccgccatccctgtgatcaagaagaagctggtgggctctgtgaaggccctgcagaagcagtatgtgtccctggacacagtggtgaccagtgaagatggagatgccaacaccatgtgcagcgccctggaggccgtgttcatccacggcctgcacgccaagcacatccgggcagaggccggcggcaagaggaagaagagcgcccaccagaagcccctgccccagcctgtgttctggcccctgctgaaggctgtgacccacaagcacatcatcagcgagctggagcacctgacctttgtgaacacagatgtgggccgctgccgggcctggctgcggctggccctgaatgatggcctgatggagtgctacctgaagctgctgctgcaggagcaggcccggctgcacgagtactaccagcccacagccctgctgagagatgctgaggagggggagttcctgctgtccttcctgcagggcctgaccagcctgagctttgagctgagctacaagagcgccatcctgaatgagtggaccctgacccccctggccctgagcggcctgtgccccctgtctgagctggaccccctgagcaccagcggggctgagctgcagaggaaggagagcctggacagcatcagccacagcagcggcagcgaggacatcgaggtgcaccacagcggccacaagatcagaagaaaccagaagctgacagccagcagcctgagcctggacacagccagcagcagccagctgagctgcagcctgaacagcgacagctgcctgctgcaggagaatggcagcaagagcccagaccactgtgaggagcccatgagctgtgacagcgacctgggcacagccaatgctgaggacagcgacaggagcctgcaggaggtgctgctggagttcagcaaggcccaggtgaacagcgtgcccaccaacggcctgagccaggagacagagatccccaccccccaggccagcctgagcctgcacggcctgaacaccagcacctacctgcactgtgaggccccagctgagcccctgcctgcccaggccgccagcggcacccaggatggagtgcacgtgcaggagccccggccccaggcccccagccccctggacctgcagcagcctgtggagagcaccagcggccagcagcccagcagcacagtgtctgaaacagcccgggaggtgggccagggcaatggcctgcagaaggcccaggcccatgatggagctggcctgaagctggtggtgagcagccccaccagccccaagaacaagtcctggatcagtgaagatgacttctaccggcccagccgggagcagcccctggagagcgccagtgaccaccccatcgccagctaccggggcaccccaggcagcaggcctggcctgcaccgccacttcagccaggagcccaggaagaactgcagcctgggcgccctggaccaggcctgtgtgcccagccctggccggcggcaggcccaggccgcccccagccagggccacaagagcttccgggtggtgcaccggcggcagatgggcctgagcaaccccttccggggcctgatgaagctgggcaccgtggagaggagaggagccatgggcatctggaaggagctgttctgtgagctgagccccctggagttccggctgtacctgagcaatgaggagcacacctgtgtggagaactgcagcctgctgcgctgtgagagcgtgggccctgcccacagtgatggccgctttgagctggtgttttctgggaagaagctggccctgcgggccagcagccaggatgaagctgaggactggctggacagagtgcgggaggccctgcagaaggtgcggccccagcaggaggatgagtgggtgaatgtgcagtacccagaccagcctgaggagcccccagaggccccccagggctgcctgagccccagcgacctgctgtctgagcctgctgccctgcagggcacccagtttgactggagcagcgcccaggtgcctgagccagatgccatcaaggagagcctgctgtacctgtacatggacaggacctggatgccctacatcttcagcctgagcctggaggccctgaagtgcttccgcatccggaacaatgagaagatgctgagtgacagccacggcgtggagaccatccgggacatcctgcctgacaccagcctgggcggccccagcttcttcaagatcatcacagccaaggctgtgctgaagctgcaggccggaaatgctgaggaggccgccctgtggagggacctggtgaggaaggtgctggccagctacctggagacagctgaggaggccgtgaccctgggcggcagcctggatgagaactgccaggaggtgctgaagtttgccaccagagaaaatggcttcctgctgcagtacctggtggccatccccatggagaagggcctggacagccagggctgcttctgtgccggctgcagccggcagatcggcttctcctttgtgcggcccaagctgtgtgccttcagcggcctgtactactgtgacatctgccaccaggatgatgccagcgtcatcccagcccgcatcatccacaactgggacctgaccaagaggcccatctgccggcaggccctgaagttcctgacccagatccgggcccagcccctcatcaacctgcagatggtgaatgccagcctgtatgaacatgtggagaggatgcacctgattggaagaagaagagagcagctgaagctgctgggggactacctgggcctgtgccgcagcggggccctgaaggagctgagcaagaggctgaaccacaggaactacctgctggagagcccccaccgcttctctgtggccgacctgcagcagattgctgatggagtgtatgagggcttcctgaaggccctgattgaatttgccagccagcacgtgtaccactgtgacctgtgcacccagaggggcttcatctgccagatctgccagcaccacgacatcatcttcccctttgaatttgacaccaccgtgcgctgtgccgagtgcaagacagtgttccaccagagctgccaggccgtggtgaagaagggctgcccccgctgtgcccggcggaggaagtaccaggagcagaacatctttgcctag

SEQ ID NO: 22557 - DNA, 390 bp, synthetic construct; identical to SEQ ID NO: 19988
  source 1..390: mol_type = other DNA; note = Synthetic coding sequence

SEQ ID NO: 22558 - DNA, 348 bp, synthetic construct
  source 1..348: mol_type = other DNA; note = Synthetic coding sequence
atgaccaagaagagaagaaacaacggccgggccaagaagggccggggccacgtgcagcccatccgctgcaccaactgtgcccgctgtgtgcccaaggacaaggccatcaagaagtttgtgatccggaacatcgtggaggccgctgctgtgcgggacatcagcgaggtgtctgtgtttgatgcctacgtgctgcccaagctgtatgtgaagctgcactactgtgtgtcctgtgccatccacagcaaggtggtgaggaacagaagccgggaggccaggaaggacaggaccccaccaccccgcttccggcctgctggggccgcccctggccccccacccaagcccatgtag

SEQ ID NO: 22559 - DNA, 1899 bp, synthetic construct; identical to SEQ ID NO: 18887
  source 1..1899: mol_type = other DNA; note = Synthetic coding sequence

SEQ ID NO: 22560 - DNA, 390 bp, synthetic construct; identical to SEQ ID NO: 19988
  source 1..390: mol_type = other DNA; note = Synthetic coding sequence
